(19) United States
(12) Patent Application Publication
(10) Pub. No.: US 2006/0154250 A1
(43) Pub. Date: Jul. 13, 2006

(54) Novel compositions and methods in cancer

(76) Inventors: David W Morris, Davis, CA (US); Marc S Malandro, Davis, CA (US)

Correspondence Address: SAGRES DISCOVERY INC.;INTELLECTUAL PROPERTY - R440, P.O. BOX 8097, EMERYVILLE, CA, 94662-8097, US

(21) Appl. No.: 10/539,228

(22) PCT Filed: Dec. 15, 2003
(86) PCT No.: PCT/US03/40081

§ 371 Date: Oct. 28, 2005

(30) Foreign Application Priority Data
Dec. 17, 2002 (US) 10/322,281

(51) Int. Cl. C12Q 1/68; G01N 33/574; C07H 21/04; C12P 21/06; C07K 14/82; C07K 16/30

(52) U.S. Cl. 435/6; 435/7.23; 435/69.1; 435/320.1; 435/325; 530/350; 530/388.8; 536/23.5

(57) ABSTRACT

The present invention relates to novel sequences for use in detection, diagnosis and treatment of cancers, especially lymphomas. The invention provides cancer-associated (CA) polynucleotide sequences whose expression is associated with cancer. The present invention provides CA polypeptides associated with cancer and provides diagnostic compositions and methods for the detection of cancer. The present invention provides monoclonal and polyclonal antibodies specific for the CA polypeptides. The present invention also provides diagnostic tools and therapeutic compositions and methods for screening, prevention and treatment of cancer.

### CROSS-REFERENCE TO RELATED APPLICATIONS

[0001] This application is related to U.S. Applications entitled “Novel Compositions and Methods in Cancer,” U.S. Ser. No. 10/034,650, filed Dec. 20, 2001; U.S. Ser. No. 10/035,832, filed Dec. 26, 2001; U.S. Ser. No. 10/004,113, filed Oct. 23, 2001; U.S. Ser. No. 09/997,722, filed Nov. 30, 2001; U.S. Ser. No. 10/085,117, filed Feb. 27, 2002; and U.S. Ser. No. 10/0387,192, filed Mar. 1, 2002, all of which are expressly incorporated herein by reference in their entirety.

### DESCRIPTION OF ACCOMPANYING CD-ROMS

[0002] Tables 1-128 are filed herewith in CD-ROM in accordance with 37 C.F.R, §§ 1.52 and 1.58. Two identical copies (marked “Copy 1” and “Copy 2”) of this CD-ROM are submitted.

[0003] Contents of the CD-ROM disks submitted herewith are hereby incorporated by reference into the Specification.

### TECHNICAL FIELD OF THE INVENTION

[0004] This invention relates generally to the field of cancer-associated genes. Specifically, it relates to novel sequences for use in diagnosis and treatment of cancer and tumors, as well as the use of the novel compositions in screening methods. The present invention provides methods of using cancer associated polynucleotides, their corresponding gene products and antibodies specific for the gene products in the detection, diagnosis, prevention and/or treatment of associated cancers.

### BACKGROUND OF THE INVENTION

[0005] Oncogenes are genes that can cause cancer. Carcinogenesis can occur by a wide variety of mechanisms, including infection of cells by viruses containing oncogenes, activation of protooncogenes in the host genome, and mutations of protooncogenes and tumor suppressor genes. Carcinogenesis is fundamentally driven by somatic cell evolution (i.e. mutation and natural selection of variants with progressive loss of growth control). The genes that serve as targets for these somatic mutations are classified as either protooncogenes or tumor suppressor genes, depending on whether their mutant phenotypes are dominant or recessive, respectively.

[0006] There are a number of viruses known to be involved in human cancer as well as in animal cancer. Of particular interest here are viruses that do not contain oncogenes themselves; these are slow-transforming retroviruses. They induce tumors by integrating into the host genome and affecting neighboring protooncogenes in a variety of ways. Provirus insertion mutation is a normal consequence of the retroviral life cycle. In infected cells, a DNA copy of the retrovirus genome (called a provirus) is integrated into the host genome. A newly integrated provirus can affect gene expression in cis at or near the integration site by one of two mechanisms. Type I insertion mutations up-regulate transcription of proximal genes as a consequence of regulatory sequences (enhancers and/or promoters) within the proviral long terminal repeats (LTRs). Type II insertion mutations cause truncation of coding regions due to either integration directly within an open reading frame or integration within an intron flanked on both sides by coding sequences. The analysis of sequences at or near the insertion sites has led to the identification of a number of new protooncogenes.

[0007] With respect to lymphoma and leukemia, retroviruses such as AKV murine leukemia virus (MLV) or SL3-3 MLV, are potent inducers of tumors when inoculated into susceptible newborn mice, or when carried in the germline. A number of sequences have been identified as relevant in the induction of lymphoma and leukemia by analyzing the insertion sites; see Sorensen et al., J. of Virology 74:2161 (2000); Hansen et al., Genome Res. 10(2):237-43 (2000); Sorensen et al., J. Virology 70:4063 (1996); Sorensen et al., J. Virology 67:7118 (1993); Joosten et al., Virology 268:308 (2000); and Li et al., Nature Genetics 23:348 (1999); all of which are expressly incorporated by reference herein. With respect to cancers, especially breast cancer, prostate cancer and cancers with epithelial origin, the mammalian retrovirus, mouse mammary tumor virus (MMTV) is a potent inducer of tumors when inoculated into susceptible newborn mice, or when carried in the germ line. Mammary Tumors in the Mouse, edited by J. Hilgers and M. Sluyser; Elsevier/North-Holland Biomedical Press; New York, N.Y.

[0008] The pattern of gene expression in a particular living cell is characteristic of its current state. Nearly all differences in the state or type of a cell are reflected in the differences in RNA levels of one or more genes. Comparing expression patterns of uncharacterized genes may provide clues to their function. High throughput analysis of expression of hundreds or thousands of genes can help in (a) identification of complex genetic diseases, (b) analysis of differential gene expression over time, between tissues and disease states, and (c) drug discovery and toxicology studies. Increase or decrease in the levels of expression of certain genes correlate with cancer biology. For example, oncogenes are positive regulators of tumorigenesis, while tumor suppressor genes are negative regulators of tumorigenesis. (Marshall, Cell, 64: 313-326 (1991); Weinberg, Science, 254: 1138-1146 (1991)).

[0009] Accordingly, it is an object of the invention to provide polynucleotide and polypeptide sequences involved in cancer and, in particular, in oncogenesis.

[0010] Immunotherapy, or the use of antibodies for therapeutic purposes has been used in recent years to treat cancer. Passive immunotherapy involves the use of monoclonal antibodies in cancer treatments. See for example, Cancer: Principles and Practice of Oncology, 6^{th} Edition (2001) Ch. 20, pp. 495-508. Inherent therapeutic biological activity of these antibodies include direct inhibition of tumor cell growth or survival, and the ability to recruit the natural cell killing activity of the body's immune system. These agents are administered alone or in conjunction with radiation or chemotherapeutic agents. Rituxan® and Herceptin®, approved for treatment of lymphoma and breast cancer, respectively, are two examples of such therapeutics. Alternatively, antibodies are used to make antibody conjugates where the antibody is linked to a toxic agent and directs that agent to the tumor by specifically binding to the tumor. Mylotarg® is an example of an approved antibody conjugate used for the treatment of leukemia.

[0011] Accordingly, it is another object of this invention to provide antigens (cancer-associated polypeptides) associated with a variety of cancers as targets for diagnostic and/or therapeutic antibodies. These antigens are also useful for drug discovery (e.g. small molecules) and for further characterization of cellular regulation, growth, and differentiation.

### SUMMARY OF THE INVENTION

[0012] In accordance with the objects outlined above, the present invention provides methods for screening for compositions that modulate cancer, especially lymphoma and leukemia. The present invention also provides methods for screening for compositions which modulate carcinomas, especially mammary adenocarcinomas. Also provided herein are methods of inhibiting proliferation of a cell, preferably a lymphoma cell or a breast cancer cell. Methods of treatment of cancer, including diagnosis, are also provided herein.

[0013] In one aspect, a method of screening drug candidates comprises providing a cell that expresses a cancer-associated (CA) gene or fragments thereof. Preferred embodiments of CA genes are genes that are differentially expressed in cancer cells, preferably lymphatic, breast, prostate or epithelial cells, compared to other cells. Preferred embodiments of CA genes used in the methods herein include, but are not limited to the nucleic acids selected from Tables 1-128 (hD07-001 through hD07-128; and hR07-001 through hR07-128). The methods further include adding a drug candidate to the cell and determining the effect of the drug candidate on the expression of the CA gene.

[0014] In one embodiment, the method of screening drug candidates includes comparing the level of expression in the absence of the drug candidate to the level of expression in the presence of the drug candidate.

[0015] Also provided herein is a method of screening for a bioactive agent capable of binding to a CA protein (CAP), the method comprising combining the CAP and a candidate bioactive agent, and determining the binding of the candidate agent to the CAP.

[0016] Further provided herein is a method for screening for a bioactive agent capable of modulating the activity of a CAP. In one embodiment, the method comprises combining the CAP and a candidate bioactive agent, and determining the effect of the candidate agent on the bioactivity of the CAP.

[0017] Also provided is a method of evaluating the effect of a candidate cancer drug comprising administering the drug to a patient and removing a cell sample from the patient. The expression profile of the cell is then determined. This method may further comprise comparing the expression profile of the patient to an expression profile of a healthy individual.

[0018] In a further aspect, a method for inhibiting the activity of a CA protein is provided. In one embodiment, the method comprises administering to a patient an inhibitor of a CA protein preferably selected from the group consisting of the sequences outlined in Tables 1-128 (hP07-001 through hP07-128) or their complements.

[0019] A method of neutralizing the effect of a CA protein, preferably a protein encoded by a nucleic acid selected from the group of sequences outlined in Tables 1-128 (hD07-001 through hD07-128; and hR07-001 through hR07-128), is also provided. Preferably, the method comprises contacting an agent specific for said protein with said protein in an amount sufficient to effect neutralization.

[0020] Moreover, provided herein is a biochip comprising a nucleic acid segment which encodes a CA protein, preferably selected from the sequences outlined in Tables 1-128 (hR07-001 through hR07-128).

[0021] Also provided herein is a method for diagnosing or determining the propensity to cancers, especially lymphoma or leukemia or carcinoma by sequencing at least one carcinoma or lymphoma gene of an individual. In yet another aspect of the invention, a method is provided for determining cancer including lymphoma and leukemia gene copy numbers in an individual.

[0022] Novel sequences associated with cancer are also provided herein. Other aspects of the invention will become apparent to the skilled artisan by the following description of the invention.

### BRIEF DESCRIPTION OF THE FIGURES

[0023] FIG. 1 depicts PCR amplification of host-provirus junction fragments.

[0024] FIG. 2 shows an example of average threshold cycle (C_{T}) values for a housekeeper gene and target gene.

[0025] FIG. 3 shows an example of the calculated difference (ΔΔC_{T}) between the C_{T} values of target and housekeeper genes (ΔC_{T}) for various samples.

[0026] FIG. 4 shows the ΔΔC_{T} and comparative expression level for each sample from FIG. 3.

### DETAILED DESCRIPTION OF PREFERRED EMBODIMENTS

[0027] The present invention is directed to a number of sequences associated with cancers, especially lymphoma, breast cancer or prostate cancer. The relatively tight linkage between clonally-integrated proviruses and protooncogenes forms “provirus tagging”, in which slow-transforming retroviruses that act by an insertion mutation mechanism are used to isolate protooncogenes. In some models, uninfected animals have low cancer rates, and infected animals have high cancer rates. It is known that many of the retroviruses involved do not carry transduced host protooncogenes or pathogenic trans-acting viral genes, and thus the cancer incidence must therefore be a direct consequence of proviral integration effects into host protooncogenes. Since proviral integration is random, rare integrants will “activate” host protooncogenes that provide a selective growth advantage, and these rare events result in new proviruses at clonal stoichiometres in tumors. In contrast to mutations caused by chemicals, radiation, or spontaneous errors, protooncogene insertion mutations can be easily located by virtue of the fact that a convenient-sized genetic marker of known sequence (the provirus) is present at the site of mutation. Host sequences that flank clonally integrated proviruses can be cloned using a variety of strategies. Once these sequences are in hand, the tagged protooncogenes can be subsequently identified. The presence of provirus at the same locus in two or more independent tumors is prima facie evidence that a protooncogene is present at or very near the provirus integration sites. This is because the genome is too large for random integrations to result in observable clustering. Any clustering that is detected is unequivocal evidence for biological selection (i.e. the tumor phenotype). Moreover, the pattern of proviral integrants (including orientations) provides compelling positional information that makes localization of the target gene at each cluster relatively simple. The three mammalian retroviruses that are known to cause cancer by an insertion mutation mechanism are FeLV (leukemia/lymphoma in cats), MLV (leukemia/lymphoma in mice and rats), and MMTV (mammary cancer in mice).

[0028] Thus, the use of oncogenic retroviruses, whose sequences insert into the genome of the host organism resulting in cancer, allows the identification of host sequences involved in cancer. These sequences may then be used in a number of different ways, including diagnosis, prognosis, screening for modulators (including both agonists and antagonists), antibody generation (for immunotherapy and imaging), etc. However, as will be appreciated by those in the art, oncogenes that are identified in one type of cancer such as lymphoma or leukemia have a strong likelihood of being involved in other types of cancers as well. Thus, while the sequences outlined herein are initially identified as correlated with lymphoma, they can also be found in other types of cancers as well, outlined below.

Definitions

[0029] Accordingly, the present invention provides nucleic acid and protein sequences that are associated with cancer, herein termed “cancer associated” or “CA” sequences. In one embodiment, the present invention provides nucleic acid and protein sequences that are associated with cancers that originate in lymphatic tissue, herein termed “lymphoma associated,” “leukemia associated” or “LA” sequences. In another embodiment, the present invention provides nucleic acid and protein sequences that are associated with carcinomas which originate in breast tissue, herein termed “breast cancer associated” or “BC” sequences.

[0030] Suitable cancers that can be diagnosed or screened for using the methods of the present invention include cancers classified by site or by histological type. Cancers classified by site include cancer of the oral cavity and pharynx (lip, tongue, salivary gland, floor of mouth, gum and other mouth, nasopharynx, tonsil, oropharynx, hypopharynx, other oralpharynx); cancers of the digestive system (esophagus; stomach; small intestine; colon and rectum; anus, anal canal, and anorectum; liver; intrahepatic bile duct; gallbladder; other biliary; pancreas; retroperitoneum; peritoneum, omentum, and mesentery; other digestive); cancers of the respiratory system (nasal cavity, middle ear, and sinuses; larynx; lung and bronchus; pleura; trachea, mediastinum, and other respiratory); cancers of the mesothelioma; bones and joints; and soft tissue, including heart; skin cancers, including melanomas and other non-epithelial skin cancers; Kaposi's sarcoma and breast cancer; cancer of the female genital system (cervix uteri; corpus uteri; uterus, nos; ovary; vagina; vulva; and other female genital); cancers of the male genital system (prostate gland; testis; penis; and other male genital); cancers of the urinary system (urinary bladder; kidney and renal pelvis; ureter; and other urinary); cancers of the eye and orbit; cancers of the brain and nervous system (brain; and other nervous system); cancers of the endocrine system (thyroid gland and other endocrine, including thymus); lymphomas (Hodgkin's disease and non-Hodgkin's lymphoma), multiple myeloma, and leukemias (lymphocytic leukemia; myeloid leukemia; monocytic leukemia; and other leukemias).

[0031] Other cancers, classified by histological type, that may be associated with the sequences of the invention include, but are not limited to, Neoplasm, malignant; Carcinoma, NOS; Carcinoma, undifferentiated, NOS; Giant and spindle cell carcinoma; Small cell carcinoma, NOS; Papillary carcinoma, NOS; Squamous cell carcinoma, NOS; Lymphoepithelial carcinoma; Basal cell carcinoma, NOS; Pilomatrix carcinoma; Transitional cell carcinoma, NOS; Papillary transitional cell carcinoma; Adenocarcinoma, NOS; Gastrinoma, malignant; Cholangiocarcinoma; Hepatocellular carcinoma, NOS; Combined hepatocellular carcinoma and cholangiocarcinoma; Trabecular adenocarcinoma; Adenoid cystic carcinoma; Adenocarcinoma in adenomatous polyp; Adenocarcinoma, familial polyposis coli; Solid carcinoma, NOS; Carcinoid tumor, malignant; Bronchiolo-alveolar adenocarcinoma; Papillary adenocarcinoma, NOS; Chromophobe carcinoma; Acidophil carcinoma; Oxyphilic adenocarcinoma; Basophil carcinoma; Clear cell adenocarcinoma, NOS; Granular cell carcinoma; Follicular adenocarcinoma, NOS; Papillary and follicular adenocarcinoma; Nonencapsulating sclerosing carcinoma; Adrenal cortical carcinoma; Endometroid carcinoma; Skin appendage carcinoma; Apocrine adenocarcinoma; Sebaceous adenocarcinoma; Ceruminous adenocarcinoma; Mucoepidermoid carcinoma; Cystadenocarcinoma, NOS; Papillary cystadenocarcinoma, NOS; Papillary serous cystadenocarcinoma; Mucinous cystadenocarcinoma, NOS; Mucinous adenocarcinoma; Signet ring cell carcinoma; Infiltrating duct carcinoma; Medullary carcinoma, NOS; Lobular carcinoma; Inflammatory carcinoma; Paget's disease, mammary; Acinar cell carcinoma; Adenosquamous carcinoma; Adenocarcinoma w/squamous metaplasia; Thymoma, malignant; Ovarian stromal tumor, malignant; Thecoma, malignant; Granulosa cell tumor, malignant; Androblastoma, malignant; Sertoli cell carcinoma; Leydig cell tumor, malignant; Lipid cell tumor, malignant; Paraganglioma, malignant; Extra-mammary paraganglioma, malignant; Pheochromocytoma; Glomangiosarcoma; Malignant melanoma, NOS; Amelanotic melanoma; Superficial spreading melanoma; Malig melanoma in giant pigmented nevus; Epithelioid cell melanoma; Blue nevus, malignant; Sarcoma, NOS; Fibrosarcoma, NOS; Fibrous histiocytoma, malignant; Myxosarcoma; Liposarcoma, NOS; Leiomyosarcoma, NOS; Rhabdomyosarcoma, NOS; Embryonal rhabdomyosarcoma; Alveolar rhabdomyosarcoma; Stromal sarcoma, NOS; Mixed tumor, malignant, NOS; Mullerian mixed tumor; Nephroblastoma; Hepatoblastoma; Carcinosarcoma, NOS; Mesenchymoma, malignant; Brenner tumor, malignant; Phyllodes tumor, malignant; Synovial sarcoma, NOS; Mesothelioma, malignant; Dysgerminoma; Embryonal carcinoma, NOS; Teratoma, malignant, NOS; Struma ovarii, malignant; Choriocarcinoma; Mesonephroma, malignant; Hemangiosarcoma, Hemangioendothelioma, malignant; Kaposi's sarcoma; Hemangiopericytoma, malignant; Lymphangiosarcoma; Osteosarcoma, NOS; Juxtacortical osteosarcoma; Chondrosarcoma, NOS; Chondroblastoma, malignant; Mesenchymal chondrosarcoma; Giant cell tumor of bone; Ewing's sarcoma; Odontogenic tumor, malignant; Ameloblastic odontosarcoma; Ameloblastoma, malignant; Ameloblastic fibrosarcoma; Pinealoma, malignant; Chordoma; Glioma, malignant; Ependymoma, NOS; Astrocytoma, NOS; Protoplasmic astrocytoma; Fibrillary astrocytoma; Astroblastoma; Glioblastoma, NOS; Oligodendroglioma, NOS; Oligodendroblastoma; Primitive neuroectodermal; Cerebellar sarcoma, NOS; Ganglioneuroblastoma; Neuroblastoma, NOS; Retinoblastoma, NOS; Olfactory neurogenic tumor, Meningioma, malignant; Neurofibrosarcoma; Neurilemmoma, malignant; Granular cell tumor, malignant; Malignant lymphoma, NOS; Hodgkin's disease, NOS; Hodgkin's; paragranuloma, NOS; Malignant lymphoma, small lymphocytic; Malignant lymphoma, large cell, diffuse; Malignant lymphoma, follicular, NOS; Mycosis fungoides; Other specified non-Hodgkin's lymphomas; Malignant histiocytosis; Multiple myeloma; Mast cell sarcoma; Immunoproliferative small intestinal disease; Leukemia, NOS; Lymphoid leukemia, NOS; Plasma cell leukemia; Erythroleukemia; Lymphosarcoma cell leukemia; Myeloid leukemia, NOS; Basophilic leukemia; Eosinophilic leukemia; Monocytic leukemia, NOS; Mast cell leukemia; Megakaryoblastic leukemia; Myeloid sarcoma; and Hairy cell leukemia.

[0032] In addition, the CA genes may be involved in other diseases such as, but not limited to, diseases associated with aging or neurodegeneration.

[0033] “Association” in this context means that the nucleotide or protein sequences are either differentially expressed, activated, inactivated or altered in cancers as compared to normal tissue. As outlined below, CA sequences include those that are up-regulated (i.e. expressed at a higher level), as well as those that are down-regulated (i.e. expressed at a lower level), in cancers. CA sequences also include sequences that have been altered (i.e., truncated sequences or sequences with substitutions, deletions or insertions, including point mutations) and show either the same expression profile or an altered profile. In a preferred embodiment, the CA sequences are from humans; however, as will be appreciated by those in the art, CA sequences from other organisms may be useful in animal models of disease and drug evaluation; thus, other CA sequences are provided, from vertebrates, including mammals, including rodents (rats, mice, hamsters, guinea pigs, etc.), primates, and farm animals (including sheep, goats, pigs, cows, horses, etc). In some cases, prokaryotic CA sequences may be useful. CA sequences from other organisms may be obtained using the techniques outlined below.

[0034] CA sequences include both nucleic acid and amino acid sequences. In a preferred embodiment, the CA sequences are recombinant nucleic acids. By the term “recombinant nucleic acid” herein is meant nucleic acid, originally formed in vitro, in general, by the manipulation of nucleic acid by polymerases and endonucleases, in a form not normally found in nature. Thus a recombinant nucleic acid is also an isolated nucleic acid, in a linear form, or cloned in a vector formed in vitro by ligating DNA molecules that are not normally joined, are both considered recombinant for the purposes of this invention. It is understood that once a recombinant nucleic acid is made and reintroduced into a host cell or organism, it will replicate using the in vivo cellular machinery of the host cell rather than in vitro manipulations; however, such nucleic acids, once produced recombinantly, although subsequently replicated in vivo, are still considered recombinant or isolated for the purposes of the invention. As used herein a “polynucleotide” or “nucleic acid” is a polymeric form of nucleotides of any length, either ribonucleotides or deoxyribonucleotides. This term refers only to the primary structure of the molecule. Thus, this term includes double- and single-stranded DNA and RNA. It also includes known types of modifications, for example, labels which are known in the art, methylation, “caps”, substitution of one or more of the naturally occurring nucleotides with an analog, internucleotide modifications such as, for example, those with uncharged linkages (e.g., phosphorothioates, phosphorodithioates, etc.), those containing pendant moieties, such as, for example proteins (including e.g., nucleases, toxins, antibodies, signal peptides, poly-L-lysine, etc.), those with intercalators (e.g., acridine, psoralen, etc.), those containing chelators (e.g., metals, radioactive metals, etc.), those containing alkylators, those with modified linkages (e.g., alpha anomeric nucleic acids, etc.), as well as unmodified forms of the polynucleotide.

[0035] As used herein, a polynucleotide “derived from” a designated sequence refers to a polynucleotide sequence which is comprised of a sequence of approximately at least about 6 nucleotides, preferably at least about 8 nucleotides, more preferably at least about 10-12 nucleotides, and even more preferably at least about 15-20 nucleotides corresponding to a region of the designated nucleotide sequence. “Corresponding” means homologous to or complementary to the designated sequence. Preferably, the sequence of the region from which the polynucleotide is derived is homologous to or complementary to a sequence that is unique to a CA gene.

[0036] Similarly, a “recombinant protein” is a protein made using recombinant techniques, i.e. through the expression of a recombinant nucleic acid as depicted above. A recombinant protein is distinguished from naturally occurring protein by at least one or more characteristics. For example, the protein may be isolated or purified away from some or all of the proteins and compounds with which it is normally associated in its wild type host, and thus may be substantially pure. For example, an isolated protein is unaccompanied by at least some of the material with which it is normally associated in its natural state, preferably constituting at least about 0.5%, more preferably at least about 5% by weight of the total protein in a given sample. A substantially pure protein comprises about 50-75% by weight of the total protein, with about 80% being preferred, and about 90% being particularly preferred. The definition includes the production of a CA protein from one organism in a different organism or host cell. Alternatively, the protein may be made at a significantly higher concentration than is normally seen, through the use of an inducible promoter or high expression promoter, such that the protein is made at increased concentration levels. Alternatively, the protein may be in a form not normally found in nature, as in the addition of an epitope tag or amino acid substitutions, insertions and deletions, as discussed below.

[0037] In a preferred embodiment, the CA sequences are nucleic acids. As will be appreciated by those in the art and is more fully outlined below, CA sequences are useful in a variety of applications, including diagnostic applications, which will detect naturally occurring nucleic acids, as well as screening applications; for example, biochips comprising nucleic acid probes to the CA sequences can be generated. In the broadest sense, use of “nucleic acid,” “polynucleotide” or “oligonucleotide” or equivalents herein means at least two nucleotides covalently linked together. In some embodiments, an oligonucleotide is an oligomer of 6, 8, 10, 12, 20, 30 or up to 100 nucleotides. A “polynucleotide” or “oligonucleotide” may comprise DNA, RNA, PNA or a polymer of nucleotides linked by phosphodiester and/or any alternate bonds.

[0038] A nucleic acid of the present invention generally contains phosphodiester bonds, although in some cases, as outlined below (for example, in antisense applications or when a nucleic acid is a candidate drug agent), nucleic acid analogs may have alternate backbones, comprising, for example, phosphoramidate (Beaucage et al., Tetrahedron 49(10):1925 (1993) and references therein, Letsinger, J. Org. Chem. 35:3800 (1970); Sprinzl et al., Eur. J. Biochem. 81:579 (1977); Letsinger et al., Nucl. Acids Res. 14:3487 (1986); Sawai et al, Chem. Lett. 805 (1984), Letsinger et al., J. Am. Chem. Soc. 110:4470 (1988); and Pauwels et al., Chemica Scripta 26:141 91986)), phosphorothioate (Mag et al., Nucleic Acids Res. 19:1437 (1991); and U.S. Pat. No. 5,644,048), phosphorodithioate (Briu et al., J. Am. Chem. Soc. 111:2321 (1989), O-methylphosphoroamidite linkages (see Eckstein, Oligonucleotides and Analogues: A Practical Approach, Oxford University Press), and peptide nucleic acid backbones and linkages (see Egholm, J. Am. Chem. Soc. 114:1895 (1992); Meier et al., Chem. Int. Ed. Engl. 31:1008 (1992); Nielsen, Nature, 365:566 (1993); Carlsson et al., Nature 380:207 (1996), all of which are incorporated by reference). Other analog nucleic acids include those with positive backbones (Denpcy et al., Proc. Natl. Acad. Sci. USA 92:6097 (1995); non-ionic backbones (U.S. Pat. Nos. 5,386,023, 5,637,684, 5,602,240, 5,216,141 and 4,469,863; Kiedrowshi et al., Angew. Chem. Intl. Ed. English 30:423 (1991); Letsinger et al., J. Am. Chem. Soc. 110:4470 (1988); Letsinger et al., Nucleoside & Nucleotide 13:1597 (1994); Chapters 2 and 3, ASC Symposium Series 580, “Carbohydrate Modifications in Antisense Research”, Ed. Y. S. Sanghui and P. Dan Cook; Mesmaeker et al., Bioorganic & Medicinal Chem. Lett. 4:395 (1994); Jeffs et al., J. Biomolecular NMR 34:17 (1994); Tetrahedron Lett. 37:743 (1996)) and non-ribose backbones, including those described in U.S. Pat. Nos. 5,235,033 and 5,034,506, and Chapters 6 and 7, ASC Symposium Series 580, “Carbohydrate Modifications in Antisense Research”, Ed. Y. S. Sanghui and P. Dan Cook. Nucleic acids containing one or more carbocyclic sugars are also included within one definition of nucleic acids (see Jenkins et al., Chem. Soc. Rev. (1995) pp 169-176). Several nucleic acid analogs are described in Rawls, C & E News Jun. 2, 1997 page 35. All of these references are hereby expressly incorporated by reference. These modifications of the ribose-phosphate backbone may be done for a variety of reasons, for example to increase the stability and half-life of such molecules in physiological environments for use in anti-sense applications or as probes on a biochip.

[0039] As will be appreciated by those in the art, all of these nucleic acid analogs may find use in the present invention. In addition, mixtures of naturally occurring nucleic acids and analogs can be made; alternatively, mixtures of different nucleic acid analogs, and mixtures of naturally occurring nucleic acids and analogs may be made.

[0040] The nucleic acids may be single stranded or double stranded, as specified, or contain portions of both double stranded or single stranded sequence. As will be appreciated by those in the art, the depiction of a single strand “Watson” also defines the sequence of the other strand “Crick”; thus the sequences described herein also includes the complement of the sequence. The nucleic acid may be DNA, both genomic and cDNA, RNA, or a hybrid, where the nucleic acid contains any combination of deoxyribo- and ribo-nucleotides, and any combination of bases, including uracil, adenine, thymine, cytosine, guanine, inosine, xanthine, hypoxanthine, isocytosine, isoguanine, etc. As used herein, the term “nucleoside” includes nucleotides and nucleoside and nucleotide analogs, and modified nucleosides such as amino modified nucleosides. In addition, “nucleoside” includes non-naturally occurring analog structures. Thus for example the individual units of a peptide nucleic acid, each containing a base, are referred to herein as a nucleoside.

[0041] As used herein, the term “tag,” “sequence tag” or “primer tag sequence” refers to an oligonucleotide with specific nucleic acid sequence that serves to identify a batch of polynucleotides bearing such tags therein. Polynucleotides from the same biological source are covalently tagged with a specific sequence tag so that in subsequent analysis the polynucleotide can be identified according to its source of origin The sequence tags also serve as primers for nucleic acid amplification reactions.

[0042] A “microarray” is a linear or two-dimensional array of preferably discrete regions, each having a defined area, formed on the surface of a solid support. The density of the discrete regions on a microarray is determined by the total numbers of target polynucleotides to be detected on the surface of a single solid phase support, preferably at least about 50/cm², more preferably at least about 100/cm², even more preferably at least about 500/cm², and still more preferably at least about 1,000/cm². As used herein, a DNA microarray is an array of oligonucleotide primers placed on a chip or other surfaces used to amplify or clone target polynucleotides. Since the position of each particular group of primers in the array is known, the identities of the target polynucleotides can be determined based on their binding to a particular position in the microarray.

[0043] A “linker” is a synthetic oligodeoxyribonucleotide that contains a restriction site. A linker may be blunt end-ligated onto the ends of DNA fragments to create restriction sites that can be used in the subsequent cloning of the fragment into a vector molecule.

[0044] The term “label” refers to a composition capable of producing a detectable signal indicative of the presence of the target polynucleotide in an assay sample. Suitable labels include radioisotopes, nucleotide chromophores, enzymes, substrates, fluorescent molecules, chemiluminescent moieties, magnetic particles, bioluminescent moieties, and the like. As such, a label is any composition detectable by spectroscopic, photochemical, biochemical, immunochemical, electrical, optical, chemical, or any other appropriate means. The term “label” is used to refer to any chemical group or moiety having a detectable physical property or any compound capable of causing a chemical group or moiety to exhibit a detectable physical property, such as an enzyme that catalyzes conversion of a substrate into a detectable product. The term “label” also encompasses compounds that inhibit the expression of a particular physical property. The label may also be a compound that is a member of a binding pair, the other member of which bears a detectable physical property.

[0045] The term “support” refers to conventional supports such as beads, particles, dipsticks, fibers, filters, membranes, and silane or silicate supports such as glass slides.

[0046] The term “amplify” is used in the broad sense to mean creating an amplification product which may include, for example, additional target molecules, or target-like molecules or molecules complementary to the target molecule, which molecules are created by virtue of the presence of the target molecule in the sample. In the situation where the target is a nucleic acid, an amplification product can be made enzymatically with DNA or RNA polymerases or reverse transcriptases.

[0047] As used herein, a “biological sample” refers to a sample of tissue or fluid isolated from an individual, including but not limited to, for example, blood, plasma, serum, spinal fluid, lymph fluid, skin, respiratory, intestinal and genitourinary tracts, tears, saliva, milk, cells (including but not limited to blood cells), tumors, organs, and also samples of in vitro cell culture constituents.

[0048] The term “biological sources” as used herein refers to the sources from which the target polynucleotides are derived. The source can be of any form of “sample” as described above, including but not limited to, cell, tissue or fluid. “Different biological sources” can refer to different cells/tissues/organs of the same individual, or cells/tissues/organs from different individuals of the same species, or cells/tissues/organs from different species.

Cancer-Associated Sequences

[0049] The CA sequences of the invention were initially identified by infection of mice with a retrovirus such as murine leukemia virus (MLV) resulting in lymphoma Retroviruses have a genome that is made out of RNA. After a retrovirus infects a host cell, a double stranded DNA copy of the retrovirus genome (a “provirus”) is inserted into the genomic DNA of the host cell. The integrated provirus may affect the expression of host genes at or near the site of integration—a phenomenon known as retroviral insertional mutagenesis. Possible changes in the expression of host cell genes include: (i) increased expression of genes near the site of integration resulting from the proximity of elements in the provirus that act as transcriptional promoters and enhancers, (ii) functional inactivation of a gene caused by the integration of a provirus into the gene itself thus preventing the synthesis of a functional gene product, or (iii) expression of a mutated protein that has a different activity to the normal protein. Typically such a protein would be prematurely truncated and lack a regulatory domain near the C terminus. Such a protein might be constitutively active, or act as a dominant negative inhibitor of the normal protein. For example, retrovirus enhancers, including that of SL3-3, are known to act on genes up to approximately 200 kilobases from the insertion site. Moreover, many of these sequences are also involved in other cancers and disease states. Sequences of mouse genes according to this invention, that are identified in this manner are shown as mD07-001 through mD07-128 in Tables 1-128.

[0050] A CA sequence can be initially identified by substantial nucleic acid and/or amino acid sequence homology to the CA sequences outlined herein. Such homology can be based upon the overall nucleic acid or amino acid sequence, and is generally determined as outlined below, using either homology programs or hybridization conditions.

[0051] In one embodiment, CA sequences are those that are up-regulated in cancers; that is, the expression of these genes is higher in cancer tissue as compared to normal tissue of the same differentiation stage. “Up-regulation” as used herein means increased expression by about 50%, preferably about 100%, more preferably about 150% to about 200%, with up-regulation from 300% to 1000% being preferred.

[0052] In another embodiment, CA sequences are those that are down-regulated in cancers; that is, the expression of these genes is lower in cancer tissue as compared to normal tissue of the same differentiation stage. “Down-regulation” as used herein means decreased expression by about 50%, preferably about 100%, more preferably about 150% to about 200%, with down-regulation from 300% to 1000% to no expression being preferred.

[0053] In yet another embodiment, CA sequences are those that have altered sequences but show either the same or an altered expression profile as compared to normal lymphoid tissue of the same differentiation stage. “Altered CA sequences” as used herein also refers to sequences that are truncated, contain insertions or contain point mutations.

[0054] CA proteins of the present invention may be classified as secreted proteins, transmembrane proteins or intracellular proteins. In a preferred embodiment the CA protein is an intracellular protein. Intracellular proteins may be found in the cytoplasm and/or in the nucleus. Intracellular proteins are involved in all aspects of cellular function and replication (including, for example, signaling pathways); aberrant expression of such proteins results in unregulated or disregulated cellular processes. For example, many intracellular proteins have enzymatic activity such as protein kinase activity, protein phosphatase activity, protease activity, nucleotide cyclase activity, polymerase activity and the like. Intracellular proteins also serve as docking proteins that are involved in organizing complexes of proteins, or targeting proteins to various subcellular localizations, and are involved in maintaining the structural integrity of organelles.

[0055] An increasingly appreciated concept in characterizing intracellular proteins is the presence in the proteins of one or more motifs for which defined functions have been attributed. In addition to the highly conserved sequences found in the enzymatic domain of proteins, highly conserved sequences have been identified in proteins that are involved in protein-protein interaction. For example, Src-homology-2 (SH2) domains bind tyrosine-phosphorylated targets in a sequence dependent manner. PTB domains, which are distinct from SH2 domains, also bind tyrosine phosphorylated targets. SH3 domains bind to proline-rich targets. In addition, PH domains, tetratricopeptide repeats and WD domains to name only a few, have been shown to mediate protein-protein interactions. Some of these may also be involved in binding to phospholipids or other second messengers. As will be appreciated by one of ordinary skill in the art, these motifs can be identified on the basis of primary sequence; thus, an analysis of the sequence of proteins may provide insight into both the enzymatic potential of the molecule and/or molecules with which the protein may associate.

[0056] In a preferred embodiment, the CA sequences are transmembrane proteins. Transmembrane proteins are molecules that span the phospholipid bilayer of a cell. They may have an intracellular domain, an extracellular domain, or both. The intracellular domains of such proteins may have a number of functions including those already described for intracellular proteins. For example, the intracellular domain may have enzymatic activity and/or may serve as a binding site for additional proteins. Frequently the intracellular domain of transmembrane proteins serves both roles. For example certain receptor tyrosine kinases have both protein kinase activity and SH2 domains. In addition, autophosphorylation of tyrosines Qn the receptor molecule itself creates binding sites for additional SH2 domain containing proteins.

[0057] Transmembrane proteins may contain from one to many transmembrane domains. For example, receptor tyrosine kinases, certain cytokine receptors, receptor guanylyl cyclases and receptor serine/threonine protein kinases contain a single transmembrane domain. However, various other proteins including channels and adenylyl cyclases contain numerous transmembrane domains. Many important cell surface receptors are classified as “seven transmembrane domain” proteins, as they contain 7 membrane spanning regions. Important transmembrane protein receptors include, but are not limited to insulin receptor, insulin-like growth factor receptor, human growth hormone receptor, glucose transporters, transferrin receptor, epidermal growth factor receptor, low density lipoprotein receptor, leptin receptor, interleukin receptors, e.g. IL-1 receptor, IL-2 receptor, etc. CA proteins may be derived from genes that regulate apoptosis (IL-3, GM-CSF and Bcl-x) or are shown to have a role in the regulation of apoptosis.

[0058] Characteristics of transmembrane domains include approximately 20 consecutive hydrophobic amino acids that may be followed by charged amino acids. Therefore, upon analysis of the amino acid sequence of a particular protein, the localization and number of transmembrane domains within the protein may be predicted.

[0059] The extracellular domains of transmembrane proteins are diverse; however, conserved motifs are found repeatedly among various extracellular domains. Conserved structure and/or functions have been ascribed to different extracellular motifs. For example, cytokine receptors are characterized by a cluster of cysteines and a WSXWS (W=tryptophan, S=serine, X=any amino acid) motif. Immunoglobulin-like domains are highly conserved. Mucin-like domains may be involved in cell adhesion and leucine-rich repeats participate in protein-protein interactions.

[0060] Many extracellular domains are involved in binding to other molecules. In one aspect, extracellular domains are receptors. Factors that bind the receptor domain include circulating ligands, which may be peptides, proteins, or small molecules such as adenosine and the like. For example, growth factors such as EGF, FGF and PDGF are circulating growth factors that bind to their cognate receptors to initiate a variety of cellular responses. Other factors include cytokines, mitogenic factors, neurotrophic factors and the like. Extracellular domains also bind to cell-associated molecules. In this respect, they mediate cell-cell interactions. Cell-associated ligands can be tethered to the cell for example via a glycosylphosphatidylinositol (GPI) anchor, or may themselves be transmembrane proteins. Extracellular domains also associate with the extracellular matrix and contribute to the maintenance of the cell structure.

[0061] CA proteins that are transmembrane are particularly preferred in the present invention as they are good targets for immunotherapeutics, as are described herein. In addition, as outlined below, transmembrane proteins can be also useful in imaging modalities.

[0062] It will also be appreciated by those in the art that a transmembrane protein can be made soluble by removing transmembrane sequences, for example through recombinant methods. Furthermore, transmembrane proteins that have been made soluble can be made to be secreted through recombinant means by adding an appropriate signal sequence.

[0063] In a preferred embodiment, the CA proteins are secreted proteins; the secretion of which can be either constitutive or regulated. These proteins have a signal peptide or signal sequence that targets the molecule to the secretory pathway. Secreted proteins are involved in numerous physiological events; by virtue of their circulating nature, they serve to transmit signals to various other cell types. The secreted protein may function in an autocrine manner (acting on the cell that secreted the factor), a paracrine manner (acting on cells in close proximity to the cell that secreted the factor) or an endocrine manner (acting on cells at a distance). Thus secreted molecules find use in modulating or altering numerous aspects of physiology. CA proteins that are secreted proteins are particularly preferred in the present invention as they serve as good targets for diagnostic markers, for example for blood tests.

CA Sequences and Homologs

[0064] A CA sequence is initially identified by substantial nucleic acid and/or amino acid sequence homology to the CA sequences outlined herein. Such homology can be based upon the overall nucleic acid or amino acid sequence, and is generally determined as outlined below, using either homology programs or hybridization conditions.

[0065] As used herein, a nucleic acid is a “CA nucleic acid” if the overall homology of the nucleic acid sequence to one of the nucleic acids of Tables 1-128 is preferably greater than about 75%, more preferably greater than about 80%, even more preferably greater than about 85% and most preferably greater than 90%. In some embodiments the homology will be as high as about 93 to 95 or 98%. In a preferred embodiment, the sequences that are used to determine sequence identity or similarity are selected from those of the nucleic acids of Tables 1-128. In another embodiment, the sequences are naturally occurring allelic variants of the sequences of the nucleic acids of Tables 1-128. In another embodiment, the sequences are sequence variants as further described herein.

[0066] Homology in this context means sequence similarity or identity, with identity being preferred. A preferred comparison for homology purposes is to compare the sequence containing sequencing errors to the correct sequence. This homology will be determined using standard techniques known in the art, including, but not limited to, the local homology algorithm of Smith & Waterman, Adv. Appl. Math 2:482 (1981), by the homology alignment algorithm of Needleman & Wunsch, J. Mol. Biol. 48:443 (1970), by the search for similarity method of Pearson & Lipman, PNAS USA 85:2444 (1988), by computerized implementations of these algorithms (GAP, BESTFIT, FASTA, and TFASTA in the Wisconsin Genetics Software Package, Genetics Computer Group, 575 Science Drive, Madison, Wis.), the Best Fit sequence program described by Devereux et al., Nucl. Acid Res. 12:387-395 (1984), preferably using the default settings, or by inspection.

[0067] One example of a useful algorithm is PILEUP. PILEUP creates a multiple sequence alignment from a group of related sequences using progressive, pairwise alignments. It can also plot a tree showing the clustering relationships used to create the alignment. PILEUP uses a simplification of the progressive alignment method of Feng & Doolittle, J. Mol. Evol. 35:351-360 (1987); the method is similar to that described by Higgins & Sharp CABIOS 5:151-153 (1989). Useful PILEUP parameters include a default gap weight of 3.00, a default gap length weight of 0.10, and weighted end gaps.

[0068] Another example of a useful algorithm is the BLAST (Basic Local Alignment Search Tool) algorithm, described in Altschul et al., J. Mol. Biol. 215, 403-410, (1990) and Karlin et al., PNAS USA 90:5873-5787 (1993). A particularly useful BLAST program is the WU-BLAST-2 program which was obtained from Altschul et al., Methods in Enzymology, 266: 460-480 (1996); http://blast.wustl.edu/]. WU-BLAST-2 uses several search parameters, most of which are set to the default values. The adjustable-parameters are set with the following values: overlap span=1, overlap fraction=0.125, word threshold (1)=11. The HSP S and HSP S2 parameters are dynamic values and are established by the program itself depending upon the composition of the particular sequence and composition of the particular database against which the sequence of interest is being searched, however, the values may be adjusted to increase sensitivity. A percent amino acid sequence identity value is determined by the number of matching identical residues divided by the total number of residues of the “longer” sequence in the aligned region. The “longer” sequence is the one having the most actual residues in the aligned region (gaps introduced by WU-Blast-2 to maximize the alignment score are ignored).

[0069] Thus, “percent (%) nucleic acid sequence identity” is defined as the percentage of nucleotide residues in a candidate sequence that are identical with the nucleotide residues of the nucleic acids of Tables 1-128. A preferred method utilizes the BLASTN module of WU-BLAST-2 set to the default parameters, with overlap span and overlap fraction set to 1 and 0.125, respectively.

[0070] The alignment may include the introduction of gaps in the sequences to be aligned. In addition, for sequences which contain either more or fewer nucleotides than those of the nucleic acids of Tables 1-128, it is understood that the percentage of homology will be determined based on the number of homologous nucleosides in relation to the total number of nucleosides. Thus homology of sequences shorter than those of the sequences identified herein will be determined using the number of nucleosides in the shorter sequence.

[0071] In another embodiment of the invention, polynucleotide compositions are provided that are capable of hybridizing under moderate to high stringency conditions to a polynucleotide sequence provided herein, or a fragment thereof, or a complementary sequence thereof. Hybridization techniques are well known in the art of molecular biology. For purposes of illustration, suitable moderately stringent conditions for testing the hybridization of a polynucleotide of this invention with other polynucleotides include prewashing in a solution of 5×SSC (“saline sodium citrate”; 9 mM NaCl, 0.9 mM sodium citrate), 0.5% SDS, 1.0 mM EDTA (pH 8.0); hybridizing at 50-60° C., 5×SSC, overnight; followed by washing twice at 65° C. for 20 minutes with each of 2×, 0.5× and 0.2×SSC containing 0.1% SDS. One skilled in the art will understand that the stringency of hybridization can be readily manipulated, such as by altering the salt content of the hybridization solution and/or the temperature at which the hybridization is performed. For example, in another embodiment, suitable highly stringent hybridization conditions include those described above, with the exception that the temperature of hybridization is increased, e.g., to 60-65° C., or 65-70° C. Stringent conditions may also be achieved with the addition of destabilizing agents such as formamide.

[0072] Thus nucleic acids that hybridize under high stringency to the nucleic acids identified in the figures, or their complements, are considered CA sequences. High stringency conditions are known in the art; see for example Maniatis et al., Molecular Cloning: A Laboratory Manual, 2d Edition, 1989, and Short Protocols in Molecular Biology, ed. Ausubel, et al., both of which are hereby incorporated by reference. Stringent conditions are sequence-dependent and will be different in different circumstances. Longer sequences hybridize specifically at higher temperatures. An extensive guide to the hybridization of nucleic acids is found in Tijssen, Techniques in Biochemistry and Molecular Biology—Hybridization with Nucleic Acid Probes, “Overview of principles of hybridization and the strategy of nucleic acid assays” (1993). Generally, stringent conditions are selected to be about 5-10° C. lower than the thermal melting point (Tₘ) for the specific sequence at a defined ionic strength pH The Tₘ is the temperature (under defined ionic strength, pH and nucleic acid concentration) at which 50% of the probes complementary to the target hybridize to the target sequence at equilibrium (as the target sequences are present in excess, at Tₘ, 50% of the probes are occupied at equilibrium). Stringent conditions will be those in which the salt concentration is less than about 1.0 M sodium ion, typically about 0.01 to 1.0 M sodium ion concentration (or other salts) at pH 7.0 to 8.3 and the temperature is at least about 30° C. for short probes (e.g. 10 to 50 nucleotides) and at least about 60° C. for longer probes (e.g. greater than 50 nucleotides). In another embodiment, less stringent hybridization conditions are used; for example, moderate or low stringency conditions may be used, as are known in the art; see Maniatis and Ausubel, supra, and Tijssen, supra.

[0073] In addition, the CA nucleic acid sequences of the invention are fragments of larger genes, i.e. they are nucleic acid segments. Alternatively, the CA nucleic acid sequences can serve as indicators of oncogene position, for example, the CA sequence may be an enhancer that activates a protooncogene. “Genes” in this context includes coding regions, non-coding regions, and mixtures of coding and non-coding regions. Accordingly, as will be appreciated by those in the art, using the sequences provided herein, additional sequences of the CA genes can be obtained, using techniques well known in the art for cloning either longer sequences or the full-length sequences; see Maniatis et al., and Ausubel, et al., supra, hereby expressly incorporated by reference. In general, this is done using PCR, for example, kinetic PCR.

Detection of CA Expression

[0074] Once the CA nucleic acid is identified, it can be cloned and, if necessary, its constituent parts recombined to form the entire CA nucleic acid. Once isolated from its natural source, e.g., contained within a plasmid or other vector or excised therefrom as a linear nucleic acid segment, the recombinant CA nucleic acid can be further used as a probe to identify and isolate other CA nucleic acids, for example additional coding regions. It can also be used as a “precursor” nucleic acid to make modified or variant CA nucleic acids and proteins. In a preferred embodiment, once a CA gene is identified its nucleotide sequence is used to design probes specific for the CA gene.

[0075] The CA nucleic acids of the present invention are used in several ways. In a first embodiment, nucleic acid probes hybridizable to CA nucleic acids are made and attached to biochips to be used in screening and diagnostic methods, or for gene therapy and/or antisense applications. Alternatively, the CA nucleic acids that include coding regions of CA proteins can be put into expression vectors for the expression of CA proteins, again either for screening purposes or for administration to a patient.

[0076] Recent developments in DNA microarray technology make it possible to conduct a large scale assay of a plurality of target CA nucleic acid molecules on a single solid phase support. U.S. Pat. No. 5,837,832 (Chee et al.) and related patent applications describe immobilizing an array of oligonucleotide probes for hybridization and detection of specific nucleic acid sequences in a sample. Target polynucleotides of interest isolated from a tissue of interest are hybridized to the DNA chip and the specific sequences detected based on the target polynucleotides' preference and degree of hybridization at discrete probe locations. One important use of arrays is in the analysis of differential gene expression, where the profile of expression of genes in different cells, often a cell of interest and a control cell, is compared and any differences in gene expression among the respective cells are identified. Such information is useful for the identification of the types of genes expressed in a particular cell or tissue type and diagnosis of cancer conditions based on the expression profile.

[0077] Typically, RNA from the sample of interest is subjected to reverse transcription to obtain labeled cDNA. See U.S. Pat. No. 6,410,229 (Lockhart et al.) The cDNA is then hybridized to oligonucleotides or cDNAs of known sequence arrayed on a chip or other surface in a known order. The location of the oligonucleotide to which the labeled cDNA hybridizes provides sequence information on the cDNA, while the amount of labeled hybridized RNA or cDNA provides an estimate of the relative representation of the RNA or cDNA of interest. See Schena, et al. Science 270:467-470 (1995). For example, use of a cDNA microarray to analyze gene expression patterns in human cancer is described by DeRisi, et al. (Nature Genetics 14:457-460 (1996)).

[0078] In a preferred embodiment, nucleic acid probes corresponding to CA nucleic acids (both the nucleic acid sequences outlined in the figures and/or the complements thereof) are made. Typically, these probes are synthesized based on the disclosed sequences of this invention. The nucleic acid probes attached to the biochip are designed to be substantially complementary to, the CA nucleic acids, i.e. the target sequence (either the target sequence of the sample or to other probe sequences, for example in sandwich assays), such that specific hybridization of the target sequence and the probes of the present invention occurs. As outlined below, this complementarity need not be perfect, in that there may be any number of base pair mismatches that will interfere with hybridization between the target sequence and the single stranded nucleic acids of the present invention. It is expected that the overall homology of the genes at the nucleotide level probably will be about 40% or greater, probably about 60% or greater, and even more probably about 80% or greater; and in addition that there will be corresponding contiguous sequences of about 8-12 nucleotides or longer. However, if the number of mutations is so-great that no hybridization can occur under even the least stringent of hybridization conditions, the sequence is not a complementary target sequence. Thus, by “substantially complementary” herein is meant that the probes are sufficiently complementary to the target sequences to hybridize under normal reaction conditions, particularly high stringency conditions, as outlined herein. Whether or not a sequence is unique to a CA gene according to this invention can be determined by techniques known to those of skill in the art. For example, the sequence can be compared to sequences in databanks, e.g., GeneBank, to determine whether it is present in the uninfected host or other organisms. The sequence can also be compared to the known sequences of other viral agents, including those that are known to induce cancer.

[0079] A nucleic acid probe is generally single stranded but can be partly single and partly double stranded. The strandedness of the probe is dictated by the structure, composition, and properties of the target sequence. In general, the oligonucleotide probes range from about 6, 8, 10, 12, 15, 20, 30 to about 100 bases long, with from about 10 to about 80 bases being preferred, and from about 30 to about 50 bases being particularly preferred. That is, generally entire genes are rarely used as probes. In some embodiments, much longer nucleic acids can be used, up to hundreds of bases. The probes are sufficiently specific to hybridize to complementary template sequence under conditions known by those of skill in the art. The number of mismatches between the probes sequences and their complementary template (target) sequences to which they hybridize during hybridization generally do not exceed 15%, usually do not exceed 10% and preferably do not exceed 5%, as determined by FASTA (default settings).

[0080] Oligonucleotide probes can include the naturally-occurring heterocyclic bases normally found in nucleic acids (uracil, cytosine, thymine, adenine and guanine), as well as modified bases and base analogues. Any modified base or base analogue compatible with hybridization of the probe to a target sequence is useful in the practice of the invention. The sugar or glycoside portion of the probe can comprise deoxyribose, ribose, and/or modified forms of these sugars, such as, for example, 2′-O-alkyl ribose. In a preferred embodiment, the sugar moiety is 2′-deoxyribose; however, any sugar moiety that is compatible with the ability of the probe to hybridize to a target sequence can be used.

[0081] In one embodiment, the nucleoside units of the probe are linked by a phosphodiester backbone, as is well known in the art. In additional embodiments, internucleotide linkages can include any linkage known to one of skill in the art that is compatible with specific hybridization of the probe including, but not limited to phosphorothioate, methylphosphonate, sulfamate (e.g., U.S. Pat. No. 5,470,967) and polyamide (i.e., peptide nucleic acids). Peptide nucleic acids are described in Nielsen et al. (1991) Science 254:1497-1500, U.S. Pat. No. 5,714,331, and Nielsen (1999) Curr. Opin. Biotechnol 10:71-75.

[0082] In certain embodiments, the probe can be a chimeric molecule; i.e., can comprise more than one type of base or sugar subunit, and/or the linkages can be of more than one type within the same primer. The probe can comprise a moiety to facilitate hybridization to its target sequence, as are known in the art, for example, intercalators and/or minor groove binders. Variations of the bases, sugars, and internucleoside backbone, as well as the presence of any pendant group on the probe, will be compatible with the ability of the probe to bind, in a sequence-specific fashion, with its target sequence. A large number of structural modifications, both known and to be developed, are possible within these bounds. Advantageously, the probes according to the present invention may have structural characteristics such that they allow the signal amplification, such structural characteristics being, for example, branched DNA probes as those described by Urdea et al. (Nucleic Acids Symp. Ser., 24:197-200 (1991)) or in the European Patent No. EP-0225,807. Moreover, synthetic methods for preparing the various heterocyclic bases, sugars, nucleosides and nucleotides that form the probe, and preparation of oligonucleotides of specific predetermined sequence, are well-developed and known in the art. A preferred method for oligonucleotide synthesis incorporates the teaching of U.S. Pat. No. 5,419,966.

[0083] Multiple probes may be designed for a particular target nucleic acid to account for polymorphism and/or secondary structure in the target nucleic acid, redundancy of data and the like. In some embodiments, where more than one probe per sequence is used, either overlapping probes or probes to different sections of a single target CA gene are used. That is, two, three, four or more probes, with three being preferred, are used to build in a redundancy for a particular target. The probes can be overlapping (i.e. have some sequence in common), or specific for distinct sequences of a CA gene. When multiple target polynucleotides are to be detected according to the present invention, each probe or probe group corresponding to a particular target polynucleotide is situated in a discrete area of the microarray.

[0084] Probes may be in solution, such as in wells or on the surface of a micro-array, or attached to a solid support. Examples of solid support materials that can be used include a plastic, a ceramic, a metal, a resin, a gel and a membrane. Useful types of solid supports include plates, beads, magnetic material, microbeads, hybridization chips, membranes, crystals, ceramics and self-assembling monolayers. A preferred embodiment comprises a two-dimensional or three-dimensional matrix, such as a gel or hybridization chip with multiple probe binding sites (Pevzner et al., J. Biomol. Struc. & Dym. 9:399-410, 1991; Maskos and Southern, Nuc. Acids Res. 20:1679-84, 1992). Hybridization chips can be used to construct very large probe arrays that are subsequently hybridized with a target nucleic acid. Analysis of the hybridization pattern of the chip can assist in the identification of the target nucleotide sequence. Patterns can be manually or computer analyzed, but it is clear that positional sequencing by hybridization lends itself to computer analysis and automation. Algorithms and software, which have been developed for sequence reconstruction, are applicable to the methods described herein (R Drmanac et al., J. Biomol. Struc. & Dyn. 5:1085-1102, 1991; P. A. Pevzner, J. Biomol. Struc. & Dyn. 7:63-73, 1989).

[0085] As will be appreciated by those in the art, nucleic acids can be attached or immobilized to a solid support in a wide variety of ways. By “immobilized” herein is meant the association or binding between the nucleic acid probe and the solid support is sufficient to be stable under the conditions of binding, washing, analysis, and removal as outlined below. The binding can be covalent or non-covalent. By “non-covalent binding” and grammatical equivalents herein is meant one or more of either electrostatic, hydrophilic, and hydrophobic interactions. Included in non-covalent binding is the covalent attachment of a molecule, such as streptavidin, to the support and the non-covalent binding of the biotinylated probe to the streptavidin. By “covalent binding” and grammatical equivalents herein is meant that the two moieties, the solid support and the probe, are attached by at least one bond, including sigma bonds, pi bonds and coordination bonds. Covalent bonds can be formed directly between the probe and the solid support or can be formed by a cross linker or by inclusion of a specific reactive group on either the solid support or the probe or both molecules. Immobilization may also involve a combination of covalent and non-covalent interactions.

[0086] Nucleic acid probes may be attached to the solid support by covalent binding such as by conjugation with a coupling agent or by, covalent or non-covalent binding such as electrostatic interactions, hydrogen bonds or antibody-antigen coupling, or by combinations thereof. Typical coupling agents include biotin/avidin, biotin/streptavidin, Staphylococcus aureus protein A/IgG antibody F_{c} fragment, and streptavidin/protein A chimeras (T. Sano and C. R. Cantor, Bio/Technology 9:1378-81 (1991)), or derivatives or combinations of these agents. Nucleic acids may be attached to the solid support by a photocleavable bond, an electrostatic bond, a disulfide bond, a peptide bond, a diester bond or a combination of these sorts of bonds. The array may also be attached to the solid support by a selectively releasable bond such as 4,4′-dimethoxytrityl or its derivative. Derivatives which have been found to be useful include 3 or 4 [bis-(4-methoxyphenyl)]-methyl-benzoic acid, N-succinimidyl-3 or 4 [bis-(4-methoxyphenyl)]-methyl-benzoic acid, N-succinimidyl-3 or 4 [bis-(4-methoxyphenyl)]-hydroxymethyl-benzoic acid, N-succinimidyl-3 or 4 [bis-(4-methoxyphenyl)]-chloromethyl-benzoic acid, and salts of these acids.

[0087] In general, the probes are attached to the biochip in a wide variety of ways, as will be appreciated by those in the art. As described herein, the nucleic acids can either be synthesized first, with subsequent attachment to the biochip, or can be directly synthesized on the biochip.

[0088] The biochip comprises a suitable solid substrate. By “substrate” or “solid support” or other grammatical equivalents herein is meant any material that can be modified to contain discrete individual sites appropriate for the attachment or association of the nucleic acid probes and is amenable to at least one detection method. The solid phase support of the present invention can be of any solid materials and structures suitable for supporting nucleotide hybridization and synthesis. Preferably, the solid phase support comprises at least one substantially rigid surface on which the primers can be immobilized and the reverse transcriptase reaction performed. The substrates with which the polynucleotide microarray elements are stably associated may be fabricated from a variety of materials, including plastics, ceramics, metals, acrylamide, cellulose, nitrocellulose, glass, polystyrene, polyethylene vinyl acetate, polypropylene, polymethacrylate, polyethylene, polyethylene oxide, polysilicates, polycarbonates, Teflon®, fluorocarbons, nylon, silicon rubber, polyanhydrides, polyglycolic acid, polylactic acid, polyorthoesters, polypropylfumerate, collagen, glycosaminoglycans, and polyamino acids. Substrates may be two-dimensional or three-dimensional in form, such as gels, membranes, thin films, glasses, plates, cylinders, beads, magnetic beads, optical fibers, woven fibers, etc. A preferred form of array is a three-dimensional array. A preferred three-dimensional array is a collection of tagged beads. Each tagged bead has different primers attached to it. Tags are detectable by signaling means such as color (Luminex, Illumina) and electromagnetic field (Pharmaseq) and signals on tagged beads can even be remotely detected (e.g., using optical fibers). The size of the solid support can be any of the standard microarray sizes, useful for DNA microarray technology, and the size may be tailored to fit the particular machine being used to conduct a reaction of the invention. In general, the substrates allow optical detection and do not appreciably fluoresce.

[0089] In a preferred embodiment, the surface of the biochip and the probe may be derivatized with chemical functional groups for subsequent attachment of the two. Thus, for example, the biochip is derivatized with a chemical functional group including, but not limited to, amino groups, carboxy groups, oxo groups and thiol groups, with amino groups being particularly preferred. Using these functional groups, the probes can be attached using functional groups on the probes. For example, nucleic acids containing amino groups can be attached to surfaces comprising amino groups, for example using linkers as are known in the art; for example, homo-or hetero-bifunctional linkers as are well known (see 1994 Pierce Chemical Company catalog, technical section on cross-linkers, pages 155-200, incorporated herein by reference). In addition, in some cases, additional linkers, such as alkyl groups (including substituted and heteroalkyl groups) may be used.

[0090] In this embodiment, the oligonucleotides are synthesized as is known in the art and then attached to the surface of the solid support. As will be appreciated by those skilled in the art either the 5′ or 3′ terminus may be attached to the solid support, or attachment may be via an internal nucleoside. In an additional embodiment, the immobilization to the solid support may be very strong, yet non-covalent For example, biotinylated oligonucleotides can be made, which bind to surfaces covalently coated with streptavidin, resulting in attachment.

[0091] The arrays may be produced according to any convenient methodology, such as preforming the polynucleotide microarray elements and then stably associating them with the surface. Alternatively, the oligonucleotides may be synthesized on the surface, as is known in the art. A number of different array configurations and methods for their production are known to those of skill in the art and disclosed in WO 95/25116 and WO 95/35505 (photolithographic techniques), U.S. Pat. No. 5,445,934 (in situ synthesis by photolithography), U.S. Pat. No. 5,384,261 (in situ synthesis by mechanically directed flow paths); and U.S. Pat. No. 5,700,637 (synthesis by spotting, printing or coupling); the disclosure of which are herein incorporated in their entirety by reference. Another method for coupling DNA to beads uses specific ligands attached to the end of the DNA to link to ligand-binding molecules attached to a bead. Possible ligand-binding partner pairs include biotin-avidin/streptavidin, or various antibody/antigen pairs such as digoxygenin-antidigoxygenin antibody (Smith et al., “Direct Mechanical Measurements of the Elasticity of Single DNA Molecules by Using Magnetic Beads,” Science 258:1122-1126 (1992)). Covalent chemical attachment of DNA to the support can be accomplished by using standard coupling agents to link the 5′-phosphate on the DNA to coated microspheres through a phosphoamidate bond. Methods for immobilization of oligonucleotides to solid-state substrates are well established. See Pease et al., Proc. Natl. Acad. Sci. USA 91(11):5022-5026 (1994). A preferred method of attaching oligonucleotides to solid-state substrates is described by Guo et al., Nucleic Acids Res. 22:5456-5465 (1994). Immobilization can be accomplished either by in situ DNA synthesis (Maskos and Southern, Nucleic Acids Research, 20:1679-1684 (1992) or by covalent attachment of chemically synthesized oligonucleotides (Guo et al., supra) in combination with robotic arraying technologies.

[0092] In addition to the solid-phase technology represented by biochip arrays, gene expression can also be quantified using liquid-phase arrays. One such system is kinetic polymerase chain reaction (PCR). Kinetic PCR allows for the simultaneous amplification and quantification of specific nucleic acid sequences. The specificity is derived from synthetic oligonucleotide primers designed to preferentially adhere to single-stranded nucleic acid sequences bracketing the target site. This pair of oligonucleotide primers form specific, non-covalently bound complexes on each strand of the target sequence. These complexes facilitate in vitro transcription of double-stranded DNA in opposite orientations. Temperature cycling of the reaction mixture creates a continuous cycle of primer binding, transcription, and re-melting of the nucleic acid to individual strands. The result is an exponential increase of the target dsDNA product. This product can be quantified in real time either through the use of an intercalating dye or a sequence specific probe. SYBR® Greene I, is an example of an intercalating dye, that preferentially binds to dsDNA resulting in a concomitant increase in the fluorescent signal. Sequence specific probes, such as used with TaqMan® technology, consist of a fluorochrome and a quenching molecule covalently bound to opposite ends of an oligonucleotide. The probe is designed to selectively bind the target DNA sequence between the two primers. When the DNA strands are synthesized during the PCR reaction, the fluorochrome is cleaved from the probe by the exonuclease activity of the polymerase resulting in signal dequenching. The probe signaling method can be more specific than the intercalating dye method, but in each case, signal strength is proportional to the dsDNA product produced. Each type of quantification method can be used in multi-well liquid phase arrays with each well representing primers and/or probes specific to nucleic acid sequences of interest. When used with messenger RNA preparations of tissues or cell lines, an array of probe/primer reactions can simultaneously quantify the expression of multiple gene products of interest. See Germer, S., et al., Genome Res. 10:258-266 (2000); Heid, C. A., et al., Genome Res. 6, 986-994 (1996).

Expression of CA Proteins

[0093] In a preferred embodiment, CA nucleic acids encoding CA proteins are used to make a variety of expression vectors to express CA proteins which can then be used in screening assays, as described below. The expression vectors may be either self-replicating extrachromosomal vectors or vectors which integrate into a host genome. Generally, these expression vectors include transcriptional and translational regulatory nucleic acid operably linked to the nucleic acid encoding the CA protein. The term “control sequences” refers to DNA sequences necessary for the expression of an operably linked coding sequence in a particular host organism. The control sequences that are suitable for prokaryotes, for example, include a promoter, optionally an operator sequence, and a ribosome binding site. Eukaryotic cells are known to utilize promoters, polyadenylation signals, and enhancers.

[0094] Nucleic acid is “operably linked” when it is placed into a functional relationship with another nucleic acid sequence. For example, DNA for a presequence or secretory leader is operably linked to DNA for a polypeptide if it is expressed as a preprotein that participates in the secretion of the polypeptide; a promoter or enhancer is operably linked to a coding sequence if it affects the transcription of the sequence; or a ribosome binding site is operably linked to a coding sequence if it is positioned so as to facilitate translation. Generally, “operably linked” means that the DNA sequences being linked are contiguous, and, in the case of a secretory leader, contiguous and in reading phase. However, enhancers do not have to be contiguous. Linking is accomplished by ligation at convenient restriction sites. If such sites do not exist, synthetic oligonucleotide adaptors or linkers are used in accordance with conventional practice. The transcriptional and translational regulatory nucleic acid will generally be appropriate to the host cell used to express the CA protein; for example, transcriptional and translational regulatory nucleic acid sequences from Bacillus are preferably used to express the CA protein in Bacillus. Numerous types of appropriate expression vectors, and suitable regulatory sequences are known in the art for a variety of host cells.

[0095] In general, the transcriptional and translational regulatory sequences may include, but are not limited to, promoter sequences, ribosomal binding sites, transcriptional start and stop sequences, translational start and stop sequences, and enhancer or activator sequences. In a preferred embodiment, the regulatory sequences include a promoter and transcriptional start and stop sequences.

[0096] Promoter sequences encode either constitutive or inducible promoters. The promoters may be either naturally occurring promoters or hybrid promoters. Hybrid promoters, which combine elements of more than one promoter, are also known in the art, and are useful in the present invention.

[0097] In addition, the expression vector may comprise additional elements. For example, the expression vector may have two replication systems, thus allowing it to be maintained in two organisms, for example in mammalian or insect cells for expression and in a prokaryotic host for cloning and amplification. Furthermore, for integrating expression vectors, the expression vector contains at least one sequence homologous to the host cell genome, and preferably two homologous sequences that flank the expression construct. The integrating vector may be directed to a specific locus in the host cell by selecting the appropriate homologous sequence for inclusion in the vector. Constructs for integrating vectors are well known in the art.

[0098] In addition, in a preferred embodiment, the expression vector contains a selectable marker gene to allow the selection of transformed host cells. Selection genes are well known in the art and will vary with the host cell used.

[0099] The CA proteins of the present invention are produced by culturing a host cell transformed with an expression vector containing nucleic acid encoding a CA protein, under the appropriate conditions to induce or cause expression of the CA protein. The conditions appropriate for CA protein expression will vary with the choice of the expression vector and the host cell, and will be easily ascertained by one skilled in the art through routine experimentation. For example, the use of constitutive promoters in the expression vector will require optimizing the growth and proliferation of the host cell, while the use of an inducible promoter requires the appropriate growth conditions for induction. In addition, in some embodiments, the tiling of the harvest is important. For example, the baculoviral systems used in insect cell expression are lytic viruses, and thus harvest time selection can be crucial for product yield.

[0100] Appropriate host cells include yeast, bacteria, archaebacteria, fungi, and insect, plant and animal cells, including mammalian cells. Of particular interest are Drosophila melanogaster cells, Saccharomyces cerevisiae and other yeasts, E. coli, Bacillus subtilis, Sf9 cells, C129 cells, 293 cells, Neurospora, BHK, CHO, COS, HeLa cells, THP1 cell line (a macrophage cell line) and human cells and cell lines.

[0101] In a preferred embodiment, the CA proteins are expressed in mammalian cells Mammalian expression systems are also known in the art, and include retroviral systems. A preferred expression vector system is a retroviral vector system such as is generally described in PCT/US97/01019 and PCT/US97/01048, both of which are hereby expressly incorporated by reference. Of particular use as mammalian promoters are the promoters from mammalian viral genes, since the viral genes are often highly expressed and have a broad host range. Examples include the SV40 early promoter, mouse mammary tumor virus LTR promoter, adenovirus major late promoter, herpes simplex virus promoter, and the CMV promoter. Typically, transcription termination and polyadenylation sequences recognized by mammalian cells are regulatory regions located 3′ to the translation stop codon and thus, together with the promoter elements, flank the coding sequence. Examples of transcription terminator and polyadenylation signals include those derived form SV40.

[0102] The methods of introducing exogenous nucleic acid into mammalian hosts, as well as other hosts, are well known in the art, and will vary with the host cell used. Techniques include dextran-mediated transfection, calcium phosphate precipitation, polybrene mediated transfection, protoplast fusion, electroporation, viral infection, encapsulation of the polynucleotide(s) in liposomes, and direct microinjection of the DNA into nuclei.

[0103] In a preferred embodiment, CA proteins are expressed in bacterial systems. Bacterial expression systems are well known in the art. Promoters from bacteriophage may also be used and are known in the art. In addition, synthetic promoters and hybrid promoters are also useful; for example, the tac promoter is a hybrid of the trp and lac promoter sequences. Furthermore, a bacterial promoter can include naturally occurring promoters of non-bacterial origin that have the ability to bind bacterial RNA polymerase and initiate transcription. In addition to a functioning promoter sequence, an efficient ribosome binding site is desirable. The expression vector may also include a signal peptide sequence that provides for secretion of the CA protein in bacteria. The protein is either secreted into the growth media (gram-positive bacteria) or into the periplasmic space, located between the inner and outer membrane of the cell (gram-negative bacteria). The bacterial expression vector may also include a selectable marker gene to allow for the selection of bacterial strains that have been transformed. Suitable selection genes include genes that render the bacteria resistant to drugs such as ampicillin, chloramphenicol, erythromycin, kanamycin, neomycin and tetracycline. Selectable markers also include biosynthetic genes, such as those in the histidine, tryptophan and leucine biosynthetic pathways. These components are assembled into expression vectors. Expression vectors for bacteria are well known in the art, and include vectors for Bacillus subtilis, E. coli, Streptococcus cremoris, and Streptococcus lividans, among others. The bacterial expression vectors are transformed into bacterial host cells using techniques well known in the art, such as calcium chloride treatment, electroporation, and others.

[0104] In one embodiment, CA proteins are produced in insect cells. Expression vectors for the transformation of insect cells, and in particular, baculovirus-based expression vectors, are well known in the art.

[0105] In a preferred embodiment, CA protein is produced in yeast cells. Yeast expression systems are well known in the art, and include expression vectors for Saccharomyces cerevisiae, Candida albicans and C. maltosa, Hansenula polymorpha, Kluyveromyces fragilis and K. lactis, Pichia guillerimondii and P. pastoris, Schizosaccharomyces pombe, and Yarrowia lipolytica.

[0106] The CA protein may also be made as a fusion protein, using techniques well known in the art. Thus, for example, for the creation of monoclonal antibodies. If the desired epitope is small, the CA protein may be fused to a carrier protein to form an immunogen. Alternatively, the CA protein may be made as a fusion protein to increase expression, or for other reasons. For example, when the CA protein is a CA peptide, the nucleic acid encoding the peptide may be linked to other nucleic acid for expression purposes.

[0107] In one embodiment, the CA nucleic acids, proteins and antibodies of the invention are labeled. By “labeled” herein is meant that a compound has at least one element, isotope or chemical compound attached to enable the detection of the compound. In general, labels fall into three classes: a) isotopic labels, which may be radioactive or heavy isotopes; b) immune labels, which may be antibodies or antigens; and c) colored or fluorescent dyes. The labels may be incorporated into the CA nucleic acids, proteins and antibodies at any position. For example, the label should be capable of producing, either directly or indirectly, a detectable signal. The detectable moiety may be a radioisotope, such as ³H, ¹⁴C, ³²P, ³⁵S, or ¹²⁵I, a fluorescent or chemiluminescent compound, such as fluorescein isothiocyanate, rhodamine, or luciferin, or an enzyme, such as alkaline phosphatase, beta-galactosidase or horseradish peroxidase. Any method known in the art for conjugating the antibody to the label may be employed, including those methods described by Hunter et al., Nature, 144:945 (1962); David et al., Biochemistry, 13:1014 (1974); Pain et al., J. Immunol. Meth., 40:219(1981); and Nygren, J. Histochem. and Cytochem., 30:407(1982).

[0108] Accordingly, the present invention also provides CA protein sequences. A CA protein of the present invention may be identified in several ways. “Protein” in this sense includes proteins, polypeptides, and peptides. As will be appreciated by those in the art, the nucleic acid sequences of the invention can be used to generate protein sequences. There are a variety of ways to do this, including cloning the entire gene and verifying its frame and amino acid sequence, or by comparing it to known sequences to search for homology to provide a frame, assuming the CA protein has homology to some protein in the database being used. Generally, the nucleic acid sequences are input into a program that will search all three frames for homology. This is done in a preferred embodiment using the following NCBI Advanced BLAST parameters. The program is blastx or blastn The database is nr. The input data is as “Sequence in FASTA format”. The organism list is “none”. The “expect” is 10; the filter is default. The “descriptions” is 500, the “alignments” is 500, and the “alignment view” is pairwise. The “query Genetic Codes” is standard (1). The matrix is BLOSUM 62; gap existence cost is 11, per residue gap cost is 1; and the lambda ratio is 0.85 default. This results in the generation of a putative-protein sequence.

[0109] In general, the term “polypeptide” as used herein refers to both the full-length polypeptide encoded by the recited polynucleotide, the polypeptide encoded by the gene represented by the recited polynucleotide, as well as portions or fragments thereof. The present invention encompasses variants of the naturally occurring proteins, wherein such variants are homologous or substantially similar to the naturally occurring protein, and can be of an origin of the same or different species as the naturally occurring protein (e.g., human, murine, or some other species that naturally expresses the recited polypeptide, usually a mammalian species). In general, variant polypeptides have a sequence that has at least about 80%, at least about 81%, at least about 82%, at least about 83%, at least about 84%, at least about 85%, at least about 86%, at least about 87%, at least about 88%, at least about 89%, usually at least about 90%, at least 91%, at least 92%, at least 93%, at least 94%, at least 95%, at least 96%, at least 97%, at least 98% and more usually at least about 99% sequence identity with a differentially expressed polypeptide described herein, as determined by the Smith-Waterman homology search algorithm using an affine gap search with a gap open penalty of 12 and a gap extension penalty of 2, BLOSUM matrix of 62. The Smith-Waterman homology search algorithm is taught in Smith and Waterman, Adv. Appl. Math. (1981) 2: 482-489. The variant polypeptides can be naturally or non-naturally glycosylated, i.e., the polypeptide has a glycosylation pattern that differs from the glycosylation pattern found in the corresponding naturally occurring protein.

[0110] Also within the scope of the invention are variants. Variants of polypeptides include mutants, fragments, and fusions. Mutants can include amino acid substitutions, additions or deletions. The amino acid substitutions can be conservative amino acid substitutions or substitutions to eliminate non-essential amino acids, such as to alter a glycosylation site, a phosphorylation site or an acetylation site, or to minimize misfolding by substitution or deletion of one or more cysteine residues that are not necessary for function. Conservative amino acid substitutions are those that preserve the general charge, hydrophobicity/hydrophilicity, and/or steric bulk of the amino acid substituted. Variants can be designed so as to retain or have enhanced biological activity of a particular region of the protein (e.g. a functional domain and/or, where the polypeptide is a member of a protein family, a region associated with a consensus sequence). Selection of amino acid alterations for production of variants can be based upon the accessibility (interior vs. exterior) of the amino acid (see, e.g., Go et al, Int. J. Peptide Protein Res. (1980) 15:211), the thermostability of the variant polypeptide (see, e.g., Querol et al., Prot. Eng. (1996) 9:265), desired glycosylation sites (see, e.g., Olsen and Thomsen, J. Gen. Microbiol. (1991) 137:579), desired disulfide bridges (see, e.g., Clarke et al., Biochemistry (1993) 32:4322; and Wakarchuk et al., Protein Eng. (1994) 7:1379), desired metal binding sites (see, e.g., Toma et al., Biochemistry (1991) 30:97, and Haezerbrouck et al., Protein Eng. (1993) 6:643), and desired substitutions within proline loops (see, e.g., Masul et al., Appl. Env. Microbiol. (1994) 60:3579). Cysteine-depleted muteins can be produced as disclosed in U.S. Pat. No. 4,959,314.

[0111] Variants also include fragments of the polypeptides disclosed herein, particularly biologically active fragments and/or fragments corresponding to functional domains. Fragments of interest will typically be at least about 8 amino acids (aa) 10 aa, 15 aa, 20 aa, 25 aa, 30 aa, 35 aa, 40 aa, to at least about 45 aa in length, usually at least about 50 aa in length, at least about 75 aa, at least about 100 aa, at least about 125 aa, at least about 150 aa in length, at least about 200 aa, at least about 300 aa, at least about 400 aa and can be as long as 500 aa in length or longer, but will usually not exceed about 1000 aa in length, where the fragment will have a stretch of amino acids that is identical to a polypeptide encoded by a polynucleotide having a sequence of any one of the polynucleotide sequences provided herein, or a homolog thereof. The protein variants described herein are encoded by polynucleotides that are within the scope of the invention. The genetic code can be used to select the appropriate codons to construct the corresponding variants.

[0112] While altered expression of the polynucleotides associated with cancer is observed, altered levels of expression of the polypeptides encoded by these polynucleotides may likely play a role in cancers.

[0113] Also included within one embodiment of CA proteins are amino acid variants of the naturally occurring sequences, as determined herein. Preferably, the variants are preferably greater than about 75% homologous to the wild-type sequence, more preferably greater than about 80%, even more preferably greater than about 85% and most preferably greater than 90%. The present application is also directed to proteins containing polypeptides at least 80%, 85%, 90%, 95%, 96%, 97%, 98% or 99% identical to a CA polypeptide sequence set forth herein. As for nucleic acids, homology in this context means sequence similarity or identity, with identity being preferred. This homology will be determined using standard techniques known in the art as are outlined above for the nucleic acid homologies.

[0114] CA proteins of the present invention may be shorter or longer than the wild type amino acid sequences. Thus, in a preferred embodiment, included within the definition of CA proteins are portions or fragments of the wild type sequences herein. In addition, as outlined above, the CA nucleic acids of the invention may be used to obtain additional coding regions, and thus additional protein sequence, using techniques known in the art

[0115] In a preferred embodiment, the CA proteins are derivative or variant CA proteins as compared to the wild-type sequence. That is, as outlined more fully below, the derivative CA peptide will contain at least one amino acid substitution, deletion or insertion, with amino acid substitutions being particularly preferred. The amino acid substitution, insertion or deletion may occur at any residue within the CA peptide.

[0116] Also included in an embodiment of CA proteins of the present invention are amino acid sequence variants. These variants fall into one or more of three classes: substitutional, insertional or deletional variants. These variants ordinarily are prepared by site-specific mutagenesis of nucleotides in the DNA encoding the CA protein, using cassette or PCR mutagenesis or other techniques well known in the art, to produce DNA encoding the variant, and thereafter expressing the DNA in recombinant cell culture as outlined above. However, variant CA protein fragments having up to about 100-150 residues may be prepared by in vitro synthesis using established techniques. Amino acid sequence variants are characterized by the predetermined nature of the variation, a feature that sets them apart from naturally occurring allelic or interspecies variation of the CA protein amino acid sequence. The variants typically exhibit the same qualitative biological activity as the naturally occurring analogue, although variants can also be selected which have modified characteristics as will be more fully outlined below.

[0117] While the site or region for introducing an amino acid sequence variation is predetermined, the mutation per se need not be predetermined. For example, in order to optimize the performance of a mutation at a given site, random mutagenesis may be conducted at the target codon or region and the expressed CA variants screened for the optimal combination of desired activity. Techniques for making substitution mutations at predetermined sites in DNA having a known sequence are well known, for example, M13 primer mutagenesis and LAR mutagenesis. Screening of the mutants is done using assays of CA protein activities.

[0118] Amino acid substitutions are typically of single residues; insertions usually will be on the order of from about 1 to 20 amino acids, although considerably larger insertions may be tolerated. Deletions range from about 1 to about 20 residues, although in some cases deletions may be much larger.

[0119] Substitutions, deletions, insertions or any combination thereof may be used to arrive at a final derivative. Generally these changes are done on a few amino acids to minimize the alteration of the molecule. However, larger changes may be tolerated in certain circumstances. When small alterations in the characteristics of the CA protein are desired, substitutions are generally made in accordance with the following chart:

CHART 1

| Original | Exemplary |
|---|---|
| Residue | Substitutions |
| Ala | Ser |
| Arg | Lys |
| Asn | Gln, His |
| Asp | Glu |
| Cys | Ser |
| Gln | Asn |
| Glu | Asp |
| Gly | Pro |
| His | Asn, Gln |
| Ile | Leu, Val |
| Leu | Ile, Val |
| Lys | Arg, Gln, Glu |
| Met | Leu, Ile |
| Phe | Met, Leu, Tyr |
| Ser | Thr |
| Thr | Ser |
| Trp | Tyr |
| Tyr | Trp, Phe |
| Val | Ile, Leu |

[0120] Substantial changes in function or immunological identity are made by selecting substitutions that are less conservative than those shown in Chart I. For example, substitutions may be made full length to more significantly affect one or more of the following: the structure of the polypeptide backbone in the area of the alteration (e.g., the alpha-helical or beta-sheet structure); the charge or hydrophobicity of the molecule at the target site; and the bulk of the side chain. The substitutions which in general are expected to produce the greatest changes in the polypeptide's properties are those in which (a) a hydrophilic residue, e.g. seryl or threonyl is substituted for (or by) a hydrophobic residue, e.g. leucyl, isoleucyl, phenylalanyl, valyl or alanyl; (b) a cysteine or proline is substituted for (or by) any other residue; (c) a residue having an electropositive side chain, e.g. lysyl, arginyl, or histidyl, is substituted for (or by) an electronegative residue, e.g. glutamyl or aspartyl; or (d) a residue having a bulky side chain, e.g. phenylalanine, is substituted for (or by) one not having a side chain, e.g. glycine.

[0121] The variants typically exhibit the same qualitative biological activity and will elicit the same immune response as the naturally-occurring analogue, although variants also are selected to modify the characteristics of the CA proteins as needed. Alternatively, the variant may be designed such that the biological activity of the CA protein is altered. For example, glycosylation sites may be altered or removed, dominant negative mutations created, etc.

[0122] Covalent modifications of CA polypeptides are included within the scope of this invention, for example for use in screening. One type of covalent modification includes reacting targeted amino acid residues of a CA polypeptide with an organic derivatizing agent that is capable of reacting with selected side chains or the N-or C-terminal residues of a CA polypeptide. Derivatization with bifunctional agents is useful, for instance, for crosslinking CA polypeptides to a water-insoluble support matrix or surface for use in the method for purifying anti-CA antibodies or screening assays, as is more fully described below. Commonly used crosslinking agents include, e.g., 1,1-bis(diazoacetyl)-2-phenylethane, glutaraldehyde, N-hydroxysuccinimide esters, for example, esters with 4 azidosalicylic acid, homobifunctional imidoesters, including disuccinmidyl esters such as 3,3′-dithiobis(succinimidylpropionate), bifunctional maleimides such as bis-N-maleimido-1,8-octane and agents such as methyl-3-[(p-azidophenyl)dithio]propioimidate.

[0123] Other modifications include deamidation of glutaminyl and asparaginyl residues to the corresponding glutamyl and aspartyl residues, respectively, hydroxylation of proline and lysine, phosphorylation of hydroxyl groups of seryl, threonyl or tyrosyl residues, methylation of the a-amino groups of lysine, arginine, and histidine side chains [T. E. Creighton, Proteins: Structure and Molecular Properties, W.H. Freeman & Co., San Francisco, pp. 79-86 (1983)], acetylation of the N-terminal amine, and amidation of any C-terminal carboxyl group.

[0124] Another type of covalent modification of the CA polypeptide included within the scope of this invention comprises altering the native glycosylation pattern of the polypeptide. “Altering the native glycosylation pattern” is intended for purposes herein to mean deleting one or more carbohydrate moieties found in native sequence CA polypeptide, and/or adding one or more glycosylation sites that are not present in the native sequence CA polypeptide.

[0125] Addition of glycosylation sites to CA polypeptides may be accomplished by altering the amino acid sequence thereof. The alteration may be made, for example, by the addition of, or substitution by, one or more serine or threonine residues to the native sequence CA polypeptide (for O-linked glycosylation sites). The CA amino acid sequence may optionally be altered through changes at the DNA level, particularly by mutating the DNA encoding the CA polypeptide at preselected bases such that codons are generated that will translate into the desired amino acids.

[0126] Another means of increasing the number of carbohydrate moieties on the CA polypeptide is by chemical or enzymatic coupling of glycosides to the polypeptide. Such methods are described in the art, e.g., in WO 87/05330 published 11 Sep. 1987, and in Aplin and Wriston, L A Crit. Rev. Biochem., pp. 259-306 (1981).

[0127] Removal of carbohydrate moieties present on the CA polypeptide may be accomplished chemically or enzymatically or by mutational substitution of codons encoding for amino acid residues that serve as targets for glycosylation. Chemical deglycosylation techniques are known in the art and described, for instance, by Hakimuddin, et al., Arch. Biochem. Biophys., 259:52 (1987) and by Edge et al., Anal. Biochem., 118:131 (1981). Enzymatic cleavage of carbohydrate moieties on polypeptides can be achieved by the use of a variety of endo- and exo-glycosidases as described by Thotakura et al., Meth. Enzymol., 138:350 (1987).

[0128] Another type of covalent modification of CA comprises linking the CA polypeptide to one of a variety of nonproteinaceous polymers, e.g., polyethylene glycol, polypropylene glycol, or polyoxyalkylenes, in the manner set forth in U.S. Pat. No. 4,640,835; 4,496,689; 4,301,144; 4,670,417; 4,791,192 or 4,179,337.

[0129] CA polypeptides of the present invention may also be modified in a way to form chimeric molecules comprising a CA polypeptide fused to another, heterologous polypeptide or amino acid sequence. In one embodiment, such a chimeric molecule comprises a fusion of a CA polypeptide with a tag polypeptide that provides an epitope to which an anti-tag antibody can selectively bind. The epitope tag is generally placed at the amino-or carboxyl-terminus of the CA polypeptide, although internal fusions may also be tolerated in some instances. The presence of such epitope-tagged forms of a CA polypeptide can be detected using an antibody against the tag polypeptide. Also, provision of the epitope tag enables the CA polypeptide to be readily purified by affinity purification using an anti-tag antibody or another type of affinity matrix that binds to the epitope tag. In an alternative embodiment, the chimeric molecule may comprise a fusion of a CA polypeptide with an immunoglobulin or a particular region of an immunoglobulin. For a bivalent form of the chimeric molecule, such a fusion could be to the Fc region of an IgG molecule.

[0130] Various tag polypeptides and their respective antibodies are well known in the art. Examples include poly-histidine (poly-his) or poly-histidine-glycine (poly-his-gly) tags; the flu HA tag polypeptide and its antibody 12CA5 [Field et al., Mol. Cell. Biol., 8:2159-2165 (1988)]; the c-myc tag and the 8F9, 3C7, 6E10, G4, B7 and 9E10 antibodies thereto [Evan et al., Molecular and Cellular Biology, 5:3610-3616 (1985)]; and the Herpes Simplex virus glycoprotein D (gD) tag and its antibody [Paborsky et al., Protein Engineering, 3(6):547-553 (1990)]. Other tag polypeptides include the Flag-peptide [Hopp et al., Bio Technology, 6:1204-1210 (1988)]; the KT3 epitope peptide [Martin et al., Science, 255:192-194 (1992)]; tubulin epitope peptide [Skinner et al., J. Biol. Chem., 266:15163-15166 (1991)]; and the T7 gene 10 protein peptide tag [Lutz-Freyermuth et al., Proc. Natl. Acad. Sci. USA, 87:6393-6397 (1990)].

[0131] Also included with the definition of CA protein in one embodiment are other CA proteins of the CA family, and CA proteins from other organisms, which are cloned and expressed as outlined below. Thus, probe or degenerate polymerase chain reaction (PCR) primer sequences may be used to find other related CA proteins from humans or other organisms. As will be appreciated by those in the art, particularly useful probe and/or PCR primer sequences include the unique areas of the CA nucleic acid sequence. As is generally known in the art, preferred PCR primers are from about 15 to about 35 nucleotides in length, with from about 20 to about 30 being preferred, and may contain inosine as needed. The conditions for the PCR reaction are well known in the art.

[0132] In addition, as is outlined herein, CA proteins can be made that are longer than those encoded by the nucleic acids of the figures, for example, by the elucidation of additional sequences, the addition of epitope or purification tags, the addition of other fusion sequences, etc.

[0133] CA proteins may also be identified as being encoded by CA nucleic acids. Thus, CA proteins are encoded by nucleic acids that will hybridize to the sequences of the sequence listings, or their complements, as outlined herein.

CA Antigens and Antibodies Thereto

[0134] In one embodiment, the invention provides CA specific antibodies. In a preferred embodiment, when the CA protein is to be used to generate antibodies, for example for immunotherapy, the CA protein should share at least one epitope or determinant with the full-length protein. By “epitope” or “determinant” herein is meant a portion of a protein that will generate and/or bind an antibody or T-cell receptor in the context of MHC. Thus, in most instances, antibodies made to a smaller CA protein will be able to bind to the full-length protein. In a preferred embodiment, the epitope is unique; that is, antibodies generated to a unique epitope show little or no cross-reactivity.

[0135] Any polypeptide sequence encoded by the CA polynucleotide sequences may be analyzed to determine certain preferred regions of the polypeptide. Regions of high antigenicity are determined from data by DNASTAR analysis by choosing values that represent regions of the polypeptide that are likely to be exposed on the surface of the polypeptide in an environment in which antigen recognition may occur in the process of initiation of an immune response. For example, the amino acid sequence of a polypeptide encoded by a CA polynucleotide sequence may be analyzed using the default parameters of the DNASTAR computer algorithm (DNASTAR, Inc., Madison, Wis.; http://www.dnastar.com/).

[0136] Polypeptide features that may be routinely obtained using the DNASTAR computer algorithm include, but are not limited to, Garnier-Robson alpha-regions, beta-regions, turn-regions, and coil-regions (Garnier et al. J. Mol. Biol., 120: 97 (1978)); Chou-Fasman alpha-regions, beta-regions, and turn-regions (Adv. in Enzymol., 47:45-148 (1978)); Kyte-Doolittle hydrophilic regions and hydrophobic regions (J. Mol. Biol., 157:105-132 (1982)); Eisenberg alpha- and beta-amphipathic regions; Karplus-Schulz flexible regions; Emini surface-forming regions (J. Virol., 55(3):836-839 (1985)); and Jameson-Wolf regions of high antigenic index (CABIOS, 4(1):181-186 (1988)). Kyte-Doolittle hydrophilic regions and hydrophobic regions, Emini surface-forming regions, and Jameson-Wolf regions of high antigenic index (i.e., containing four or more contiguous amino acids having an antigenic index of greater than or equal to 1.5, as identified using the default parameters of the Jameson-Wolf program) can routinely be used to determine polypeptide regions that exhibit a high degree of potential for antigenicity. One approach for preparing antibodies to a protein is the selection and preparation of an amino acid sequence of all or part of the protein, chemically synthesizing the sequence and injecting it into an appropriate animal, typically a rabbit, hamster or a mouse. Oligopeptides can be selected as candidates for the production of an antibody to the CA protein based upon the oligopeptides lying in hydrophilic regions, which are thus likely to be exposed in the mature protein. Additional oligopeptides can be determined using, for example, the Antigenicity Index, Welling, G. W. et al., FEBS Lett. 188:215-218 (1985), incorporated herein by reference.

[0137] In one embodiment, the term “antibody” includes antibody fragments, as are known in the art, including Fab, Fab₂, single chain antibodies (Fv for example), chimeric antibodies, etc., either produced by the modification of whole antibodies or those synthesized de novo using recombinant DNA technologies.

[0138] Methods of preparing polyclonal antibodies are known to the skilled artisan. Polyclonal antibodies can be raised in a mammal, for example, by one or more injections of an immunizing agent and, if desired, an adjuvant. Typically, the immunizing agent and/or adjuvant will be injected in the mammal by multiple subcutaneous or intraperitoneal injections. The immunizing agent may include a protein encoded by a nucleic acid of the figures or fragment thereof or a fusion protein thereof. It may be useful to conjugate the immunizing agent to a protein known to be immunogenic in the mammal being immunized. Examples of such immunogenic proteins include but are not limited to keyhole limpet hemocyanin, serum albumin, bovine thyroglobulin, and soybean trypsin inhibitor. Examples of adjuvants that may be employed include Freund's complete adjuvant and MPL-TDM adjuvant (monophosphoryl Lipid A, synthetic trehalose dicorynomycolate). The immunization protocol may be selected by one skilled in the art without undue experimentation.

[0139] The antibodies may, alternatively, be monoclonal antibodies. Monoclonal antibodies may be prepared using hybridoma methods, such as those described by Kohler and Milstein, Nature, 256:495 (1975). In a hybridoma method, a mouse, hamster, or other appropriate host animal, is typically immunized with an immunizing agent to elicit lymphocytes that produce or are capable of producing antibodies that will specifically bind to the immunizing agent. Alternatively, the lymphocytes may be immunized in vitro. The immunizing agent will typically include a polypeptide encoded by a nucleic acid of Tables 1-128, or fragment thereof or a fusion protein thereof. Generally, either peripheral blood lymphocytes (“PBLs”) are used if cells of human origin are desired, or spleen cells or lymph node cells are used if non-human mammalian sources are desired. The lymphocytes are then fused with an immortalized cell line using a suitable fusing agent, such as polyethylene glycol, to form a hybridoma cell (Goding, Monoclonal Antibodies: Principles and Practice, Academic Press, (1986) pp. 59-103). Immortalized cell lines are usually transformed mammalian cells, particularly myeloma cells of rodent, bovine and human origin. Usually, rat or mouse myeloma cell lines are employed. The hybridoma cells may be cultured in a suitable culture medium that preferably contains one or more substances that inhibit the growth or survival of the unfused, immortalized cells. For example, if the parental cells lack the enzyme hypoxanthine guanine phosphoribosyl transferase (HGPRT or HPRT), the culture medium for the hybridomas typically will include hypoxanthine, aminopterin, and thymidine (“HAT medium”), which substances prevent the growth of HGPRT-deficient cells.

[0140] Monoclonal antibody technology is used in implementing research, diagnosis and therapy. Monoclonal antibodies are used in radioimmunoassays, enzyme-linked immunosorbent assays, immunocytopathology, and flow cytometry for in vitro diagnosis, and in vivo for diagnosis and immunotherapy of human disease. Waldmann, T. A. (1991) Science 252:1657-1662. In particular, monoclonal antibodies have been widely applied to the diagnosis and therapy of cancer, wherein it is desirable to target malignant lesions while avoiding normal tissue. See, e.g., U.S. Pat. No. 4,753,894 to Frankel, et al.; U.S. Pat. No. 4,938,948 to Ring et al.; and U.S. Pat. No. 4,956,453 to Bjorn et al.

[0141] In one embodiment, the antibodies are bispecific antibodies. Bispecific antibodies are monoclonal, preferably human or humanized, antibodies that have binding specificities for at least two different antigens. A number of “humanized” antibody molecules comprising an antigen-binding site derived from a non-human immunoglobulin have been described, including chimeric antibodies having rodent V regions and their associated CDRs fused to human constant domains (Winter et al. (1991) Nature 349:293-299; Lobuglio et al. (1989) Proc. Nat. Acad. Sci. USA 86:42204224; Shaw et al. (1987) J Immunol. 138:4534-4538; and Brown et al. (1987) Cancer Res. 47:3577-3583), rodent CDRs grafted into a human supporting FR prior to fusion with an appropriate human antibody constant domain (Riechmann et al. (1988) Nature 332:323-327; Verhoeyen et al. (1988) Science 239:1534-1536; and Jones et al. (1986) Nature 321:522-525), and rodent CDRs supported by recombinantly veneered rodent FRs (European Patent Publication No. 519,596, published Dec. 23, 1992). These “humanized” molecules are designed to minimize unwanted immunological response toward rodent antihuman antibody molecules which limits the duration and effectiveness of therapeutic applications of those moieties in human recipients. In the present case, one of the binding specificities is for a protein encoded by a nucleic acid of Tables 1-128, or a fragment thereof, the other one is for any other antigen, and preferably for a cell-surface protein or receptor or receptor subunit, preferably one that is tumor specific.

[0142] In a preferred embodiment, the antibodies to CA are capable of reducing or eliminating the biological function of CA, as is described below. That is, the addition of anti-CA antibodies (either polyclonal or preferably monoclonal) to CA (or cells containing CA) may reduce or eliminate the CA activity. Generally, at least a 25% decrease in activity is preferred, with at least about 50% being particularly preferred and about a 95-100% decrease being especially preferred.

[0143] In a preferred embodiment the antibodies to the CA proteins are humanized antibodies. “Humanized” antibodies refer to a molecule having an antigen binding site that is substantially derived from an immunoglobulin from a non-human species and the remaining immunoglobulin structure of the molecule based upon the structure and/or sequence of a human immunoglobulin. The antigen binding site may comprise either complete variable domains fused onto constant domains or only the complementarity determining regions (CDRs) grafted onto appropriate framework regions in the variable domains. Antigen binding sites may be wild type or modified by one or more amino acid substitutions, e.g., modified to resemble human immunoglobulin more closely. Alternatively, a humanized antibody may be derived from a chimeric antibody that retains or substantially retains the antigen-binding properties of the parental, non-human, antibody but which exhibits diminished immunogenicity as compared to the parental antibody when administered to humans. The phrase “chimeric antibody,” as used herein, refers to an antibody containing sequence derived from two different antibodies (see, e.g., U.S. Pat. No. 4,816,567) that typically originate from different species. Typically, in these chimeric antibodies, the variable region of both light and heavy chains mimics the variable regions of antibodies derived from one species of mammals, while the constant portions are homologous to the sequences in antibodies derived from another. Most typically, chimeric antibodies comprise human and murine antibody fragments, generally human constant and mouse variable regions. Humanized antibodies include human immunoglobulins (recipient antibody) in which residues form a complementary determining region (CDR) of the recipient are replaced by residues from a CDR of a non-human species (donor antibody) such as mouse, rat or rabbit having the desired specificity, affinity and capacity. In some instances, Fv framework residues of the human immunoglobulin are replaced by corresponding non-human residues. Humanized antibodies may also comprise residues that are found neither in the recipient antibody nor in the imported CDR or framework sequences. In general, the humanized antibody will comprise substantially all of at least one, and typically two, variable domains, in which all or substantially all of the CDR regions correspond to those of a non-human immunoglobulin and all or substantially all of the framework residues (FR) regions are those of a human immunoglobulin consensus sequence. The humanized antibody optimally also will comprise at least a portion of an immunoglobulin constant region (Fc), typically that of a human immunoglobulin (Jones et al., Nature, 321:522-525 (1986); Riechmann et al., Nature, 332:323-329 (1988); and Presta, Curr. Op. Struct. Biol., 2:593-596 (1992)). One clear advantage to such chimeric forms is that, for example, the variable regions can conveniently be derived from presently known sources using readily available hybridomas or B cells from non human host organisms in combination with constant regions derived from, for example, human cell preparations. While the variable region has the advantage of ease of preparation, and the specificity is not affected by its source, the constant region being human, is less likely to elicit an immune response from a human subject when the antibodies are injected than would the constant region from a non-human source. However, the definition is not limited to this particular example.

[0144] Because humanized antibodies are far less immunogenic in humans than the parental mouse monoclonal antibodies, they can be used for the treatment of humans with far less risk of anaphylaxis. Thus, these antibodies may be preferred in therapeutic applications that involve in vivo administration to a human such as, e.g., use as radiation sensitizers for the treatment of neoplastic disease or use in methods to reduce the side effects of, e.g., cancer therapy. Methods for humanizing non-human antibodies are well known in the art. Generally, a humanized antibody has one or more amino acid residues introduced into it from a source that is non-human. These non-human amino acid residues are often referred to as import residues, which are typically taken from an import variable domain. Humanization can be essentially performed following the method of Winter and co-workers (Jones et al., Nature 321:522-525 (1986); Riechmann et al., Nature 332:323-327 (1988); Verhoeyen et al., Science 239:1534-1536 (1988)), by substituting rodent CDRs or CDR sequences for the corresponding sequences of a human antibody. Accordingly, such humanized antibodies are chimeric antibodies (U.S. Pat. No. 4,816,567), wherein substantially less than an intact human variable domain has been substituted by the corresponding sequence from a non-human species. In practice, humanized antibodies are typically human antibodies in which some CDR residues and possibly some FR residues are substituted by residues from analogous sites in rodent antibodies.

[0145] Human antibodies can also be produced using various techniques known in the art, including phage display libraries [Hoogenboom and Winter, J. Mol. Biol., 227:381 (1991); Marks et al., J. Mol. Biol., 222:581 (1991)]. The techniques of Cole et al. and Boerner et al. are also available for the preparation of human monoclonal antibodies [Cole et al., Monoclonal Antibodies and Cancer Therapy, Alan R. Liss, p. 77 (1985) and Boerner et al., J. Immunol., 147(1):86-95 (1991)]. Humanized antibodies may be achieved by a variety of methods including, for example: (1) grafting the non-human complementarity determining regions (CDRs) onto a human framework and constant region (a process referred to in the art as “humanizing”), or, alternatively, (2) transplanting the entire non-human variable domains, but “cloaking” them with a human-like surface by replacement of surface residues (a process referred to in the art as “veneering”). In the present invention, humanized antibodies will include both “humanized” and “veneered” antibodies. Similarly, human antibodies can be made by introducing human immunoglobulin loci into transgenic animals, e.g., mice in which the endogenous immunoglobulin genes have been partially or completely inactivated. Upon challenge, human antibody production is observed, which closely resembles that seen in humans in all respects, including gene rearrangement, assembly, and antibody repertoire. This approach is described, for example, in U.S. Pat. Nos. 5,545,807; 5,545,806; 5,569,825; 5,625,126; 5,633,425; 5,661,016, and in the following scientific publications: Marks et al., Bio/Technology 10, 779-783 (1992); Lonberg et al., Nature 368 856-859 (1994); Morrison, Nature 368, 812-13 (1994); Fishwild et al., Nature Biotechnology 14, 845-51 (1996); Neuberger, Nature Biotechnology 14, 826 (1996); Lonberg and Huszar, Inter Rev. Immunol. 13 65-93 (1995); Jones et al., Nature 321:522-525 (1986); Morrison et al., Proc. Natl. Acad Sci, USA, 81:6851-6855 (1984); Morrison and Oi, Adv. Immunol., 44:65-92 (1988); Verhoeyer et al., Science 239:1534-1536 (1988); Padlan, Molec. Immunol. 28:489-498 (1991); Padlan, Molec. Immunol. 31(3):169-217 (1994); and Kettleborough, C. A. et al., Protein Eng 4(7):773-83 (1991) each of which is incorporated herein by reference.

[0146] The phrase “complementarity determining region” refers to amino acid sequences which together define the binding affinity and specificity of the natural Fv region of a native immunoglobulin binding site. See, e.g. Chothia et al., J. Mol. Biol. 196:901-917 (1987); Kabat et al., U.S. Dept of Health and Human Services NIH Publication No. 91-3242 (1991). The phrase “constant region” refers to the portion of the antibody molecule that confers effector functions. In the present invention, mouse constant regions are substituted by human constant regions. The constant regions of the subject humanized antibodies are derived from human immunoglobulins. The heavy chain constant region can be selected from any of the five isotypes: alpha, delta, epsilon, gamma or mu. One method of humanizing antibodies comprises aligning the non-human heavy and light chain sequences to human heavy and light chain sequences, selecting and replacing the non-human framework with a human framework based on such alignment, molecular modeling to predict the conformation of the humanized sequence and comparing to the conformation of the parent antibody. This process is followed by repeated back mutation of residues in the CDR region that disturb the structure of the CDRs until the predicted conformation of the humanized sequence model closely approximates the conformation of the non-human CDRs of the parent non-human antibody. Such humanized antibodies may be further derivatized to facilitate uptake and clearance, e.g; via Ashwell receptors. See, e.g., U.S. Pat. Nos. 5,530,101 and 5,585,089 which are incorporated herein by reference.

[0147] Humanized antibodies to CA polypeptides can also be produced using transgenic animals that are engineered to contain human immunoglobulin loci. For example, WO 98/24893 discloses transgenic animals having a human Ig locus wherein the animals do not produce functional endogenous immunoglobulins due to the inactivation of endogenous heavy and light chain loci. WO 91/10741 also discloses transgenic non-primate mammalian hosts capable of mounting an immune response to an immunogen, wherein the antibodies have primate constant and/or variable regions, and wherein the endogenous immunoglobulin-encoding loci are substituted or inactivated. WO 96/30498 discloses the use of the Cre/Lox system to modify the immunoglobulin locus in a mammal, such as to replace all or a portion of the constant or variable region to form a modified antibody molecule. WO 94/02602 discloses non-human mammalian hosts having inactivated endogenous Ig loci and functional human Ig loci. U.S. Pat. No. 5,939,598 discloses methods of making transgenic mice in which the mice lack endogenous heavy chains, and express an exogenous immunoglobulin locus comprising one or more xenogeneic constant regions.

[0148] Using a transgenic animal described above, an immune response can be produced to a selected antigenic molecule, and antibody-producing cells can be removed from the animal and used to produce hybridomas that secrete human monoclonal antibodies. Immunization protocols, adjuvants, and the like are known in the art, and are used in immunization of, for example, a transgenic mouse as described in WO 96/33735. The monoclonal antibodies can be tested for the ability to inhibit or neutralize the biological activity or physiological effect of the corresponding protein.

[0149] In the present invention, CA polypeptides of the invention and variants thereof are used to immunize a transgenic animal as described above. Monoclonal antibodies are made using methods known in the art, and the specificity of the antibodies is tested using isolated CA polypeptides. Methods for preparation of the human or primate CA or an epitope thereof include, but are not limited to chemical synthesis, recombinant DNA techniques or isolation from biological samples. Chemical synthesis of a peptide can be performed, for example, by the classical Merrifeld method of solid phase peptide synthesis (Merrifeld, J. Am. Chem. Soc. 85:2149, 1963 which is incorporated by reference) or the FMOC strategy on a Rapid Automated Multiple Peptide Synthesis system (E.I. du Pont de Nemours Company, Wilmington, Del.) (Caprino and Han, J. Org. Chem. 37:3404, 1972 which is incorporated by reference).

[0150] Polyclonal antibodies can be prepared by immunizing rabbits or other animals by injecting antigen followed by subsequent boosts at appropriate intervals. The animals are bled and sera assayed against purified CA proteins usually by ELISA or by bioassay based upon the ability to block the action of CA proteins. When using avian species, e.g., chicken, turkey and the like, the antibody can be isolated from the yolk of the egg. Monoclonal antibodies can be prepared after the method of Milstein and Kohler by fusing splenocytes from immunized mice with continuously replicating tumor cells such as myeloma or lymphoma cells. (Milstein and Kohler, Nature 256:495-497, 1975; Gulfre and Milstein, Methods in Enzymology: Immunochemical Techniques 73:146, Langone and Banatis eds., Academic Press, 1981 which are incorporated by reference). The hybridoma cells so formed are then cloned by limiting dilution methods and supernates assayed for antibody production by ELISA, RIA or bioassay.

[0151] The unique ability of antibodies to recognize and specifically bind to target proteins provides an approach for treating an overexpression of the protein. Thus, another aspect of the present invention provides for a method for preventing or treating diseases involving overexpression of a CA polypeptide by treatment of a patient with specific antibodies to the CA protein.

[0152] Specific antibodies, either polyclonal or monoclonal, to the CA proteins can be produced by any suitable method known in the art as discussed above. For example, murine or human monoclonal antibodies can be produced by hybridoma technology or, alternatively, the CA proteins, or an immunologically active fragment thereof, or an anti-idiotypic antibody, or fragment thereof can be administered to an animal to elicit the production of antibodies capable of recognizing and binding to the CA proteins. Such antibodies can be from any class of antibodies including, but not limited to IgG, IgA, IgM, IgD, and IgE or in the case of avian species, IgY and from any subclass of antibodies.

[0153] By immunotherapy is meant treatment of a cancer with an antibody raised against a CA protein. As used herein, immunotherapy can be passive or active. Passive immunotherapy as defined herein is the passive transfer of antibody to a recipient (patient). Active immunization is the induction of antibody and/or T-cell responses in a recipient (patient). Induction of an immune response is the result of providing the recipient with an antigen to which antibodies are raised. As appreciated by one of ordinary skill in the art, the antigen may be provided by injecting a polypeptide against which antibodies are desired to be raised into a recipient, or contacting the recipient with a nucleic acid capable of expressing the antigen and under conditions for expression of the antigen.

[0154] In a preferred embodiment, oncogenes which encode secreted growth factors may be inhibited by raising antibodies against CA proteins that are secreted proteins as described above. Without being bound by theory, antibodies used for treatment, bind and prevent the secreted protein from binding to its receptor, thereby inactivating the secreted CA protein.

[0155] In another preferred embodiment, the CA protein to which antibodies are raised is a transmembrane protein. Without being bound by theory, antibodies used for treatment, bind the extracellular domain of the CA protein and prevent it from binding to other proteins, such as circulating ligands or cell-associated molecules. The antibody may cause down-regulation of the transmembrane CA protein. As will be appreciated by one of ordinary skill in the art, the antibody may be a competitive, non-competitive or uncompetitive inhibitor of protein binding to the extracellular domain of the CA protein. The antibody is also an antagonist of the CA protein. Further, the antibody prevents activation of the transmembrane CA protein. In one aspect, when the antibody prevents the binding of other molecules to the CA protein, the antibody prevents growth of the cell. The antibody may also sensitize the cell to cytotoxic agents, including, but not limited to TNF-α, TNF-β, IL-1, INF-γ and IL-2, or chemotherapeutic agents including 5FU, vinblastine, actinomycin D, cisplatin, methotrexate, and the like. In some instances the antibody belongs to a sub-type that activates serum complement when complexed with the transmembrane protein thereby mediating cytotoxicity. Thus, cancers may be treated by administering to a patient antibodies directed against the transmembrane CA protein.

[0156] In another preferred embodiment, the antibody is conjugated to a therapeutic moiety. In one aspect the therapeutic moiety is a small molecule that modulates the activity of the CA protein. In another aspect the therapeutic moiety modulates the activity of molecules associated with or in close proximity to the CA protein. The therapeutic moiety may inhibit enzymatic activity such as protease or protein kinase activity associated with cancer.

[0157] In a preferred embodiment, the therapeutic moiety may also be a cytotoxic agent. In this method, radioisotopes, natural toxins, chemotherapy agents, or other substances (such as biological response modifiers) are chemically linked or conjugated to a monoclonal antibody to form “immunoconjugates” and “immunotoxins” which target the cytotoxic agent to tumor tissue or cells resulting in a reduction in the number of afflicted cells, thereby reducing symptoms associated with cancers, including lymphoma Cytotoxic agents are numerous and varied and include, but are not limited to, cytotoxic drugs or toxins or active fragments of such toxins. Suitable toxins and their corresponding fragments include diphtheria A chain, exotoxin A chain, ricin A chain, abrin A chain, curcin, crotin, phenomycin, enomycin and the like. Cytotoxic agents also include radiochemicals made by conjugating radioisotopes to antibodies raised against CA proteins, or binding of a radionuclide to a chelating agent that has been covalently attached to the antibody. Targeting the therapeutic moiety to transmembrane CA proteins not only serves to increase the local concentration of therapeutic moiety in the cancer of interest, i.e., lymphoma, but also serves to reduce deleterious side effects that may be associated with the therapeutic moiety. A number of investigators have used monoclonal antibodies as carriers of cytotoxic substances in attempts to selectively direct those agents to malignant tissue. More particularly, a number of monoclonal antibodies have been conjugated to toxins such as ricin, abrin, diphtheria toxin and Pseudomonas exotoxin or to enzymatically active portions (A chains) thereof via heterobifunctional agents. See, e.g., U.S. Pat. No. 4,753,894 to Frankel et al.; Nevelle, et al. (1982) Immunol Rev 62:75-91; Ross et al. (1980)Eur. J. Biochem 104; Vitteta et al. (1982) Immunol Rev 62:158-183; Raso et al. (1982) Cancer Res 42:457-464, and Trowbridge et al. (1981) Nature 294:171-173.

[0158] In another preferred embodiment, the CA protein against which the antibodies are raised is an intracellular protein. In this case, the antibody may be conjugated to a protein that facilitates entry into the cell. In one case, the antibody enters the cell by endocytosis. In another embodiment, a nucleic acid encoding the antibody is administered to the individual or cell. Moreover, wherein the CA protein can be targeted within a cell, e.g., the nucleus, an antibody thereto contains a signal for that target localization, e.g., a nuclear localization signal.

[0159] The CA antibodies of the invention specifically bind to CA proteins. By “specifically bind” herein is meant that the antibodies bind to the protein with a binding constant in the range of 10⁻⁴-10⁻⁶ M⁻¹, with a preferred range being 10⁻⁷-10⁻⁹ M⁻¹.

[0160] In a preferred embodiment, the CA protein is purified or isolated after expression. CA proteins may be isolated or purified in a variety of ways known to those skilled in the art depending on what other components are present in the sample. Standard purification methods include electrophoretic, molecular, immunological and chromatographic techniques, including ion exchange, hydrophobic, affinity, and reverse-phase HPLC chromatography, and chromatofocusing. For example, the CA protein may be purified using a standard anti-CA antibody column. Ultrafiltration and diafiltration techniques, in conjunction with protein concentration, are also useful. For general guidance in suitable purification techniques, see Scopes, R., Protein Purification, Springer-Verlag, N.Y. (1982). The degree of purification necessary will vary depending on the use of the CA protein. In some instances no purification will be necessary.

Detection of Cancer Phenotype

[0161] Once expressed and purified if necessary, the CA proteins and nucleic acids are useful in a number of applications. In one aspect, the expression levels of genes are determined for different cellular states in the cancer phenotype; that is, the expression levels of genes in normal tissue and in cancer tissue (and in some cases, for varying severities of lymphoma that relate to prognosis, as outlined below) are evaluated to provide expression profiles. An expression profile of a particular cell state or point of development is essentially a “fingerprint” of the state; while two states may have any particular gene similarly expressed, the evaluation of a number of genes simultaneously allows the generation of a gene expression profile that is unique to the state of the cell. By comparing expression profiles of cells in different states, information regarding which genes are important (including both up- and down-regulation of genes) in each of these states is obtained. Then, diagnosis may be done or confirmed: does tissue from a particular patient have the gene expression profile of normal or cancer tissue.

[0162] “Differential expression,” or equivalents used herein, refers to both qualitative as well as quantitative differences in the temporal and/or cellular expression patterns of genes, within and among the cells. Thus, a differentially expressed gene can qualitatively have its expression altered, including an activation or inactivation, in, for example, normal versus cancer tissue. That is, genes may be turned on or turned off in a particular state, relative to another state. As is apparent to the skilled artisan, any comparison of two or more states can be made. Such a qualitatively regulated gene will exhibit an expression pattern within a state or cell type which is detectable by standard techniques in one such state or cell type, but is not detectable in both. Alternatively, the determination is quantitative in that expression is increased or decreased; that is, the expression of the gene is either up-regulated, resulting in an increased amount of transcript, or down-regulated, resulting in a decreased amount of transcript. The degree to which expression differs need only be large enough to quantify via standard characterization techniques as outlined below, such as by use of Affymetrix GeneChip® expression arrays, Lockhart, Nature Biotechnology, 14:1675-1680 (1996), hereby expressly incorporated by reference. Other techniques include, but are not limited to, quantitative reverse transcriptase PCR, Northern analysis and RNase protection. As outlined above, preferably the change in expression (i.e. upregulation or downregulation) is at least about 50%, more preferably at least about 100%, more preferably at least about 150%, more preferably, at least about 200%, with from 300 to at least 1000% being especially preferred.

[0163] As will be appreciated by those in the art, this may be done by evaluation at either the gene transcript, or the protein level; that is, the amount of gene expression may be monitored using nucleic acid probes to the DNA or RNA equivalent of the gene transcript, and the quantification of gene expression levels, or, alternatively, the final gene product itself (protein) can be monitored, for example through the use of antibodies to the CA protein and standard immunoassays (ELISAs, etc.) or other techniques, including mass spectroscopy assays, 2D gel electrophoresis assays, etc. Thus, the proteins corresponding to CA genes, i.e. those identified as being important in a particular cancer phenotype, i.e., lymphoma, can be evaluated in a diagnostic test specific for that cancer.

[0164] In a preferred embodiment, gene expression monitoring is done and a number of genes, i.e. an expression profile, is monitored simultaneously, although multiple protein expression monitoring can be done as well. Similarly, these assays may be done on an individual basis as well.

[0165] In this embodiment, the CA nucleic acid probes may be attached to biochips as outlined herein for the detection and quantification of CA sequences in a particular cell. The assays are done as is known in the art. As will be appreciated by those in the art, any number of different CA sequences may be used as probes, with single sequence assays being used in some cases, and a plurality of the sequences described herein being used in other embodiments. In addition, while solid-phase assays are described, any number of solution based assays may be done as well.

[0166] In a preferred embodiment, both solid and solution based assays may be used to detect CA sequences that are up-regulated or down-regulated in cancers as compared to normal tissue. In instances where the CA sequence has been altered but shows the same expression profile or an altered expression profile, the protein will be detected as outlined herein.

[0167] In a preferred embodiment nucleic acids encoding the CA protein are detected. Although DNA or RNA encoding the CA protein may be detected, of particular interest are methods wherein the mRNA encoding a CA protein is detected. The presence of mRNA in a sample is an indication that the CA gene has been transcribed to form the mRNA, and suggests that the protein is expressed. Probes to detect the mRNA can be any nucleotide/deoxynucleotide probe that is complementary to and base pairs with the mRNA and includes but is not limited to oligonucleotides, cDNA or RNA. Probes also should contain a detectable label, as defined herein. In one method the mRNA is detected after immobilizing the nucleic acid to be examined on a solid support such as nylon membranes and hybridizing the probe with the sample. Following washing to remove the non-specifically bound probe, the label is detected. In another method detection of the mRNA is performed in situ. In this method permeabilized cells or tissue samples are contacted with a detectably labeled nucleic acid probe for sufficient time to allow the probe to hybridize with the target mRNA. Following washing to remove the non-specifically bound probe, the label is detected. For example a digoxygenin labeled riboprobe (RNA probe) that is complementary to the mRNA encoding a CA protein is detected by binding the digoxygenin with an anti-digoxygenin secondary antibody and developed with nitro blue tetrazolium and 5-bromo-4-chloro-3-indoyl phosphate.

[0168] In a preferred embodiment, any of the three classes of proteins as described herein (secreted, transmembrane or intracellular proteins) are used in diagnostic assays. The CA proteins, antibodies, nucleic acids, modified proteins and cells containing CA sequences are used in diagnostic assays. This can be done on an individual gene or corresponding polypeptide level, or as sets of assays.

[0169] As described and defined herein, CA proteins find use as markers of cancers, including lymphomas such as, but not limited to, Hodgkin's and non-Hodgkin's lymphoma Detection of these proteins in putative cancer tissue or patients allows for a determination or diagnosis of the type of cancer. Numerous methods known to those of ordinary skill in the art find use in detecting cancers. In one embodiment, antibodies are used to detect CA proteins. A preferred method separates proteins from a sample or patient by electrophoresis on a gel (typically a denaturing and reducing protein gel, but may be any other type of gel including isoelectric focusing gels and the like). Following separation of proteins, the CA protein is detected by immunoblotting with antibodies raised against the CA protein. Methods of immunoblotting are well known to those of ordinary skill in the art.

[0170] In another preferred method, antibodies to the CA protein find use in in situ imaging techniques. In this method cells are contacted with from one to many antibodies to the CA protein(s). Following washing to remove non-specific antibody binding, the presence of the antibody or antibodies is detected. In one embodiment the antibody is detected by incubating with a secondary antibody that contains a detectable label. In another method the primary antibody to the CA protein(s) contains a detectable label. In another preferred embodiment each one of multiple primary antibodies contains a distinct and detectable label. This method finds particular use in simultaneous screening for a plurality of CA proteins. As will be appreciated by one of ordinary skill in the art, numerous other histological imaging techniques are useful in the invention.

[0171] In a preferred embodiment the label is detected in a fluorometer that has the ability to detect and distinguish emissions of different wavelengths. In addition, a fluorescence activated cell sorter (FACS) can be used in the method.

[0172] In another preferred embodiment, antibodies find use in diagnosing cancers from blood samples. As previously described, certain CA proteins are secreted/circulating molecules. Blood samples, therefore, are useful as samples to be probed or tested for the presence of secreted CA proteins. Antibodies can be used to detect the CA proteins by any of the previously described immunoassay techniques including ELISA, immunoblotting (Western blotting), immunoprecipitation, BIACORE technology and the like, as will be appreciated by one of ordinary skill in the art

[0173] In a preferred embodiment, in situ hybridization of labeled CA nucleic acid probes to tissue arrays is done. For example, arrays of tissue samples, including CA tissue and/or normal tissue, are made. In situ hybridization as is known in the art can then be done.

[0174] It is understood that when comparing the expression fingerprints between an individual and a standard, the skilled artisan can make a diagnosis as well as a prognosis. It is further understood that the genes that indicate diagnosis may differ from those that indicate prognosis.

[0175] In a preferred embodiment, the CA proteins, antibodies, nucleic acids, modified proteins and cells containing CA sequences are used in prognosis assays. As above, gene expression profiles can be generated that correlate to cancer, especially lymphoma, severity, in terms of long term prognosis. Again, this may be done on either a protein or gene level, with the use of genes being preferred. As above, the CA probes are attached to biochips for the detection and quantification of CA sequences in a tissue or patient. The assays proceed as outlined for diagnosis.

Screening for CA-Targeted Drugs

[0176] In one embodiment, any of the CA sequences as described herein are used in drug screening assays. The CA proteins, antibodies, nucleic acids, modified proteins and cells containing CA sequences are used in drug screening assays or by evaluating the effect of drug candidates on a “gene expression profile” or expression profile of polypeptides. In one embodiment, the expression profiles are used, preferably in conjunction with high throughput screening techniques to allow monitoring for expression profile genes after treatment with a candidate agent, Zlokarnik, et al., Science 279, 84-8 (1998), Heid, et al., Genome Res., 6:986-994 (1996).

[0177] In another embodiment, the CA proteins, antibodies, nucleic acids, modified proteins and cells containing the native or modified CA proteins are used in screening assays. That is, the present invention provides novel methods for screening for compositions that modulate the cancer phenotype. As above, this can be done by screening for modulators of gene expression or for modulators of protein activity. Similarly, this may be done on an individual gene or protein level or by evaluating the effect of drug candidates on a “gene expression profile”. In a preferred embodiment, the expression profiles are used, preferably in conjunction with high throughput screening techniques to allow monitoring for expression profile genes after treatment with a candidate agent, see Zlokarnik, supra.

[0178] Having identified the CA genes herein, a variety of assays to evaluate the effects of agents on gene expression may be executed. In a preferred embodiment, assays may be run on an individual gene or protein level. That is, having identified a particular gene as aberrantly regulated in cancer, candidate bioactive agents may be screened to modulate the gene's regulation. “Modulation” thus includes both an increase and a decrease in gene expression or activity. The preferred amount of modulation will depend on the original change of the gene expression in normal versus tumor tissue, with changes of at least 10%, preferably 50%, more preferably 100-300%, and in some embodiments 300-1000% or greater. Thus, if a gene exhibits a 4 fold increase in tumor compared to normal tissue, a decrease of about four fold is desired; a 10 fold decrease in tumor compared to normal tissue gives a 10 fold increase in expression for a candidate agent is desired, etc. Alternatively, where the CA sequence has been altered but shows the same expression profile or an altered expression profile, the protein will be detected as outlined herein.

[0179] As will be appreciated by those in the art, this may be done by evaluation at either the gene or the protein level; that is, the amount of gene expression may be monitored using nucleic acid probes and the quantification of gene expression levels, or, alternatively, the level of the gene product itself can be monitored, for example through the use of antibodies to the CA protein and standard immunoassays. Alternatively, binding and bioactivity assays with the protein may be done as outlined below.

[0180] In a preferred embodiment, gene expression monitoring is done and a number of genes, i.e. an expression profile, is monitored simultaneously, although multiple protein expression monitoring can be done as well.

[0181] In this embodiment, the CA nucleic acid probes are attached to biochips as outlined herein for the detection and quantification of CA sequences in a particular cell. The assays are further described below.

[0182] Generally, in a preferred embodiment, a candidate bioactive agent is added to the cells prior to analysis. Moreover, screens are provided to identify a candidate bioactive agent that modulates a particular type of cancer, modulates CA proteins, binds to a CA protein, or interferes between the binding of a CA protein and an antibody.

[0183] The term “candidate bioactive agent” or “drug candidate” or grammatical equivalents as used herein describes any molecule, e.g., protein, oligopeptide, small organic or inorganic molecule, polysaccharide, polynucleotide, etc., to be tested for bioactive agents that are capable of directly or indirectly altering either the cancer phenotype, binding to and/or modulating the bioactivity of a CA protein, or the expression of a CA sequence, including both nucleic acid sequences and protein sequences. In a particularly preferred embodiment, the candidate agent suppresses a CA phenotype, for example to a normal tissue fingerprint. Similarly, the candidate agent preferably suppresses a severe CA phenotype. Generally a plurality of assay mixtures are run in parallel with different agent concentrations to obtain a differential response to the various concentrations. Typically, one of these concentrations serves as a negative control, i.e., at zero concentration or below the level of detection.

[0184] In one aspect, a candidate agent will neutralize the effect of a CA protein. By “neutralize” is meant that activity of a protein is either inhibited or counter acted against so as to have substantially no effect on a cell.

[0185] Candidate agents encompass numerous chemical classes, though typically they are organic or inorganic molecules, preferably small organic compounds having a molecular weight of more than 100 and less than about 2,500 Daltons. Preferred small molecules are less than 2000, or less than 1500 or less than 1000 or less than 500 D. Candidate agents comprise functional groups necessary for structural interaction with proteins, particularly hydrogen bonding, and typically include at least an amine, carbonyl, hydroxyl or carboxyl group, preferably at least two of the functional chemical groups. The candidate agents often comprise cyclical carbon or heterocyclic structures and/or aromatic or polyaromatic structures substituted with one or more of the above functional groups. Candidate agents are also found among biomolecules including peptides, saccharides, fatty acids, steroids, purines, pyrimidines, derivatives, structural analogs or combinations thereof. Particularly preferred are peptides.

[0186] Candidate agents are obtained from a wide variety of sources including libraries of synthetic or natural compounds. For example, numerous means are available for random and directed synthesis of a wide variety of organic compounds and biomolecules, including expression of randomized oligonucleotides. Alternatively, libraries of natural compounds in the form of bacterial, fungal, plant and animal extracts are available or readily produced. Additionally, natural or synthetically produced libraries and compounds are readily modified through conventional chemical, physical and biochemical means. Known pharmacological agents may be subjected to directed or random chemical modifications, such as acylation, alkylation, esterification, or amidification to produce structural analogs.

[0187] In one embodiment, the candidate bioactive agents are proteins. By “protein” herein is meant at least two covalently attached amino acids, which includes proteins, polypeptides, oligopeptides and peptides. The protein may be made up of naturally occurring amino acids and peptide bonds, or synthetic peptidomimetic structures. Thus “amino acid”, or “peptide residue”, as used herein means both naturally occurring and synthetic amino acids. For example, homo-phenylalanine, citrulline and norleucine are considered amino acids for the purposes of the invention. “Amino acid” also includes imino acid residues such as proline and hydroxyproline. The side chains may be in either the (R) or the (S) configuration. In the preferred embodiment, the amino acids are in the (S) or L-configuration. If non-naturally occurring side chains are used, non-amino acid substituents may be used, for example to prevent or retard in vivo degradations.

[0188] In a preferred embodiment, the candidate bioactive agents are naturally occurring proteins or fragments of naturally occurring proteins. Thus, for example, cellular extracts containing proteins, or random or directed digests of proteinaceous cellular extracts, may be used. In this way libraries of prokaryotic and eukaryotic proteins may be made for screening in the methods of the invention. Particularly preferred in this embodiment are libraries of bacterial, fungal, viral, and mammalian proteins, with the latter being preferred, and human proteins being especially preferred.

[0189] In another preferred embodiment, the candidate bioactive agents are peptides of from about 5 to about 30 amino acids, with from about 5 to about 20 amino acids being preferred, and from about 7 to about 15 being particularly preferred. The peptides may be digests of naturally occurring proteins as is outlined above, random peptides, or “biased” random peptides. By “randomized” or grammatical equivalents herein is meant that each nucleic acid and peptide consists of essentially random nucleotides and amino acids, respectively. Since generally these random peptides (or nucleic acids, discussed below) are chemically synthesized, they may incorporate any nucleotide or amino acid at any position. The synthetic process can be designed to generate randomized proteins or nucleic acids, to allow the formation of all or most of the possible combinations over the length of the sequence, thus forming a library of randomized candidate bioactive proteinaceous agents.

[0190] In one embodiment, the library is fully randomized, with no sequence preferences or constants at any position. In a preferred embodiment, the library is biased. That is, some positions within the sequence are either held constant, or are selected from a limited number of possibilities. For example, in a preferred embodiment, the nucleotides or amino acid residues are randomized within a defined class, for example, of hydrophobic amino acids, hydrophilic residues, sterically biased (either small or large) residues, towards the creation of nucleic acid binding domains, the creation of cysteines, for cross-linking, prolines for SH-3 domains, serines, threonines, tyrosines or histidines for phosphorylation sites, etc., or to purines, etc.

[0191] In one embodiment, the candidate bioactive agents are nucleic acids. As described generally for proteins, nucleic acid candidate bioactive agents may be naturally occurring nucleic acids, random nucleic acids, or “biased” random nucleic acids. In another embodiment, the candidate bioactive agents are organic chemical moieties, a wide variety of which are available in the literature.

[0192] In assays for testing alteration of the expression profile of one or more CA genes, after the candidate agent has been added and the cells allowed to incubate for some period of time, a nucleic acid sample containing the target sequences to be analyzed is prepared. The target sequence is prepared using known techniques (e.g., converted from RNA to labeled cDNA, as described above) and added to a suitable microarray. For example, an in vitro reverse transcription with labels covalently attached to the nucleosides is performed. Generally, the nucleic acids are labeled with a label as defined herein, especially with biotin-FITC or PE, Cy3 and Cy5.

[0193] As will be appreciated by those in the art, these assays can be direct hybridization assays or can comprise “sandwich assays”, which include the use of multiple probes, as is generally outlined in U.S. Pat. Nos. 5,681,702, 5,597,909, 5,545,730, 5,594,117, 5,591,584, 5,571,670, 5,580,731, 5,571,670, 5,591,584, 5,624,802, 5,635,352, 5,594,118, 5,359,100, 5,124,246 and 5,681,697, all of which are hereby incorporated by reference. In this embodiment, in general, the target nucleic acid is prepared as outlined above, and then added to the biochip comprising a plurality of nucleic acid probes, under conditions that allow the formation of a hybridization complex.

[0194] A variety of hybridization conditions may be used in the present invention, including high, moderate and low stringency conditions as outlined above. The assays are generally run under stringency conditions that allow formation of the label probe hybridization complex only in the presence of target. Stringency can be controlled by altering a step parameter that is a thermodynamic variable, including, but not limited to, temperature, formamide concentration, salt concentration, chaotropic salt concentration, pH, organic solvent concentration, etc. These parameters may also be used to control non-specific binding, as is generally outlined in U.S. Pat. No. 5,681,697. Thus it may be desirable to perform certain steps at higher stringency conditions to reduce non-specific binding.

[0195] The reactions outlined herein may be accomplished in a variety of ways, as will be appreciated by those in the art. Components of the reaction may be added simultaneously, or sequentially, in any order, with preferred embodiments outlined below. In addition, the reaction may include a variety of other reagents in the assays. These include reagents like salts, buffers, neutral proteins, e.g. albumin, detergents, etc which may be used to facilitate optimal hybridization and detection, and/or reduce non-specific or background interactions. Also reagents that otherwise improve the efficiency of the assay, such as protease inhibitors, nuclease inhibitors, anti-microbial agents, etc., may be used, depending on the sample preparation methods and purity of the target. In addition, either solid phase or solution based (i.e., kinetic PCR) assays may be used.

[0196] Once the assay is run, the data are analyzed to determine the expression levels, and changes in expression levels as between states, of individual genes, forming a gene expression profile.

[0197] In a preferred embodiment, as for the diagnosis and prognosis applications, having identified the differentially expressed gene(s) or mutated gene(s) important in any one state, screens can be run to test for alteration of the expression of the CA genes individually. That is, screening for modulation of regulation of expression of a single gene can be done. Thus, for example, in the case of target genes whose presence or absence is unique between two states, screening is done for modulators of the target gene expression.

[0198] In addition, screens can be done for novel genes that are induced in response to a candidate agent. After identifying a candidate agent based upon its ability to suppress a CA expression pattern leading to a normal expression pattern, or modulate a single CA gene expression profile so as to mimic the expression of the gene from normal tissue, a screen as described above can be performed to identify genes that are specifically modulated in response to the agent. Comparing expression profiles between normal tissue and agent treated CA tissue reveals genes that are not expressed in normal tissue or CA tissue, but are expressed in agent treated tissue. These agent specific sequences can be identified and used by any of the methods described herein for CA genes or proteins. In particular these sequences and the proteins they encode find use in marking or identifying agent-treated cells. In addition, antibodies can be raised against the agent-induced proteins and used to target novel therapeutics to the treated CA tissue sample.

[0199] Thus, in one embodiment, a candidate agent is administered to a population of CA cells, that thus has an associated CA expression profile. By “administration” or “contacting” herein is meant that the candidate agent is added to the cells in such a manner as to allow the agent to act upon the cell, whether by uptake and intracellular action, or by action at the cell surface. In some embodiments, nucleic acid encoding a proteinaceous candidate agent (i.e. a peptide) may be put into a viral construct such as a retroviral construct and added to the cell, such that expression of the peptide agent is accomplished; see PCT US97/01019, hereby expressly incorporated by reference.

[0200] Once the candidate agent has been administered to the cells, the cells can be washed if desired and are allowed to incubate under preferably physiological conditions for some period of time. The cells are then harvested and a new gene expression profile is generated, as outlined herein.

[0201] Thus, for example, CA tissue may be screened for agents that reduce or suppress the CA phenotype. A change in at least one gene of the expression profile indicates that the agent has an effect on CA activity. By defining such a signature for the CA phenotype, screens for new drugs that alter the phenotype can be devised. With this approach, the drug target need not be known and need not be represented in the original expression screening platform, nor does the level of transcript for the target protein need to change.

[0202] In a preferred embodiment, as outlined above, screens may be done on individual genes and gene products (proteins). That is, having identified a particular differentially expressed gene as important in a particular state, screening of modulators of either the expression of the gene or the gene product itself can be done. The gene products of differentially expressed genes are sometimes referred to herein as “CA proteins” or “CAP”. The CAP may be a fragment, or alternatively, be the full-length protein to the fragment encoded by the nucleic acids of Tables 1-128 (hD07-001 through hD07-128; and hR07-01 through hR07-128). In a preferred embodiment, the CAP is selected from the human protein sequences shown in Tables 1-128 (hP07-001 through hP07-128). In another embodiment, the sequences are sequence variants as further described herein.

[0203] Preferably, the CAP is a fragment approximately 14 to 24 amino acids in length. More preferably the fragment is a soluble fragment. Preferably, the fragment includes a non-transmembrane region. In a preferred embodiment, the fragment has an N-terminal Cys to aid in solubility. In one embodiment, the C-terminus of the fragment is kept as a free acid and the N-terminus is a free amine to aid in coupling, e.g., to a cysteine.

[0204] In one embodiment the CA proteins are conjugated to an immunogenic agent as discussed herein. In one embodiment the CA protein is conjugated to BSA.

[0205] In a preferred embodiment, screening is done to alter the biological function of the expression product of the CA gene. Again, having identified the importance of a gene in a particular state, screening for agents that bind and/or modulate the biological activity of the gene product can be run as is more fully outlined below.

[0206] In a preferred embodiment, screens are designed to first find candidate agents that can bind to CA proteins, and then these agents may be used in assays that evaluate the ability of the candidate agent to modulate the CAP activity and the cancer phenotype. Thus, as will be appreciated by those in the art, there are a number of different assays that may be run; binding assays and activity assays.

[0207] In a preferred embodiment, binding assays are done. In general, purified or isolated gene product is used; that is, the gene products of one or more CA nucleic acids are made. In general, this is done as is known in the art. For example, antibodies are generated to the protein gene products, and standard immunoassays are run to determine the amount of protein present. Alternatively, cells comprising the CA proteins can be used in the assays.

[0208] Thus, in a preferred embodiment, the methods comprise combining a CA protein and a candidate bioactive agent, and determining the binding of the candidate agent to the CA protein. Preferred embodiments utilize the human or mouse CA protein, although other mammalian proteins may also be used, for example for the development of animal models of human disease. In some embodiments, as outlined herein, variant or derivative CA proteins may be used.

[0209] Generally, in a preferred embodiment of the methods herein, the CA protein or the candidate agent is non-diffusably bound to an insoluble support having isolated sample receiving areas (e.g. a microtiter plate, an array, etc.). The insoluble support may be made of any composition to which the compositions can be bound, is readily separated from soluble material, and is otherwise compatible with the overall method of screening. The surface of such supports may be solid or porous and of any convenient shape. Examples of suitable insoluble supports include microtiter plates, arrays, membranes and beads. These are typically made of glass, plastic (e.g., polystyrene), polysaccharides, nylon or nitrocellulose, Teflon®, etc. Microtiter plates and arrays are especially convenient because a large number of assays can be carried out simultaneously, using small amounts of reagents and samples.

[0210] The particular manner of binding of the composition is not crucial so long as it is compatible with the reagents and overall methods of the invention, maintains the activity of the composition and is nondiffusable. Preferred methods of binding include the use of antibodies (which do not sterically block either the ligand binding site or activation sequence when the protein is bound to the support), direct binding to “sticky” or ionic supports, chemical crosslinking, the synthesis of the protein or agent on the surface, etc. Following binding of the protein or agent, excess unbound material is removed by washing. The sample receiving areas may then be blocked through incubation with bovine serum albumin (BSA), casein or other innocuous protein or other moiety.

[0211] In a preferred embodiment, the CA protein is bound to the support, and a candidate bioactive agent is added to the assay. Alternatively, the candidate agent is bound to the support and the CA protein is added. Novel binding agents include specific antibodies, non-natural binding agents identified in screens of chemical libraries, peptide analogs, etc. Of particular interest are screening assays for agents that have a low toxicity for human cells. A wide variety of assays may be used for this purpose, including labeled in vitro protein-protein binding assays, electrophoretic mobility shift assays, immunoassays for protein binding, functional assays (phosphorylation assays, etc.) and the like.

[0212] The determination of the binding of the candidate bioactive agent to the CA protein may be done in a number of ways. In a preferred embodiment, the candidate bioactive agent is labeled, and binding determined directly. For example, this may be done by attaching all or a portion of the CA protein to a solid support, adding a labeled candidate agent (for example a fluorescent label), washing off excess reagent, and determining whether the label is present on the solid support. Various blocking and washing steps may be utilized is known in the art

[0213] By “labeled” herein is meant that the compound is either directly or indirectly labeled with a label which provides a detectable signal, e.g. radioisotope, fluorescers, enzyme, antibodies, particles such as magnetic particles, chemiluminescers, or specific binding molecules, etc. Specific binding molecules include pairs, such as biotin and streptavidin, digoxin and antidigoxin etc. For the specific binding members, the complementary member would normally be labeled with a molecule which provides for detection, in accordance with known procedures, as outlined above. The label can directly or indirectly provide a detectable signal.

[0214] In some embodiments, only one of the components is labeled. For example, the proteins (or proteinaceous candidate agents) may be labeled at tyrosine positions using ¹²⁵I, or with fluorophores. Alternatively, more than one component may be labeled with different labels; using ¹²⁵I for the proteins, for example, and a fluorophore for the candidate agents.

[0215] In a preferred embodiment, the binding of the candidate bioactive agent is determined through the use of competitive binding assays. In this embodiment, the competitor is a binding moiety known to bind to the target molecule (i.e. CA protein), such as an antibody, peptide, binding partner, ligand, etc. Under certain circumstances, there may be competitive binding as between the bioactive agent and the binding moiety, with the binding moiety displacing the bioactive agent.

[0216] In one embodiment, the candidate bioactive agent is labeled. Either the candidate bioactive agent, or the competitor, or both, is added first to the protein for a time sufficient to allow binding, if present. Incubations may be performed at any temperature which facilitates optimal activity, typically between 4 and 40° C. Incubation periods are selected for optimum activity, but may also be optimized to facilitate rapid high throughput screening. Typically between 0.1 and 1 hour will be sufficient. Excess reagent is generally removed or washed away. The second component is then added, and the presence or absence of the labeled component is followed, to indicate binding.

[0217] In a preferred embodiment, the competitor is added first, followed by the candidate bioactive agent. Displacement of the competitor is an indication that the candidate bioactive agent is binding to the CA protein and thus is capable of binding to, and potentially modulating, the activity of the CA protein. In this embodiment, either component can be labeled. Thus, for example, if the competitor is labeled, the presence of label in the wash solution indicates displacement by the agent. Alternatively, if the candidate bioactive agent is labeled, the presence of the label on the support indicates displacement.

[0218] In an alternative embodiment, the candidate bioactive agent is added first, with incubation and washing, followed by the competitor. The absence of binding by the competitor may indicate that the bioactive agent is bound to the CA protein with a higher affinity. Thus, if the candidate bioactive agent is labeled, the presence of the label on the support, coupled with a lack of competitor binding, may indicate that the candidate agent is capable of binding to the CA protein.

[0219] In a preferred embodiment, the methods comprise differential screening to identity bioactive agents that are capable of modulating the activity of the CA proteins. In this embodiment, the methods comprise combining a CA protein and a competitor in a first sample. A second sample comprises a candidate bioactive agent, a CA protein and a competitor. The binding of the competitor is determined for both samples, and a change, or difference in binding between the two samples indicates the presence of an agent capable of binding to the CA protein and potentially modulating its activity. That is, if the binding of the competitor is different in the second sample relative to the first sample, the agent is capable of binding to the CA protein.

[0220] Alternatively, a preferred embodiment utilizes differential screening to identify drug candidates that bind to the native CA protein, but cannot bind to modified CA proteins. The structure of the CA protein may be modeled, and used in rational drug design to synthesize agents that interact with that site. Drug candidates that affect CA bioactivity are also identified by screening drugs for the ability to either enhance or reduce the activity of the protein.

[0221] Positive controls and negative controls may be used in the assays. Preferably all control and test samples are performed in at least triplicate to obtain statistically significant results. Incubation of all samples is for a time sufficient for the binding of the agent to the protein. Following incubation, all samples are washed free of non-specifically bound material and the amount of bound, generally labeled agent determined. For example, where a radiolabel is employed, the samples may be counted in a scintillation counter to determine the amount of bound compound.

[0222] A variety of other reagents may be included in the screening assays. These include reagents like salts, neutral proteins, e.g. albumin, detergents, etc which may be used to facilitate optimal protein-protein binding and/or reduce non-specific or background interactions. Also reagents that otherwise improve the efficiency of the assay, such as protease inhibitors, nuclease inhibitors, anti-microbial agents, etc., may be used. The mixture of components may be added in any order that provides for the requisite binding.

[0223] Screening for agents that modulate the activity of CA proteins may also be done. In a preferred embodiment, methods for screening for a bioactive agent capable of modulating the activity of CA proteins comprise the steps of adding a candidate bioactive agent to a sample of CA proteins, as above, and determining an alteration in the biological activity of CA proteins. “Modulating the activity of a CA protein” includes an increase in activity, a decrease in activity, or a change in the type or kind of activity present Thus, in this embodiment, the candidate agent should both bind to CA proteins (although this may not be necessary), and alter its biological or biochemical activity as defined herein. The methods include both in vitro screening methods, as are generally outlined above, and in vivo screening of cells for alterations in the presence, distribution, activity or amount of CA proteins.

[0224] Thus, in this embodiment, the methods comprise combining a CA sample and a candidate bioactive agent, and evaluating the effect on CA activity. By “CA activity” or grammatical equivalents herein is meant one of the CA protein's biological activities, including, but not limited to, its role in tumorigenesis, including cell division, preferably in lymphatic tissue, cell proliferation, tumor growth and transformation of cells. In one embodiment, CA activity includes activation of or by a protein encoded by a nucleic acid of Tables 1-128. An inhibitor of CA activity is the inhibition of any one or more CA activities.

[0225] In a preferred embodiment, the activity of the CA protein is increased; in another preferred embodiment, the activity of the CA protein is decreased. Thus, bioactive agents that are antagonists are preferred in some embodiments, and bioactive agents that are agonists may be preferred in other embodiments.

[0226] In a preferred embodiment, the invention provides methods for screening for bioactive agents capable of modulating the activity of a CA protein. The methods comprise adding a candidate bioactive agent, as defined above, to a cell comprising CA proteins. Preferred cell types include almost any cell. The cells contain a recombinant nucleic acid that encodes a CA protein. In a preferred embodiment, a library of candidate agents is tested on a plurality of cells.

[0227] In one aspect, the assays are evaluated in the presence or absence or previous or subsequent exposure of physiological signals, for example hormones, antibodies, peptides, antigens, cytokines, growth factors, action potentials, pharmacological agents including chemotherapeutics, radiation, carcinogenics, or other cells (i.e. cell-cell contacts). In another example, the determinations are determined at different stages of the cell cycle process.

[0228] In this way, bioactive agents are identified. Compounds with pharmacological activity are able to enhance or interfere with the activity of the CA protein.

Applications of the Invention

[0229] In one embodiment, a method of inhibiting cancer cell division is provided. In another embodiment, a method of inhibiting tumor growth is provided. In a further embodiment, methods of treating cells or individuals with cancer are provided.

[0230] The method comprises administration of a cancer inhibitor. In particular embodiments, the cancer inhibitor is an antisense molecule, a pharmaceutical composition, a therapeutic agent or small molecule, or a monoclonal, polyclonal, chimeric or humanized antibody. In particular embodiments, a therapeutic agent is coupled with a an antibody, preferable a monoclonal antobody.

[0231] In other embodiments, methods for detection or diagnosis of cancer cells in an individual are provided. In particular embodiments, the diagnostic/detection agent is a small molecule that pereferentially binds to a CAP according to the invention. In one embodiment, the diagnostic/detection agent is an antibody, preferably a monoclonal antobody, preferably linked to a detectable agent.

[0232] In other embodiments of the invention, animal models and transgenic animals are provided, which find use in generating animal models of cancers, particularly lymphomas and carcinomas.

(a) Antisense Molecules

[0233] In one embodiment, the cancer inhibitor is an antisense molecule. Antisense molecules as used herein include antisense or sense oligonucleotides comprising a single-stranded nucleic acid sequence (either RNA or DNA) capable of binding to target mRNA (sense) or DNA (antisense) sequences for cancer molecules. Antisense or sense oligonucleotides, according to the present invention, comprise a fragment generally at least about 14 nucleotides, preferably from about 14 to 30 nucleotides. The ability to derive an antisense or a sense oligonucleotide, based upon a cDNA sequence encoding a given protein is described in, for example, Stein and Cohen, Cancer Res. 48:2659, (1988) and van der Krol et al., BioTechniques 6:958, (1988).

[0234] Antisense molecules may be introduced into a cell containing the target nucleotide sequence by formation of a conjugate with a ligand binding molecule, as described in WO 91/04753. Suitable ligand binding molecules include, but are not limited to, cell surface receptors, growth factors, other cytokines, or other ligands that bind to cell surface receptors. Preferably, conjugation of the ligand binding molecule does not substantially interfere with the ability of the ligand binding molecule to bind to its corresponding molecule or receptor, or block entry of the sense or antisense oligonucleotide or its conjugated version into the cell. Alternatively, a sense or an antisense oligonucleotide may be introduced into a cell containing the target nucleic acid sequence by formation of an oligonucleotide-lipid complex, as described in WO 90/10448. It is understood that the use of antisense molecules or knock out and knock in models may also be used in screening assays as discussed above, in addition to methods of treatment.

(b) Pharmaceutical Compositions

[0235] Pharmaceutical compositions encompassed by the present invention include as active agent, the polypeptides, polynucleotides, antisense oligonucleotides, or antibodies of the invention disclosed herein in a therapeutically effective amount. An “effective amount” is an amount sufficient to effect beneficial or desired results, including clinical results. An effective amount can be administered in one or more administrations. For purposes of this invention, an effective amount of an adenoviral vector is an amount that is sufficient to palliate, ameliorate, stabilize, reverse, slow or delay the progression of the disease state.

[0236] The compositions can be used to treat cancer as well as metastases of primary cancer. In addition, the pharmaceutical compositions can be used in conjunction with conventional methods of cancer treatment, e.g., to sensitize tumors to radiation or conventional chemotherapy. The terms “treatment”, “treating”, “treat” and the like are used herein to generally refer to obtaining a desired pharmacologic and/or physiologic effect. The effect may be prophylactic in terms of completely or partially preventing a disease or symptom thereof and/or may be therapeutic in terms of a partial or complete stabilization or cure for a disease and/or adverse effect attributable to the disease. “Treatment” as used herein covers any treatment of a disease in a mammal, particularly a human, and includes: (a) preventing the disease or symptom from occurring in a subject which may be predisposed to the disease or symptom but has not yet been diagnosed as having it; (b) inhibiting the disease symptom, i.e., arresting its development; or (c) relieving the disease symptom, i.e., causing regression of the disease or symptom.

[0237] Where the pharmaceutical composition comprises an antibody that specifically binds to a gene product encoded by a differentially expressed polynucleotide, the antibody can be coupled to a drug for delivery to a treatment site or coupled to a detectable label to facilitate imaging of a site comprising cancer cells, such as prostate cancer cells. Methods for coupling antibodies to drugs and detectable labels are well known in the art, as are methods for imaging using detectable labels.

[0238] A “patient” for the purposes of the present invention includes both humans and other animals, particularly mammals, and organisms. Thus the methods are applicable to both human therapy and veterinary applications. In the preferred embodiment the patient is a mammal, and in the most preferred embodiment the patient is human.

[0239] The term “therapeutically effective amount” as used herein refers to an amount of a therapeutic agent to treat, ameliorate, or prevent a desired disease or condition, or to exhibit a detectable therapeutic or preventative effect. The effect can be detected by, for example, chemical markers or antigen levels. Therapeutic effects also include reduction in physical symptoms, such as decreased body temperature. The precise effective amount for a subject will depend upon the subject's size and health, the nature and extent of the condition, and the therapeutics or combination of therapeutics selected for administration. The effective amount for a given situation is determined by routine experimentation and is within the judgment of the clinician. For purposes of the present invention, an effective dose will generally be from about 0.01 mg/kg to about 5 mg/kg, or about 0.01 mg/kg to about 50 mg/kg or about 0.05 mg/kg to about 10 mg/kg of the compositions of the present invention in the individual to which it is administered.

[0240] A pharmaceutical composition can also contain a pharmaceutically acceptable carrier. The term “pharmaceutically acceptable carrier” refers to a carrier for administration of a therapeutic agent, such as antibodies or a polypeptide, genes, and other therapeutic agents. The term refers to any pharmaceutical carrier that does not itself induce the production of antibodies harmful to the individual receiving the composition, and which can be administered without undue toxicity. Suitable carriers can be large, slowly metabolized macromolecules such as proteins, polysaccharides, polylactic acids, polyglycolic acids, polymeric amino acids, amino acid copolymers, and inactive virus particles. Such carriers are well known to those of ordinary skill in the art. Pharmaceutically acceptable carriers in therapeutic compositions can include liquids such as water, saline, glycerol and ethanol. Auxiliary substances, such as wetting or emulsifying agents, pH buffering substances, and the like, can also be present in such vehicles. Typically, the therapeutic compositions are prepared as injectables, either as liquid solutions or suspensions; solid forms suitable for solution in, or suspension in, liquid vehicles prior to injection can also be prepared. Liposomes are included within the definition of a pharmaceutically acceptable carrier. Pharmaceutically acceptable salts can also be present in the pharmaceutical composition, e.g., mineral acid salts such as hydrochlorides, hydrobromides, phosphates, sulfates, and the like; and the salts of organic acids such as acetates, propionates, malonates, benzoates, and the like. A thorough discussion of pharmaceutically acceptable excipients is available in Remington: The Science and Practice of Pharmacy (1995) Alfonso Gennaro, Lippincott, Williams, & Wilkins.

[0241] The pharmaceutical compositions can be prepared in various forms, such as granules, tablets, pills, suppositories, capsules, suspensions, salves, lotions and the like. Pharmaceutical grade organic or inorganic carriers and/or diluents suitable for oral and topical use can be used to make up compositions containing the therapeutically-active compounds. Diluents known to the art include aqueous media, vegetable and animal oils and fats. Stabilizing agents, wetting and emulsifying agents, salts for varying the osmotic pressure or buffers for securing an adequate pH value, and skin penetration enhancers can be used as auxiliary agents.

[0242] The pharmaceutical compositions of the present invention comprise a CA protein in a form suitable for administration to a patient. In the preferred embodiment, the pharmaceutical compositions are in a water soluble form, such as being present as pharmaceutically acceptable salts, which is meant to include both acid and base addition salts. “Pharmaceutically acceptable acid addition salt” refers to those salts that retain the biological effectiveness of the free bases and that are not biologically or otherwise undesirable, formed with inorganic acids such as hydrochloric acid, hydrobromic acid, sulfuric acid, nitric acid, phosphoric acid and the like, and organic acids such as acetic acid, propionic acid, glycolic acid, pyruvic acid, oxalic acid, maleic acid, malonic acid, succinic acid, fumaric acid, tartaric acid, citric acid, benzoic acid, cinnamic acid, mandelic acid, methanesulfonic acid, ethanesulfonic acid, p-toluenesulfonic acid, salicylic acid and the like. “Pharmaceutically acceptable base addition salts” include those derived from inorganic bases such as sodium, potassium, lithium, ammonium, calcium, magnesium, iron, zinc, copper, manganese, aluminum salts and the like. Particularly preferred are the ammonium, potassium, sodium, calcium, and magnesium salts. Salts derived from pharmaceutically acceptable organic non-toxic bases include salts of primary, secondary, and tertiary amines, substituted amines including naturally occurring substituted amines, cyclic amines and basic ion exchange resins, such as isopropylamine, trimethylamine, diethylamine, triethylamine, tripropylamine, and ethanolamine.

[0243] The pharmaceutical compositions may also include one or more of the following: carrier proteins such as serum albumin; buffers; fillers such as microcrystalline cellulose, lactose, corn and other starches; binding agents; sweeteners and other flavoring agents; coloring agents; and polyethylene glycol. Additives are well known in the art, and are used in a variety of formulations.

[0244] The compounds having the desired pharmacological activity may be administered in a physiologically acceptable carrier to a host, as previously described. The agents may be administered in a variety of ways, orally, parenterally e.g., subcutaneously, intraperitoneally, intravascularly, etc. Depending upon the manner of introduction, the compounds may be formulated in a variety of ways. The concentration of therapeutically active compound in the formulation may vary from about 0.1-100% wgt/vol. Once formulated, the compositions contemplated by the invention can be (1) administered directly to the subject (e.g., as polynucleotide, polypeptides, small molecule agonists or antagonists, and the like); or (2) delivered ex vivo, to cells derived from the subject (e.g. as in ex vivo gene therapy). Direct delivery of the compositions will generally be accomplished by parenteral injection, e.g., subcutaneously, intraperitoneally, intravenously or intramuscularly, intratumoral or to the interstitial space of a tissue. Other modes of administration include oral and pulmonary administration, suppositories, and transdermal applications, needles, and gene guns or hyposprays. Dosage treatment can be a single dose schedule or a multiple dose schedule.

[0245] Methods for the ex vivo delivery and reimplantation of transformed cells into a subject are known in the art and described in e.g. International Publication No. WO 93/14778. Examples of cells useful in ex vivo applications include, for example, stem cells, particularly hematopoetic, lymph cells, macrophages, dendritic cells, or tumor cells. Generally, delivery of nucleic acids for both ex vivo and in vitro applications can be accomplished by, for example, dextran-mediated transfection, calcium phosphate precipitation, polybrene mediated transfection, protoplast fusion, electroporation, encapsulation of the polynucleotide(s) in liposomes, and direct microinjection of the DNA into nuclei, all well known in the art.

[0246] Once differential expression of a gene corresponding to a CA polynucleotide described herein has been found to correlate with a proliferative disorder, such as neoplasia, dysplasia, and hyperplasia, the disorder can be amenable to treatment by administration of a therapeutic agent based on the provided polynucleotide, corresponding polypeptide or other corresponding molecule (e.g., antisense, ribozyme, etc.). In other embodiments, the disorder can be amenable to treatment by administration of a small molecule drug that, for example, serves as an inhibitor (antagonist) of the function of the encoded gene product of a gene having increased expression in cancerous cells relative to normal cells or as an agonist for gene products that are decreased in expression in cancerous cells (e.g., to promote the activity of gene products that act as tumor suppressors).

[0247] The dose and the means of administration of the inventive pharmaceutical compositions are determined based on the specific qualities of the therapeutic composition, the condition, age, and weight of the patient, the progression of the disease, and other relevant factors. For example, administration of polynucleotide therapeutic compositions agents includes local or systemic administration, including injection, oral administration, particle gun or catheterized administration, and topical administration. Preferably, the therapeutic polynucleotide composition contains an expression construct comprising a promoter operably linked to a polynucleotide of at least 12, 22, 25, 30, or 35 contiguous nt of the polynucleotide disclosed herein. Various methods can be used to administer the therapeutic composition directly to a specific site in the body. For example, a small metastatic lesion is located and the therapeutic composition injected several times in several different locations within the body of tumor. Alternatively, arteries that serve a tumor are identified, and the therapeutic composition injected into such an artery, in order to deliver the composition directly into the tumor. A tumor that has a necrotic center is aspirated and the composition injected directly into the now empty center of the tumor. An antisense composition is directly administered to the surface of the tumor, for example, by topical application of the composition X-ray imaging is used to assist in certain of the above delivery methods.

[0248] Targeted delivery of therapeutic compositions containing an antisense polynucleotide, subgenomic polynucleotides, or antibodies to specific tissues can also be used. Receptor-mediated DNA delivery techniques are described in, for example, Findeis et al., Trends Biotechnol. (1993) 11:202; Chiou et al., Gene Therapeutics: Methods And Applications Of Direct Gene Transfer (J. A. Wolff, ed.) (1994); Wu et al., J. Biol. Chem. (1988) 263:621; Wu et al., J. Biol. Chem. (1994) 269:542; Zenke et al., Proc. Natl. Acad. Sci. (USA) (1990) 87:3655; Wu et al., J. Biol. Chem. (1991) 266:338. Therapeutic compositions containing a polynucleotide are administered in a range of about 100 ng to about 200 mg of DNA for local administration in a gene therapy protocol. Concentration ranges of about 500 ng to about 56 mg, about 1 μg to about 2 mg, about 5 μg to about 500 μg, and about 20 μg to about 100 μg of DNA can also be used during a gene therapy protocol. Factors such as method of action (e.g., for enhancing or inhibiting levels of the encoded gene product) and efficacy of transformation and expression are considerations that will affect the dosage required for ultimate efficacy of the antisense subgenomic polynucleotides. Where greater expression is desired over a larger area of tissue, larger amounts of antisense subgenomic polynucleotides or the same amounts re-administered in a successive protocol of administrations, or several administrations to different adjacent or close tissue portions of, for example, a tumor site, may be required to effect a positive therapeutic outcome. In all cases, routine experimentation in clinical trials will determine specific ranges for optimal therapeutic effect.

[0249] The therapeutic polynucleotides and polypeptides of the present invention can be delivered using gene delivery vehicles. The gene delivery vehicle can be of viral or non-viral origin (see generally, Jolly, Cancer Gene Therapy (1994) 1:51; Kimura, Human Gene Therapy (1994) 5:845; Connelly, Human Gene Therapy (1995) 1:185; and Kaplitt, Nature Genetics (1994) 6:148). Expression of such coding sequences can be induced using endogenous mammalian or heterologous promoters. Expression of the coding sequence can be either constitutive or regulated.

[0250] Viral-based vectors for delivery of a desired polynucleotide and expression in a desired cell are well known in the art. Exemplary viral-based vehicles include, but are not limited to, recombinant retroviruses (see, e.g., WO 90/07936; WO 94/03622; WO 93/25698; WO 93/25234; U.S. Pat. No. 5,219,740; WO 93/11230; WO 93/10218; U.S. Pat. No. 4,777,127; GB Patent No. 2,200,651; EP 0 345 242; and WO 91/02805), alphavirus-based vectors (e.g., Sindbis virus vectors, Semliki forest virus (ATCC VR-67; ATCC VR-1247), Ross River virus (ATCC VR-373; ATCC VR-1246) and Venezuelan equine encephalitis virus (ATCC VR-923; ATCC VR-1250; ATCC VR 1249; ATCC VR-532)), and adeno-associated virus (AAV) vectors (see, e.g., WO 94/12649, WO 93/03769; WO 93/19191; WO 94/28938; WO 95/11984 and WO 95/00655). Administration of DNA linked to killed adenovirus as described in Curiel, Hum. Gene Ther. (1992) 3:147 can also be employed.

[0251] Non-viral delivery vehicles and methods can also be employed, including, but not limited to, polycationic condensed DNA linked or unlinked to killed adenovirus alone (see, e.g., Curiel, Hum. Gene Ther. (1992) 3:147); ligand-linked DNA (see, e.g., Wu, J. Biol. Chem. (1989) 264:16985); eukaryotic cell delivery vehicles cells (see, e.g., U.S. Pat. No. 5,814,482; WO 95/07994; WO 96/17072; WO 95/30763; and WO 97/42338) and nucleic charge neutralization or fusion with cell membranes. Naked DNA can also be employed. Exemplary naked DNA introduction methods are described in WO 90/11092 and U.S. Pat. No. 5,580,859. Liposomes that can act as gene delivery vehicles are described in U.S. Pat. No. 5,422,120; WO 95/13796; WO 94/23697; WO 91/14445; and EP 0524968. Additional approaches are described in Philip, Mol. Cell Biol. (1994) 14:2411, and in Woffendin, Proc. Natl. Acad. Sci. (1994) 91:1581.

[0252] Further non-viral delivery suitable for use includes mechanical delivery systems such as the approach described in Woffendin et al., Proc. Natl. Acad. Sci. USA (1994) 91(24):11581. Moreover, the coding sequence and the product of expression of such can be, delivered through deposition of photopolymerized hydrogel materials or use of ionizing radiation (see, e.g., U.S. Pat. No. 5,206,152 and WO 92/11033). Other conventional methods for gene delivery that can be used for delivery of the coding sequence include, for example, use of hand-held gene transfer particle gun (see, e.g., U.S. Pat. No. 5,149,655); use of ionizing radiation for activating transferred gene (see, e.g., U.S. Pat. No. 5,206,152 and WO 92/1-1033).

[0253] The administration of the CA proteins and modulators of the present invention can be done in a variety of ways as discussed above, including, but not limited to, orally, subcutaneously, intravenously, intranasally, transdermally, intraperitoneally, intramuscularly, intrapulmonary, vaginally, rectally, or intraocularly. In some instances, for example, in the treatment of wounds and inflammation, the CA proteins and modulators may be directly applied as a solution or spray.

[0254] In a preferred embodiment, CA proteins and modulators are administered as therapeutic agents, and can be formulated as outlined above. Similarly, CA genes (including both the full-length sequence, partial sequences, or regulatory sequences of the CA coding regions) can be administered in gene therapy applications, as is known in the art. These CA genes can include antisense applications, either as gene therapy (i.e. for incorporation into the genome) or as antisense compositions, as will be appreciated by those in the art.

[0255] Thus, in one embodiment, methods of modulating CA gene activity in cells or organisms are provided. In one embodiment, the methods comprise administering to a cell an anti-CA antibody that reduces or eliminates the biological activity of an endogenous CA protein. Alternatively, the methods comprise administering to a cell or organism a recombinant nucleic acid encoding a CA protein. As will be appreciated by those in the art, this may be accomplished in any number of ways. In a preferred embodiment, for example when the CA sequence is down-regulated in cancer, the activity of the CA gene product is increased by increasing the amount of CA expression in the cell, for example by overexpressing the endogenous CA gene or by administering a gene encoding the CA sequence, using known gene-therapy techniques. In a preferred embodiment, the gene therapy techniques include the incorporation of the exogenous gene using enhanced homologous recombination (HR), for example as described in PCT/US93/03868, hereby incorporated by reference in its entirety. Alternatively, for example when the CA sequence is up-regulated in cancer, the activity of the endogenous CA gene is decreased, for example by the administration of a CA antisense nucleic acid.

(c) Vaccines

[0256] In a preferred embodiment, CA genes are administered as DNA vaccines, either single genes or combinations of CA genes. Naked DNA vaccines are generally known in the art Brower, Nature Biotechnology, 16:1304-1305 (1998).

[0257] In one embodiment, CA genes of the present invention are used as DNA vaccines. Methods for the use of genes as DNA vaccines are well known to one of ordinary skill in the art, and include placing a CA gene or portion of a CA gene under the control of a promoter for expression in a patient with cancer. The CA gene used for DNA vaccines can encode full-length CA proteins, but more preferably encodes portions of the CA proteins including peptides derived from the CA protein. In a preferred embodiment a patient is immunized with a DNA vaccine comprising a plurality of nucleotide sequences derived from a CA gene. Similarly, it is possible to immunize a patient with a plurality of CA genes or portions thereof. Without being bound by theory, expression of the polypeptide encoded by the DNA vaccine, cytotoxic T-cells, helper T-cells and antibodies are induced that recognize and destroy or eliminate cells expressing CA proteins.

[0258] In a preferred embodiment, the DNA vaccines include a gene encoding an adjuvant molecule with the DNA vaccine. Such adjuvant molecules include cytokines that increase the immunogenic response to the CA polypeptide encoded by the DNA vaccine. Additional or alternative adjuvants are known to those of ordinary skill in the art and find use in the invention.

(d) Antibodies

[0259] In one embodiment, a cancer inhibitor is an antibody as discussed above. In one embodiment, the CA proteins of the present invention may be used to generate polyclonal and monoclonal antibodies to CA proteins, which are useful as described herein. Similarly, the CA proteins can be coupled, using standard technology, to affinity chromatography columns. These columns may then be used to purify CA antibodies. In a preferred embodiment, the antibodies are generated to epitopes unique to a CA protein; that is, the antibodies show little or no cross-reactivity to other proteins. These antibodies find use in a number of applications. For example, the CA antibodies may be coupled to standard affinity chromatography columns and used to purify CA proteins. The antibodies may also be used therapeutically as blocking polypeptides, as outlined above, since they will specifically bind to the CA protein.

[0260] The present invention further provides methods for detecting the presence of and/or measuring a level of a polypeptide in a biological sample, which CA polypeptide is encoded by a CA polynucleotide that is differentially expressed in a cancer cell, using an antibody specific for the encoded polypeptide. The methods generally comprise: a) contacting the sample with an antibody specific for a polypeptide encoded by a CA polynucleotide that is differentially expressed in a prostate cancer cell; and b) detecting binding between the antibody and molecules of the sample.

[0261] Detection of specific binding of the antibody specific for the encoded cancer-associated polypeptide, when compared to a suitable control is an indication that encoded polypeptide is present in the sample. Suitable controls include a sample known not to contain the encoded CA polypeptide or known not to contain elevated levels of the polypeptide; such as normal tissue, and a sample contacted with an antibody not specific for the encoded polypeptide, e.g., an anti-idiotype antibody. A variety of methods to detect specific antibody-antigen interactions are known in the art and can be used in the method, including, but not limited to, standard immunohistological methods, immunoprecipitation, an enzyme immunoassay, and a radioimmunoassay. In general, the specific antibody will be detectably labeled, either directly or indirectly. Direct labels include radioisotopes; enzymes whose products are detectable (e.g., luciferase, β-galactosidase, and the like); fluorescent labels (e.g., fluorescein isothiocyanate, rhodamine, phycoerythrin, and the like); fluorescence emitting metals, e.g., ¹⁵²Eu, or others of the lanthanide series, attached to the antibody through metal chelating groups such as EDTA; chemiluminescent compounds, e.g., luminol, isoluminol, acridinium salts, and the like; bioluminescent compounds, e.g., luciferin, aequorin (green fluorescent protein), and the like. The antibody may be attached (coupled) to an insoluble support, such as a polystyrene plate or a bead. Indirect labels include second antibodies specific for antibodies specific for the encoded polypeptide (“first specific antibody”), wherein the second antibody is labeled as described above; and members of specific binding pairs, e.g., biotin-avidin, and the like. The biological sample may be brought into contact with and immobilized on a solid support or carrier, such as nitrocellulose, that is capable of immobilizing cells, cell particles, or soluble proteins. The support may then be washed with suitable buffers, followed by contacting with a detectably-labeled first specific antibody. Detection methods are known in the art and will be chosen as appropriate to the signal emitted by the detectable label. Detection is generally accomplished in comparison to suitable controls, and to appropriate standards.

[0262] In some embodiments, the methods are adapted for use in vivo, e.g., to locate or identify sites where cancer cells are present. In these embodiments, a detectably-labeled moiety, e.g., an antibody, which is specific for a cancer-associated polypeptide is administered to an individual (e.g., by injection), and labeled cells are located using standard imaging techniques, including, but not limited to, magnetic resonance imaging, computed tomography scanning, and the like. In this manner, cancer cells are differentially labeled.

(e) Detection and Diagnosis of Cancers

[0263] Without being bound by theory, it appears that the various CA-sequences are important in cancers. Accordingly, disorders based on mutant or variant CA genes may be determined. In one embodiment, the invention provides methods for identifying cells containing variant CA genes comprising determining all or part of the sequence of at least one endogenous CA genes in a cell. As will be appreciated by those in the art, this may be done using any number of sequencing techniques. In a preferred embodiment, the invention provides methods of identifying the CA genotype of an individual comprising determining all or part of the sequence of at least one CA gene of the individual. This is generally done in at least one tissue of the individual, and may include the evaluation of a number of tissues or different samples of the same tissue. The method may include comparing the sequence of the sequenced CA gene to a known CA gene, i.e., a wild-type gene. As will be appreciated by those in the art, alterations in the sequence of some CA genes can be an indication of either the presence of the disease, or propensity to develop the disease, or prognosis evaluations.

[0264] The sequence of all or part of the CA gene can then be compared to the sequence of a known CA gene to determine if any differences exist. This can be done using any number of known homology programs, such as Bestfit, etc. In a preferred embodiment, the presence of a difference in the sequence between the CA gene of the patient and the known CA gene is indicative of a disease state or a propensity for a disease state, as outlined herein.

[0265] In a preferred embodiment, the CA genes are used as probes to determine the number of copies of the CA gene in the genome. For example, some cancers exhibit chromosomal deletions or insertions, resulting in an alteration in the copy number of a gene.

[0266] In another preferred embodiment CA genes are used as probes to determine the chromosomal location of the CA genes. Information such as chromosomal location finds use in providing a diagnosis or prognosis in particular when chromosomal abnormalities such as translocations, and the like are identified in CA gene loci.

[0267] The present invention provides methods of using the polynucleotides described herein for detecting cancer cells, facilitating diagnosis of cancer and the severity of a cancer (e.g., tumor grade, tumor burden, and the like) in a subject, facilitating a determination of the prognosis of a subject, and assessing the responsiveness of the subject to therapy (e.g., by providing a measure of therapeutic effect through, for example, assessing tumor burden during or following a chemotherapeutic regimen). Detection can be based on detection of a polynucleotide that is differentially expressed in a cancer cell, and/or detection of a polypeptide encoded by a polynucleotide that is differentially expressed in a cancer cell. The detection methods of the invention can be conducted in vitro or in vivo, on isolated cells, or in whole tissues or a bodily fluid e.g., blood, plasma, serum, urine, and the like).

[0268] In some embodiments, methods are provided for detecting a cancer cell by detecting expression in the cell of a transcript that is differentially expressed in a cancer cell. Any of a variety of known methods can be used for detection, including, but not limited to, detection of a transcript by hybridization with a polynucleotide that hybridizes to a polynucleotide that is differentially expressed in a prostate cancer cell; detection of a transcript by a polymerase chain reaction using specific oligonucleotide primers; in situ hybridization of a cell using as a probe a polynucleotide that hybridizes to a gene that is differentially expressed in a prostate cancer cell. The methods can be used to detect and/or measure mRNA levels of a gene that is differentially expressed in a cancer cell. In some embodiments, the methods comprise: a) contacting a sample with a polynucleotide that corresponds to a differentially expressed gene described herein under conditions that allow hybridization; and b) detecting hybridization, if any.

[0269] Detection of differential hybridization, when compared to a suitable control, is an indication of the presence in the sample of a polynucleotide that is differentially expressed in a cancer cell. Appropriate controls include, for example, a sample that is known not to contain a polynucleotide that is differentially expressed in a cancer cell, and use of a labeled polynucleotide of the same “sense” as the polynucleotide that is differentially expressed in the cancer cell. Conditions that allow hybridization are known in the art, and have been described in more detail above. Detection can also be accomplished by any known method, including, but not limited to, in situ hybridization, PCR (polymerase chain reaction), RT-PCR (reverse transcription-PCR), TMA, bDNA, and Nasbau and “Northern” or RNA blotting, or combinations of such techniques, using a suitably labeled polynucleotide. A variety of labels and labeling methods for polynucleotides are known in the art and can be used in the assay methods of the invention. Specificity of hybridization can be determined by comparison to appropriate controls.

[0270] Polynucleotides generally comprising at least 10 nt, at least 12 nt or at least 15 contiguous nucleotides of a polynucleotide provided herein, such as, for example, those having the sequence as depicted in Tables 1-128, are used for a variety of purposes, such as probes for detection of and/or measurement of, transcription levels of a polynucleotide that is differentially expressed in a prostate cancer cell. As will be readily appreciated by the ordinarily skilled artisan, the probe can be detectably labeled and contacted with, for example, an array comprising immobilized polynucleotides obtained from a test sample (e.g., mRNA). Alternatively, the probe can be immobilized on an array and the test sample detectably labeled. These and other variations of the methods of the invention are well within the skill in the art and are within the scope of the invention.

[0271] Nucleotide probes are used to detect expression of a gene corresponding to the provided polynucleotide. In Northern blots, mRNA is separated electrophoretically and contacted with a probe. A probe is detected as hybridizing to an mRNA species of a particular size. The amount of hybridization can be quantitated to determine relative amounts of expression, for example under a particular condition. Probes are used for in situ hybridization to cells to detect expression. Probes can also be used in vivo for diagnostic detection of hybridizing sequences. Probes are typically labeled with a radioactive isotope. Other types of detectable labels can be used such as chromophores, fluorophores, and enzymes. Other examples of nucleotide hybridization assays are described in WO92/02526 and U.S. Pat. No. 5,124,246.

[0272] PCR is another means for detecting small amounts of target nucleic acids (see, e.g., Mullis et al., Meth. Enzymol. (1987) 155:335; U.S. Pat. No. 4,683,195; and U.S. Pat. No. 4,683,202). Two primer oligonucleotides that hybridize with the target nucleic acids are used to prime the reaction. The primers can be composed of sequence within or 3′ and 5′ to the CA polynucleotides disclosed herein. Alternatively, if the primers are 3′ and 5′ to these polynucleotides, they need not hybridize to them or the complements. After amplification of the target with a thermostable polymerase, the amplified target nucleic acids can be detected by methods known in the art, e.g., Southern blot. mRNA or cDNA can also be detected by traditional blotting techniques (e.g., Southern blot, Northern blot, etc.) described in Sambrook et al., “Molecular Cloning: A Laboratory Manual” (New York, Cold Spring Harbor Laboratory, 1989) (e.g., without PCR amplification). In general, mRNA or cDNA generated from mRNA using a polymerase enzyme can be purified and separated using gel electrophoresis, and transferred to a solid support, such as nitrocellulose. The solid support is exposed to a labeled probe, washed to remove any unhybridized probe, and duplexes containing the labeled probe are detected.

[0273] Methods using PCR amplification can be performed on the DNA from a single cell, although it is convenient to use at least about 10⁵ cells. The use of the polymerase chain reaction is described in Saiki et al. (1985) Science 239:487, and a review of current techniques may be found in Sambrook, et al. Molecular Cloning: A Laboratory Manual. CSH Press 1989, pp. 14.2-14.33. A detectable label may be included in the amplification reaction. Suitable detectable labels include fluorochromes, (e.g. fluorescein isothiocyanate (FITC), rhodamine, Texas Red, phycoerythrin, allophycocyanin, 6-carboxyfluorescein (6-FAM), 2′,7′-dimethoxy-4′,5′-dichloro-6-carboxyfluorescein, 6-carboxy-Xrhodamine (ROX), 6-carboxy-2′,4′,7′,4,7-hexachlorofluorescein (HEX), 5-carboxyfluorescein (5-FAM) or N,N,N′,N′-tetramethyl-6-carboxyrhodamine (TAMRA)), radioactive labels, (e.g. ³²P, ³⁵S, ³H, etc.), and the like. The label may be a two stage system, where the polynucleotides is conjugated to biotin, haptens, etc. having a high affinity binding partner, e.g. avidin, specific antibodies, etc., where the binding partner is conjugated to a detectable label. The label may be conjugated to one or both of the primers. Alternatively, the pool of nucleotides used in the amplification is labeled, so as to incorporate the label into the amplification product.

[0274] The detection methods can be provided as part of a kit. Thus, the invention further provides kits for detecting the presence and/or a level of a polynucleotide that is differentially expressed in a cancer cell (e.g., by detection of an mRNA encoded by the differentially expressed gene of interest), and/or a polypeptide encoded thereby, in a biological sample. Procedures using these kits can be performed by clinical laboratories, experimental laboratories, medical practitioners, or private individuals. The kits of the invention for detecting a polypeptide encoded by a polynucleotide that is differentially expressed in a cancer cell may comprise a moiety that specifically binds the polypeptide, which may be an antibody that binds the polypeptide or fragment thereof. The kits of the invention used for detecting a polynucleotide that is differentially expressed in a prostate cancer cell may comprise a moiety that specifically hybridizes to such a polynucleotide. The kit may optionally provide additional components that are useful in the procedure, including, but not limited to, buffers, developing reagents, labels, reacting surfaces, means for detection, control samples, standards, instructions, and interpretive information. Accordingly, the present invention provides kits for detecting prostate cancer comprising at least one of polynucleotides having the sequence as shown in Tables 1-128 or fragments thereof.

[0275] The present invention further relates to methods of detecting/diagnosing a neoplastic or preneoplastic condition in a mammal (for example, a human). “Diagnosis” as used herein generally includes determination of a subject's susceptibility to a disease or disorder, determination as to whether a subject is presently affected by a disease or disorder, prognosis of a subject affected by a disease or disorder (e.g., identification of pre-metastatic or metastatic cancerous states, stages of cancer, or responsiveness of cancer to therapy), and therametrics (e.g., monitoring a subject's condition to provide information as to the effect or efficacy of therapy).

[0276] The terms “treatment”, “treating”, “treat” and the like are used herein to generally refer to obtaining a desired pharmacologic and/or physiologic effect. The effect may be prophylactic in terms of completely or partially preventing a disease or symptom thereof and/or may be therapeutic in terms of a partial or complete stabilization or cure for a disease and/or adverse effect attributable to the disease. “Treatment” as used herein covers any treatment of a disease in a mammal, particularly a human, and includes: (a) preventing the disease or symptom from occurring in a subject which may be predisposed to the disease or symptom but has not yet been diagnosed as having it; (b) inhibiting the disease symptom, i.e., arresting its development; or (c) relieving the disease symptom, i.e., causing regression of the disease or symptom.

[0277] An “effective amount” is an amount sufficient to effect beneficial or desired results, including clinical results. An effective amount can be administered in one or more administrations.

[0278] A “cell sample” encompasses a variety of sample types obtained from an individual and can be used in a diagnostic or monitoring assay. The definition encompasses blood and other liquid samples of biological origin, solid tissue samples such as a biopsy specimen or tissue cultures or cells derived therefrom, and the progeny thereof. The definition also includes samples that have been manipulated in any way after their procurement, such as by treatment with reagents, solubilization, or enrichment for certain components, such as proteins or polynucleotides. The term “cell sample” encompasses a clinical sample, and also includes cells in culture, cell supernatants, cell lysates, serum, plasma, biological fluid, and tissue samples.

[0279] As used herein, the terms “neoplastic cells”, “neoplasia”, “tumor”, “tumor cells”, “cancer” and “cancer cells”, (used interchangeably) refer to cells which exhibit relatively autonomous growth, so that they exhibit an aberrant growth phenotype characterized by a significant loss of control of cell proliferation (i.e., de-regulated cell division). Neoplastic cells can be malignant or benign.

[0280] The terms “individual,” “subject,” “host,” and “patient,” are used interchangeably herein and refer to any mammalian subject for whom diagnosis, treatment, or therapy is desired, particularly humans. Other subjects may include cattle, dogs, cats, guinea pigs, rabbits, rats, mice, horses, and so on. Examples of conditions that can be detected/diagnosed in accordance with these methods include cancers. Polynucleotides corresponding to genes that exhibit the appropriate expression pattern can be used to detect cancer in a subject. For a review of markers of cancer, see, e.g., Hanahan et al. Cell 100:57-70 (2000).

[0281] One detection/diagnostic method comprises: (a) obtaining from a mammal (e.g., a human) a biological sample, (b) detecting the presence in the sample of a CA protein and (c) comparing the amount of product present with that in a control sample. In accordance with this method, the presence in the sample of elevated levels of a CA gene product indicates that the subject has a neoplastic or preneoplastic condition.

[0282] Biological samples suitable for use in this method include biological fluids such as serum, plasma, pleural effusions, urine and cerebro-spinal fluid, CSF, tissue samples (e.g., mammary tumor or prostate tissue slices) can also be used in the method of the invention, including samples derived from biopsies. Cell cultures or cell extracts derived, for example, from tissue biopsies can also be used.

[0283] The compound is preferably a binding protein, e.g., an antibody, polyclonal or monoclonal, or antigen binding fragment thereof, which can be labeled with a detectable marker (e.g., fluorophore, chromophore or isotope, etc). Where appropriate, the compound can be attached to a solid support such as a bead, plate, filter, resin, etc. Determination of formation of the complex can be effected by contacting the complex with a further compound (e.g., an antibody) that specifically binds to the first compound (or complex). Like the first compound, the further compound can be attached to a solid support and/or can be labeled with a detectable marker.

[0284] The identification of elevated levels of CA protein in accordance with the present invention makes possible the identification of subjects (patients) that are likely to benefit from adjuvant therapy. For example, a biological sample from a post primary therapy subject (e.g., subject having undergone surgery) can be screened for the presence of circulating CA protein, the presence of elevated levels of the protein, determined by studies of normal populations, being indicative of residual tumor tissue. Similarly, tissue from the cut site of a surgically removed tumor can be examined (e.g., by immunofluorescence), the presence of elevated levels of product (relative to the surrounding tissue) being indicative of incomplete removal of the tumor. The ability to identify such subjects makes it possible to tailor therapy to the needs of the particular subject. Subjects undergoing non-surgical therapy, e.g., chemotherapy or radiation therapy, can also be monitored, the presence in samples from such subjects of elevated levels of CA protein being indicative of the need for continued treatment. Staging of the disease (for example, for purposes of optimizing treatment regimens) can also be effected, for example, by biopsy e.g., with antibody specific for a CA protein.

(f) Animal Models and Transgenics

[0285] In another preferred embodiment CA genes find use in generating animal models of cancers, particularly lymphomas and carcinomas. As is appreciated by one of ordinary skill in the art, when the CA gene identified is repressed or diminished in CA tissue, gene therapy technology wherein antisense RNA directed to the CA gene will also diminish or repress expression of the gene. An animal generated as such serves as an animal model of CA that finds use in screening bioactive drug candidates. Similarly, gene knockout technology, for example as a result of homologous recombination with an appropriate gene targeting vector, will result in the absence of the CA protein. When desired, tissue-specific expression or knockout of the CA protein may be necessary.

[0286] It is also possible that the CA protein is overexpressed in cancer. As such, transgenic animals can be generated that overexpress the CA protein. Depending on the desired expression level, promoters of various strengths can be employed to express the transgene. Also, the number of copies of the integrated transgene can be determined and compared for a determination of the expression level of the transgene. Animals generated by such methods find use as animal models of CA and are additionally useful in screening for bioactive molecules to treat cancer.

Characterization of CA Sequences

[0287] The CA nucleic acid sequences of the invention are depicted in Tables 1-128. The sequences in each Table include genomic DNA sequence (mD07-001 through mD07-128; hD07-001 through hD07-128), sequence corresponding to the mRNA (mR07-001 through mR07-128; hR07-001 through hR07-128) and amino acid sequences of the proteins (mP07-001 through mP07-128; hP07-001 through hP07-128 encoded by the mRNA for both mouse and human genes. N/A indicates a gene that has been identified, but for which there has not been a name ascribed.

[0288] The CA sequences were analyzed by Panther™ (Molecular Diagnostics, Palo Alto, Calif.) software designed to detect homologs and enable prediction of molecular function through a system for protein functional classification. Human Gene Ontlogy annotations were prepared in accordance with the Gene Ontology Consortium (Gene Ontology: tool for the unification of biology. The Gene Ontology Consortium Nature Genet. 25: 25-29 (2000)). Similar analysis was carried out by determining IPR information regarding the CA polypeptides from InterPro, which is an integrated documentation resource for protein families, domains and functional sites (Apweiler at al. Bioinformatics 16(12):1145-1150 (2000)).

[0289] The CA sequences may be classified according to the following predicted general classifications of function by Panther™ analysis, human gene ontology and IPR domain information for polypeptides hP07-001 through hP07-128 as shown below in Table 129.

TABLE 129

| PROTEIN | CLASSIFICATION |
|---|---|
| hP07-001 | HUMAN PANTHER CLASSIFICATIONS |
| | No Panther Hit |
| | HUMAN GENE ONTOLOGY |
| | No Gene Ontology |
| | HUMAN PROTEIN DOMAINS (INTERPRO SIGNATURES) |
| | IPR001841 (zf-C3HC4) |
| | IPR000345 (CYTOCHROME C) |
| hP07-002 | HUMAN PANTHER CLASSIFICATIONS |
| | FAMILY (SUBFAMILY) |
| | BRANCHED-CHAIN AMINO ACID AMINOTRANSFERASE (BRANCHED- |
| | CHAIN AMINO ACID AMINOTRANSFERASE, CYTOSOLIC) |
| | MOLECULAR FUNCTIONS |
| | TRANSFERASE > TRANSAMINASE |
| | BIOLOGICAL PROCESS |
| | AMINO-ACID METABOLISM > AMINO ACID CATABOLISM |
| | AMINO-ACID METABOLISM > AMINO ACID BIOSYNTHESIS |
| | HUMAN GENE ONTOLOGY |
| | PROCESS |
| | cell growth and maintenance > metabolism |
| | branched chain family amino-acid metabolism |
| | amino-acid biosynthesis > branched chain family amino-acid biosynthesis |
| | amino-acid and derivative metabolism > amino-acid metabolism |
| | cell growth and maintenance > metabolism |
| | amino-acid metabolism > isoleucine metabolism |
| | branched chain family amino-acid metabolism |
| | FUNCTION |
| | aminotransferase > branched-chain amino-acid aminotransferase |
| | GO molecular function > enzyme |
| | LOCATION |
| | cytoplasm > mitochondrion |
| | cytoplasm > cytosol |
| | mitochondrion > mitochondrial matrix |
| | HUMAN PROTEIN DOMAINS (INTERPRO SIGNATURES) |
| | IPR001544 (sp P54687 BCAT HUMAN) |
| | IPR001544 (aminotran 4) |
| | IPR001544 (AA TRANSFER CLASS 4) |
| hP07-002.1 | HUMAN PANTHER CLASSIFICATIONS |
| | FAMILY (SUBFAMILY) |
| | BRANCHED-CHAIN AMINO ACID AMINOTRANSFERASE(BRANCHED- |
| | CHAIN AMINO ACID AMINOTRANSFERASE, CYTOSOLIC) |
| | MOLECULAR FUNCTIONS |
| | TRANSFERASE > TRANSAMINASE |
| | BIOLOGICAL PROCESS |
| | AMINO-ACID METABOLISM > AMINO ACID CATABOLISM |
| | AMINO-ACID METABOLISM > AMINO ACID BIOSYNTHESIS |
| | HUMAN GENE ONTOLOGY |
| | PROCESS |
| | cell growth and maintenance > metabolism |
| | branched chain family amino-acid metabolism |
| | amino-acid biosynthesis > branched chain family amino-acid biosynthesis |
| | amino-acid and derivative metabolism > amino-acid metabolism |
| | cell growth and maintenance > metabolism |
| | amino-acid metabolism > isoleucine metabolism |
| | branched chain family amino-acid metabolism |
| | FUNCTION |
| | aminotransferase > branched-chain amino-acid aminotransferase |
| | GO molecular function > enzyme |
| | LOCATION |
| | cytoplasm > mitochondrion |
| | cytoplasm > cytosol |
| | mitochondrion > mitochondrial matrix |
| | HUMAN PROTEIN DOMAINS (INTERPRO SIGNATURES) |
| | IPR001544 (sp P54687 BCAT HUMAN) |
| | IPR001544 (aminotran 4) |
| | IPR001544 (AA TRANSFER CLASS 4) |
| hP07-003 | HUMAN PANTHER CLASSIFICATIONS |
| | FAMILY (SUBFAMILY) |
| | THY-1 MEMBRANE GLYCOPROTEIN |
| | HUMAN GENE ONTOLOGY |
| | PROCESS |
| | protein-membrane targeting > post-translational membrane targeting |
| | FUNCTION |
| | B cell receptor |
| | defense/immunity protein > immunoglobulin |
| | molecular_function unknown > lymphocyte antigen |
| | LOCATION |
| | plasma membrane > integral plasma membrane protein |
| | cell > plasma membrane |
| | HUMAN PROTEIN DOMAINS (INTERPRO SIGNATURES) |
| | IPR003006 (ig) |
| | IPR003596 (IGv) |
| hP07-004 | HUMAN PANTHER CLASSIFICATIONS |
| | FAMILY (SUBFAMILY) |
| | DUAL SPECIFICITY AND SERINE/THREONINE PROTEIN |
| | KINASE(SERINE/THREONINE-PROTEIN KINASE) |
| | MOLECULAR FUNCTIONS |
| | KINASE > PROTEIN KINASE > NON-RECEPTOR SERINE/THREONINE |
| | PROTEIN KINASE |
| | BIOLOGICAL PROCESS |
| | PROTEIN METABOLISM AND MODIFICATION > PROTEIN |
| | MODIFICATION > PROTEIN PHOSPHORYLATION |
| | SIGNAL TRANSDUCTION > INTRACELLULAR SIGNALING CASCADE |
| | HUMAN GENE ONTOLOGY |
| | PROCESS |
| | protein modification > protein phosphorylation |
| | cell communication > signal transduction |
| | monosaccharide metabolism > glucose metabolism |
| | protein modification > protein dephosphorylation |
| | FUNCTION |
| | enzyme > protein kinase |
| | nucleotide binding > ATP binding |
| | protein kinase > protein tyrosine kinase |
| | GO molecular function > cell cycle regulator |
| | ligand binding or carrier > calcium binding |
| | LOCATION |
| | cell > cytoplasm |
| | cell > nucleus |
| | cytoskeleton > microtubule cytoskeleton |
| | GO cellular component > intracellular |
| | microtubule organizing center > centrosome |
| | HUMAN PROTEIN DOMAINS (INTERPRO SIGNATURES) |
| | IPR000719 (PROTEIN KINASE DOM) |
| | IPR000719 (pkinase) |
| | IPR001245 (TYRKINASE) |
| | IPR001245 (TyrKc) |
| | IPR002290 (S TKc) |
| | IPR000719 (PROTEIN KINASE ATP) |
| | IPR002290 (PROTEIN KINASE ST) |
| hP07-005 | HUMAN PANTHER CLASSIFICATIONS |
| | FAMILY (SUBFAMILY) |
| | RIBONUCLEOPROTEIN(SINGLE-STRANDED DNA-BINDING PROTEIN |
| | MSSP-1) |
| | MOLECULAR FUNCTIONS |
| | NUCLEIC ACID BINDING > REPLICATION ORIGIN BINDING PROTEIN |
| | NUCLEIC ACID BINDING > SINGLE-STRANDED DNA-BINDING PROTEIN |
| | BIOLOGICAL PROCESS |
| | NUCLEOSIDE, NUCLEOTIDE AND NUCLEIC ACID METABOLISM > DNA |
| | METABOLISM |
| | PROTEIN METABOLISM AND MODIFICATION > TRANSLATIONAL |
| | REGULATION |
| | CELL CYCLE > DNA REPLICATION |
| | HUMAN GENE ONTOLOGY |
| | PROCESS |
| | protein biosynthesis > translational regulation |
| | RNA processing > pre-mRNA processing |
| | transcription, DNA-dependent > RNA processing |
| | transcription from Pol II promoter |
| | peptidoglycan catabolism > mRNA polyadenylation |
| | ectoderm development > neurogenesis |
| | FUNCTION |
| | nucleic acid binding > RNA binding |
| | GO molecular function > nucleic acid binding |
| | mRNA binding > mRNA binding, 3&apos; UTR |
| | DNA binding > double-stranded DNA binding |
| | DNA binding > single-stranded DNA binding |
| | LOCATION |
| | nuclear membrane > nuclear membrane lumen |
| | cell > nucleus |
| | nucleus > coiled body |
| | cell > cytoplasm |
| | nucleus > spliceosome |
| | HUMAN PROTEIN DOMAINS (INTERPRO SIGNATURES) |
| | IPR000504 (RRM 2) |
| | IPR000504 (rrm) |
| | IPR002343 (HUDSXLRNA) |
| | IPR000504 (RRM) |
| | IPR000504 (RRM RNP 1) |
| hP07-006 | HUMAN PANTHER CLASSIFICATIONS |
| | FAMILY (SUBFAMILY) |
| | DUAL SPECIFICITY AND SERINE/THREONINE PROTEIN KINASE |
| | HUMAN GENE ONTOLOGY |
| | PROCESS |
| | protein modification > protein phosphorylation |
| | cell communication > signal transduction |
| | M phase > mitosis |
| | FUNCTION |
| | enzyme > protein kinase |
| | nucleotide binding > ATP binding |
| | protein kinase > protein tyrosine kinase |
| | protein binding > calmodulin binding |
| | protein threonine/tyrosine kinase > MAP kinase kinase |
| | LOCATION |
| | cell > cytoplasm |
| | cell > nucleus |
| | GO cellular component > intracellular |
| | GO cellular component > cellular_component unknown |
| | cytoskeleton > microtubule cytoskeleton |
| | HUMAN PROTEIN DOMAINS (INTERPRO SIGNATURES) |
| | IPR000719 (PROTEIN KINASE DOM) |
| | IPR000694 (PRO RICH) |
| | IPR000719 (pkinase) |
| | IPR001245 (TYRKINASE) |
| | IPR001245 (TyrKc) |
| | IPR002290 (S TKc) |
| | IPR002290 (PROTEIN KINASE ST) |
| hP07-007 | HUMAN PANTHER CLASSIFICATIONS |
| | No Panther Hit |
| | HUMAN GENE ONTOLOGY |
| | PROCESS |
| | developmental processes > fertilization |
| | FUNCTION |
| | enzyme > sulfatase |
| | LOCATION |
| | cell > membrane fraction |
| | HUMAN PROTEIN DOMAINS (INTERPRO SIGNATURES) |
| | No Domain Hit |
| hP07-008 | HUMAN PANTHER CLASSIFICATIONS |
| | FAMILY (SUBFAMILY) |
| | DUAL SPECIFICITY AND SERINE/THREONINE PROTEIN |
| | KINASE(SERINE/THREONINE KINASE STE20-RELATED) |
| | MOLECULAR FUNCTIONS |
| | KINASE > PROTEIN KINASE |
| | BIOLOGICAL PROCESS |
| | PROTEIN METABOLISM AND MODIFICATION > PROTEIN |
| | MODIFICATION > PROTEIN PHOSPHORYLATION |
| | HUMAN GENE ONTOLOGY |
| | PROCESS |
| | protein modification > protein phosphorylation |
| | protein modification > protein dephosphorylation |
| | cell communication > signal transduction |
| | protein kinase cascade > JNK cascade |
| | FUNCTION |
| | enzyme > protein kinase |
| | nucleotide binding > ATP binding |
| | protein kinase > protein tyrosine kinase |
| | protein threonine/tyrosine kinase > MAP kinase kinase |
| | LOCATION |
| | cell > cytoplasm |
| | mitochondrion > mitochondrial matrix |
| | GO cellular component > cellular_component unknown |
| | cell-substrate adherens junction > focal adhesion |
| | actin cytoskeleton > non-muscle myosin |
| | HUMAN PROTEIN DOMAINS (INTERPRO SIGNATURES) |
| | IPR000719 (PROTEIN KINASE DOM) |
| | IPR000719 (pkinase) |
| | IPR001245 (TYRKINASE) |
| | IPR001245 (TyrKc) |
| | IPR002290 (S TKc) |
| hP07-009 | HUMAN PANTHER CLASSIFICATIONS |
| | No Panther Hit |
| | HUMAN GENE ONTOLOGY |
| | PROCESS |
| | neurogenesis > central nervous system development |
| | microtubule-based process |
| | nuclear congression |
| | peptidoglycan catabolism > microtubule-based movement |
| | transcription, DNA-dependent > transcription regulation |
| | protein modification > protein phosphorylation |
| | DNA dependent DNA replication > DNA topological change |
| | FUNCTION |
| | enzyme > nitric oxide synthase |
| | nucleotide binding > ATP binding |
| | GO molecular function > cell cycle regulator |
| | enzyme > protein kinase |
| | DNA binding > transcription factor |
| | LOCATION |
| | GO cellular component > extracellular |
| | mitochondrial membrane > mitochondrial inner membrane |
| | plasma membrane > integral plasma membrane protein |
| | nuclear membrane > nuclear membrane lumen |
| | cell > nucleus |
| | HUMAN PROTEIN DOMAINS (INTERPRO SIGNATURES) |
| | No Domain Hit |
| hP07-009.1 | HUMAN PANTHER CLASSIFICATIONS |
| | No Panther Hit |
| | HUMAN GENE ONTOLOGY |
| | PROCESS |
| | cell growth and maintenance > metabolism |
| | FUNCTION |
| | enzyme > methyltransferase |
| | S-methyltransferase > S-adenosylmethionine-dependent methyltransferase |
| | LOCATION |
| | cell > cytoplasm |
| | HUMAN PROTEIN DOMAINS (INTERPRO SIGNATURES) |
| | IPR000051 (SAM BIND) |
| | IPR001601 (MET TRANS) |
| hP07-009.2 | HUMAN PANTHER CLASSIFICATIONS |
| | No Panther Hit |
| | HUMAN GENE ONTOLOGY |
| | No Gene Ontology |
| | HUMAN PROTEIN DOMAINS (INTERPRO SIGNATURES) |
| | No Domain Hit |
| hP07-010 | HUMAN PANTHER CLASSIFICATIONS |
| | FAMILY (SUBFAMILY) |
| | ACTIN-RELATED (ACTIN) |
| | MOLECULAR FUNCTIONS |
| | CYTOSKELETAL PROTEIN > ACTIN FAMILY CYTOSKELETAL PROTEIN > ACTIN |
| | AND ACTIN RELATED PROTEIN |
| | BIOLOGICAL PROCESS |
| | CELL STRUCTURE AND MOTILITY > CELL STRUCTURE |
| | HUMAN GENE ONTOLOGY |
| | PROCESS |
| | spindle pole body and microtubule cycle (sensu Saccharomyces) |
| | peptidoglycan catabolism > mitotic spindle orientation |
| | mesoderm development > muscle development |
| | mitochondrion organization and biogenesis > mitochondrion inheritance |
| | vacuole organization and biogenesis > vacuole inheritance |
| | muscle contraction > muscle contraction regulation |
| | FUNCTION |
| | GO molecular function > motor |
| | LOCATION |
| | cytoskeleton > actin filament |
| | cell wall > muscle myosin |
| | thick filament |
| | actin cytoskeleton > dynactin complex |
| | non-muscle myosin |
| | thin filament |
| | cell wall > muscle myosin |
| | cytoplasm > cytoskeleton |
| | actin cytoskeleton > dynactin complex |
| | HUMAN PROTEIN DOMAINS (INTERPRO SIGNATURES) |
| | IPR000279 (actin) |
| | IPR000279 (ACTIN) |
| | IPR000279 (ACTINS 2) |
| hP07-010.1 | HUMAN PANTHER CLASSIFICATIONS |
| | FAMILY (SUBFAMILY) |
| | ACTIN-RELATED(ACTIN) |
| | MOLECULAR FUNCTIONS |
| | CYTOSKELETAL PROTEIN > ACTIN FAMILY CYTOSKELETAL PROTEIN > ACTIN |
| | AND ACTIN RELATED PROTEIN |
| | BIOLOGICAL PROCESS |
| | CELL STRUCTURE AND MOTILITY > CELL STRUCTURE |
| | HUMAN GENE ONTOLOGY |
| | PROCESS |
| | mitochondrion organization and biogenesis > mitochondrion inheritance |
| | vacuole organization and biogenesis > vacuole inheritance |
| | spindle pole body and microtubule cycle (sensu Saccharomyces) |
| | peptidoglycan catabolism > mitotic spindle orientation |
| | mesoderm development > muscle development |
| | defence response > osmotic response |
| | FUNCTION |
| | GO molecular function > motor |
| | protein binding > actin binding |
| | actin binding > actin polymerising |
| | actin binding > actin cross-linking |
| | GO molecular function > molecular_function unknown |
| | LOCATION |
| | cytoskeleton > actin filament |
| | cell wall > muscle myosin |
| | thick filament |
| | actin cytoskeleton |
| | non-muscle myosin |
| | thin filament |
| | cell wall > muscle myosin |
| | cytoplasm > cytoskeleton |
| | cytoskeleton > actin filament |
| | HUMAN PROTEIN DOMAINS (INTERPRO SIGNATURES) |
| | IPR000279 (actin) |
| | IPR000279 (ACTIN) |
| | IPR000279 (ACTIN) |
| | IPR000279 (ACTINS 1) |
| | IPR000279 (ACTINS 2) |
| | IPR000279 (ACTINS ACT LIKE) |
| hP07-011 | HUMAN PANTHER CLASSIFICATIONS |
| | FAMILY (SUBFAMILY) |
| | RAS SUPERFAMILY (RAP) |
| | MOLECULAR FUNCTIONS |
| | SELECT REGULATORY MOLECULE > G-PROTEIN > SMALL GTPASE |
| | BIOLOGICAL PROCESS |
| | SIGNAL TRANSDUCTION |
| | CELL CYCLE > CELL CYCLE CONTROL |
| | HUMAN GENE ONTOLOGY |
| | PROCESS |
| | intracellular signaling cascade > small GTPase mediated signal transduction |
| | cell cycle > cell cycle control |
| | cell communication > signal transduction |
| | cell growth and maintenance > cell cycle |
| | budding > axial budding |
| | LOCATION |
| | plasma membrane > peripheral plasma membrane protein |
| | cell > cytoplasm |
| | cell > bud |
| | cell > plasma membrane |
| | HUMAN PROTEIN DOMAINS (INTERPRO SIGNATURES) |
| | IPR001806 (RASTRNSFRMNG) |
| | IPR003577 (RAS) |
| | IPR001687 (ATP GTP A) |
| hP07-011.1 | HUMAN PANTHER CLASSIFICATIONS |
| | FAMILY (SUBFAMILY) |
| | RAS SUPERFAMILY (RAP) |
| | MOLECULAR FUNCTIONS |
| | SELECT REGULATORY MOLECULE > G-PROTEIN > SMALL GTPASE |
| | BIOLOGICAL PROCESS |
| | SIGNAL TRANSDUCTION |
| | CELL CYCLE > CELL CYCLE CONTROL |
| | HUMAN GENE ONTOLOGY |
| | PROCESS |
| | intracellular signaling cascade > small GTPase mediated signal transduction |
| | cell cycle > cell cycle control |
| | cell growth and maintenance > cell shape and cell size control |
| | cell communication > signal transduction |
| | LOCATION |
| | cell > cytoplasm |
| | plasma membrane > peripheral plasma membrane protein |
| | cell > plasma membrane |
| | GO cellular component > intracellular |
| | cytoplasm > cytosol |
| | HUMAN PROTEIN DOMAINS (INTERPRO SIGNATURES) |
| | IPR001806 (ras) |
| | IPR001806 (RASTRNSFRMNG) |
| | IPR003577 (RAS) |
| | IPR003578 (RHO) |
| | IPR003579 (RAB) |
| hP07-011.2 | HUMAN PANTHER CLASSIFICATIONS |
| | FAMILY (SUBFAMILY) |
| | RAS SUPERFAMILY(RAP) |
| | MOLECULAR FUNCTIONS |
| | SELECT REGULATORY MOLECULE > G-PROTEIN > SMALL GTPASE |
| | BIOLOGICAL PROCESS |
| | SIGNAL TRANSDUCTION |
| | CELL CYCLE > CELL CYCLE CONTROL |
| | HUMAN GENE ONTOLOGY |
| | PROCESS |
| | intracellular signaling cascade > small GTPase mediated signal transduction |
| | cell cycle > cell cycle control |
| | cell growth and maintenance > cell shape and cell size control |
| | cell communication > signal transduction |
| | LOCATION |
| | cell > cytoplasm |
| | plasma membrane > peripheral plasma membrane protein |
| | cell > plasma membrane |
| | GO cellular component > intracellular |
| | cytoplasm > cytosol |
| | HUMAN PROTEIN DOMAINS (INTERPRO SIGNATURES) |
| | IPR001806 (ras) |
| | IPR001806 (RASTRNSFRMNG) |
| | IPR003577 (RAS) |
| | IPR003578 (RHO) |
| | IPR003579 (RAB) |
| | IPR002041 (RAN) |
| | IPR001687 (ATP GTP A) |
| hP07-012 | HUMAN PANTHER CLASSIFICATIONS |
| | No Panther Hit |
| | HUMAN GENE ONTOLOGY |
| | PROCESS |
| | small GTPase mediated signal transduction > RAS protein signal transduction |
| | G protein linked receptor protein signaling pathway > neuropeptide signaling pathway |
| | FUNCTION |
| | enzyme > gamma-butyrobetaine, 2-oxoglutarate dioxygenase |
| | heavy metal binding > zinc binding |
| | LOCATION |
| | nuclear membrane > nuclear membrane lumen |
| | cell > cytoplasm |
| | HUMAN PROTEIN DOMAINS (INTERPRO SIGNATURES) |
| | IPR000159 (RA DOMAIN) |
| | IPR000159 (RA) |
| | IPR000159 (RA) |
| hP07-013 | HUMAN PANTHER CLASSIFICATIONS |
| | No Panther Hit |
| | HUMAN GENE ONTOLOGY |
| | No Gene Ontology |
| | HUMAN PROTEIN DOMAINS (INTERPRO SIGNATURES) |
| | No Domain Hit |
| hP07-014 | HUMAN PANTHER CLASSIFICATIONS |
| | FAMILY (SUBFAMILY) |
| | VOLTAGE-DEPENDENT POTASSIUM CHANNEL ALPHA |
| | SUBUNIT(VOLTAGE-GATED POTASSIUM CHANNEL PROTEIN KV1.5) |
| | MOLECULAR FUNCTIONS |
| | ION CHANNEL > VOLTAGE-GATED ION CHANNEL > VOLTAGE-GATED |
| | POTASSIUM CHANNEL |
| | BIOLOGICAL PROCESS |
| | TRANSPORT > ION TRANSPORT > CATION TRANSPORT |
| | HUMAN GENE ONTOLOGY |
| | PROCESS |
| | monovalent inorganic cation transport > potassium transport |
| | ion transport > cation transport |
| | transport > ion transport |
| | cell motility > muscle contraction |
| | cell—cell signaling > synaptic transmission |
| | FUNCTION |
| | nucleic acid binding > RNA binding |
| | LOCATION |
| | integral plasma membrane protein > voltage-gated potassium channel |
| | cell > membrane fraction |
| | plasma membrane > integral plasma membrane protein |
| | HUMAN PROTEIN DOMAINS (INTERPRO SIGNATURES) |
| | IPR000636 (CATION CHANNEL TM) |
| | IPR001622 (CHANNEL PORE K) |
| | IPR000636 (ion trans) |
| | IPR003131 (K tetra) |
| | IPR003091 (KCHANNEL) |
| | IPR000210 (BTB) |
| hP07-015 | HUMAN PANTHER CLASSIFICATIONS |
| | No Panther Hit |
| | HUMAN GENE ONTOLOGY |
| | No Gene Ontology |
| | HUMAN PROTEIN DOMAINS (INTERPRO SIGNATURES) |
| | No Domain Hit |
| hP07-016 | HUMAN PANTHER CLASSIFICATIONS |
| | FAMILY (SUBFAMILY) |
| | RIBOFLAVIN-BINDING PROTEIN-RELATED(FOLATE-BINDING PROTEIN) |
| | MOLECULAR FUNCTIONS |
| | RECEPTOR > OTHER RECEPTOR |
| | TRANSPORTER > OTHER TRANSPORTER |
| | BIOLOGICAL PROCESS |
| | COENZYME AND PROSTHETIC GROUP METABOLISM |
| | TRANSPORT > VITAMIN/COFACTOR TRANSPORT |
| | HUMAN GENE ONTOLOGY |
| | PROCESS |
| | protein-membrane targeting > post-translational membrane targeting |
| | vitamin/cofactor transport > folate transport |
| | endocytosis > receptor mediated endocytosis |
| | antimicrobial response > antibacterial response |
| | FUNCTION |
| | ligand binding or carrier > folate binding |
| | molecular_function unknown > tumor antigen |
| | LOCATION |
| | cell > membrane fraction |
| | plasma membrane > peripheral plasma membrane protein |
| | plasma membrane > integral plasma membrane protein |
| | GO cellular component > extracellular |
| | HUMAN PROTEIN DOMAINS (INTERPRO SIGNATURES) |
| | No Domain Hit |
| hP07-017 | HUMAN PANTHER CLASSIFICATIONS |
| | No Panther Hit |
| | HUMAN GENE ONTOLOGY |
| | PROCESS |
| | eye morphogenesis > photoreceptor determination |
| | LOCATION |
| | nuclear membrane > nuclear membrane lumen |
| | HUMAN PROTEIN DOMAINS (INTERPRO SIGNATURES) |
| | No Domain Hit |
| hP07-018 | HUMAN PANTHER CLASSIFICATIONS |
| | No Panther Hit |
| | HUMAN GENE ONTOLOGY |
| | PROCESS |
| | monovalent inorganic cation transport > sodium transport |
| | cell growth and maintenance > transport |
| | isoprenoid catabolism > sulfur metabolism |
| | FUNCTION |
| | enzyme > gamma-butyrobetaine, 2-oxoglutarate dioxygenase |
| | enzyme > glutathione synthase |
| | LOCATION |
| | cell > membrane fraction |
| | plasma membrane > integral plasma membrane protein |
| | cytoplasm > mitochondrion |
| | mitochondrion > mitochondrial matrix |
| | HUMAN PROTEIN DOMAINS (INTERPRO SIGNATURES) |
| | IPR000676 (NAHEXCHNGR) |
| | IPR002090 (NAHEXCHNGR6) |
| hP07-019 | HUMAN PANTHER CLASSIFICATIONS |
| | No Panther Hit |
| | HUMAN GENE ONTOLOGY |
| | No Gene Ontology |
| | HUMAN PROTEIN DOMAINS (INTERPRO SIGNATURES) |
| | No Domain Hit |
| hP07-019.1 | HUMAN PANTHER CLASSIFICATIONS |
| | No Panther Hit |
| | HUMAN GENE ONTOLOGY |
| | No Gene Ontology |
| | HUMAN PROTEIN DOMAINS (INTERPRO SIGNATURES) |
| | No Domain Hit |
| hP07-020 | HUMAN PANTHER CLASSIFICATIONS |
| | No Panther Hit |
| | HUMAN GENE ONTOLOGY |
| | PROCESS |
| | cytoplasm organization and biogenesis > organelle organization and biogenesis |
| | FUNCTION |
| | glucosidase > mannosyl-oligosaccharide glucosidase (processing A-glucosidase I) |
| | enzyme > tubulin-tyrosine ligase |
| | DNA binding > ribosomal DNA (rDNA) binding |
| | LOCATION |
| | nuclear membrane > nuclear membrane lumen |
| | cell > cytoplasm |
| | cytoplasm > peroxisome |
| | HUMAN PROTEIN DOMAINS (INTERPRO SIGNATURES) |
| | No Domain Hit |
| hP07-021 | HUMAN PANTHER CLASSIFICATIONS |
| | No Panther Hit |
| | HUMAN GENE ONTOLOGY |
| | PROCESS |
| | ectoderm development > neurogenesis |
| | FUNCTION |
| | DNA binding > transcription factor |
| | LOCATION |
| | nuclear membrane > nuclear membrane lumen |
| | HUMAN PROTEIN DOMAINS (INTERPRO SIGNATURES) |
| | NULL (GLN RICH) |
| hP07-022 | HUMAN PANTHER CLASSIFICATIONS |
| | No Panther Hit |
| | HUMAN GENE ONTOLOGY |
| | No Gene Ontology |
| | HUMAN PROTEIN DOMAINS (INTERPRO SIGNATURES) |
| | No Domain Hit |
| hP07-023 | HUMAN PANTHER CLASSIFICATIONS |
| | FAMILY (SUBFAMILY) |
| | SODIUM: GALACTOSIDE SYMPORTER FAMILY MEMBER |
| | HUMAN GENE ONTOLOGY |
| | PROCESS |
| | monovalent inorganic cation transport > sodium transport |
| | transport > carbohydrate transport |
| | FUNCTION |
| | galactosidase > beta-galactosidase |
| | LOCATION |
| | cell > membrane fraction |
| | HUMAN PROTEIN DOMAINS (INTERPRO SIGNATURES) |
| | No Domain Hit |
| hP07-024 | HUMAN PANTHER CLASSIFICATIONS |
| | FAMILY (SUBFAMILY) |
| | LEUCINE RICH REPEAT PROTEIN(gb def: mfh-amplified sequences with |
| | leucine-rich tandem repeats 1 [homo sapiens]) |
| | MOLECULAR FUNCTIONS |
| | MOLECULAR FUNCTION UNCLASSIFIED |
| | BIOLOGICAL PROCESS |
| | BIOLOGICAL PROCESS UNCLASSIFIED |
| | HUMAN GENE ONTOLOGY |
| | PROCESS |
| | cell cycle > cell cycle control |
| | protein modification > protein phosphorylation |
| | cell communication > cell adhesion |
| | cell communication > cell adhesion |
| | cyclic nucleotide biosynthesis |
| | nucleotide biosynthesis > cAMP biosynthesis |
| | FUNCTION |
| | nucleotide binding > ATP binding |
| | GO molecular function > cell adhesion |
| | protein binding > insulin-like growth factor binding |
| | enzyme > adenylate cyclase |
| | enzyme > guanylate cyclase |
| | LOCATION |
| | intercellular junction > septate junction |
| | cell > plasma membrane |
| | cell > cytoplasm |
| | cell > membrane fraction |
| | plasma membrane > integral plasma membrane protein |
| | HUMAN PROTEIN DOMAINS (INTERPRO SIGNATURES) |
| | IPR001611 (LRR) |
| | IPR001611 (LEURICHRPT) |
| | IPR001806 (RASTRNSFRMNG) |
| | IPR003885 (LRR SD22) |
| | IPR003591 (LRR TYP) |
| | IPR001687 (ATP GTP A) |
| hP07-025 | HUMAN PANTHER CLASSIFICATIONS |
| | FAMILY (SUBFAMILY) |
| | CANNABINOID RECEPTOR-RELATED(MELANOCORTIN-1 RECEPTOR) |
| | MOLECULAR FUNCTIONS |
| | RECEPTOR > G-PROTEIN COUPLED RECEPTOR |
| | BIOLOGICAL PROCESS |
| | SIGNAL TRANSDUCTION > INTRACELLULAR SIGNALING CASCADE > NF- |
| | KAPPAB CASCADE |
| | SIGNAL TRANSDUCTION > CELL SURFACE RECEPTOR MEDIATED |
| | SIGNAL TRANSDUCTION > G-PROTEIN MEDIATED SIGNALING |
| | IMMUNITY AND DEFENSE > MACROPHAGE-MEDIATED IMMUNITY |
| | IMMUNITY AND DEFENSE > GRANULOCYTE-MEDIATED IMMUNITY |
| | DEVELOPMENTAL PROCESSES > ECTODERM DEVELOPMENT |
| | HUMAN GENE ONTOLOGY |
| | PROCESS |
| | G protein linked receptor protein signaling pathway > G protein signaling, linked to |
| | cyclic nucleotide second messenger |
| | cell surface receptor linked signal transduction > G protein linked receptor protein |
| | signaling pathway |
| | G protein signaling, linked to cyclic nucleotide second messenger > G protein |
| | signaling, linked to cAMP nucleotide second messenger |
| | behavior > feeding behavior |
| | MAPKKK cascade > activation of MAPK |
| | FUNCTION |
| | ligand binding or carrier > lipid binding |
| | amine oxidase > amine oxidase (flavin-containing) |
| | enzyme > guanylate kinase |
| | monooxygenase > monophenol monooxygenase |
| | LOCATION |
| | cell > membrane fraction |
| | plasma membrane > integral plasma membrane protein |
| | cell > plasma membrane |
| | cytoplasm > endosome |
| | HUMAN PROTEIN DOMAINS (INTERPRO SIGNATURES) |
| | IPR000276 (G PROTEIN RECEP F1 2) |
| | IPR000276 (7tm 1) |
| | IPR001671 (MCRFAMILY) |
| | IPR001908 (MELNOCORTINR) |
| | IPR000276 (GPCRRHODOPSN) |
| | IPR000761 (MELNOCYTESHR) |
| | IPR000276 (G PROTEIN RECEP F1 1) |
| hP07-026 | HUMAN PANTHER CLASSIFICATIONS |
| | FAMILY (SUBFAMILY) |
| | SYNTAXIN BINDING PROTEIN-RELATED (SYNTAXIN BINDING PROTEIN |
| | 1) |
| | MOLECULAR FUNCTIONS |
| | MEMBRANE TRAFFIC PROTEIN > MEMBRANE TRAFFIC REGULATORY |
| | PROTEIN |
| | BIOLOGICAL PROCESS |
| | INTRACELLULAR PROTEIN TRAFFIC > EXOCYTOSIS > REGULATED |
| | EXOCYTOSIS |
| | NEURONAL ACTIVITIES > SYNAPTIC TRANSMISSION > NEUROTRANSMITTER |
| | RELEASE |
| | HUMAN GENE ONTOLOGY |
| | PROCESS |
| | nucleotide metabolism > protein targeting |
| | cell growth and maintenance > intracellular protein traffic |
| | intracellular protein traffic > non-selective vesicle transport |
| | post Golgi transport > Golgi to plasma membrane transport |
| | intracellular protein traffic > exocytosis |
| | FUNCTION |
| | protein binding > SNARE binding |
| | metallocarboxypeptidase > gly-X carboxypeptidase |
| | LOCATION |
| | cytoplasm > synaptic vesicle |
| | cell > soluble fraction |
| | cell > insoluble fraction |
| | cell > cytoplasm |
| | cell > membrane fraction |
| | HUMAN PROTEIN DOMAINS (INTERPRO SIGNATURES) |
| | IPR001619 (Sec1) |
| hP07-026.1 | HUMAN PANTHER CLASSIFICATIONS |
| | FAMILY (SUBFAMILY) |
| | SYNTAXIN BINDING PROTEIN-RELATED(SYNTAXIN BINDING PROTEIN |
| | 1) |
| | MOLECULAR FUNCTIONS |
| | MEMBRANE TRAFFIC PROTEIN > MEMBRANE TRAFFIC REGULATORY |
| | PROTEIN |
| | BIOLOGICAL PROCESS |
| | INTRACELLULAR PROTEIN TRAFFIC > EXOCYTOSIS > REGULATED |
| | EXOCYTOSIS |
| | NEURONAL ACTIVITIES > SYNAPTIC TRANSMISSION > NEUROTRANSMITTER |
| | RELEASE |
| | HUMAN GENE ONTOLOGY |
| | PROCESS |
| | nucleotide metabolism > protein targeting |
| | cell growth and maintenance > intracellular protein traffic |
| | intracellular protein traffic > non-selective vesicle transport |
| | post Golgi transport > Golgi to plasma membrane transport |
| | intracellular protein traffic > exocytosis |
| | FUNCTION |
| | protein binding > SNARE binding |
| | metallocarboxypeptidase > gly-X carboxypeptidase |
| | LOCATION |
| | cytoplasm > synaptic vesicle |
| | cell > soluble fraction |
| | cell > insoluble fraction |
| | cell > cytoplasm |
| | cell > membrane fraction |
| | HUMAN PROTEIN DOMAINS (INTERPRO SIGNATURES) |
| | IPR001619 (Sec1) |
| hP07-027 | HUMAN PANTHER CLASSIFICATIONS |
| | No Panther Hit |
| | HUMAN GENE ONTOLOGY |
| | FUNCTION |
| | enzyme > N-acetylglucosaminylphosphatidylinositol deacetylase |
| | LOCATION |
| | nuclear membrane > nuclear membrane lumen |
| | HUMAN PROTEIN DOMAINS (INTERPRO SIGNATURES) |
| | IPR001472 (NLS BP 2) |
| hP07-027.1 | HUMAN PANTHER CLASSIFICATIONS |
| | No Panther Hit |
| | HUMAN GENE ONTOLOGY |
| | FUNCTION |
| | enzyme > N-acetylglucosaminylphosphatidylinositol deacetylase |
| | LOCATION |
| | nuclear membrane > nuclear membrane lumen |
| | HUMAN PROTEIN DOMAINS (INTERPRO SIGNATURES) |
| | IPR001472 (NLS BP 2) |
| hP07-027.2 | HUMAN PANTHER CLASSIFICATIONS |
| | No Panther Hit |
| | HUMAN GENE ONTOLOGY |
| | FUNCTION |
| | enzyme > N-acetylglucosaminylphosphatidylinositol deacetylase |
| | LOCATION |
| | nuclear membrane > nuclear membrane lumen |
| | HUMAN PROTEIN DOMAINS (INTERPRO SIGNATURES) |
| | IPR001472 (NLS BP 2) |
| hP07-028 | HUMAN PANTHER CLASSIFICATIONS |
| | No Panther Hit |
| | HUMAN GENE ONTOLOGY |
| | PROCESS |
| | stress response > DNA damage response |
| | FUNCTION |
| | nucleic acid binding > DNA binding |
| | LOCATION |
| | cytoplasm > peroxisome |
| | HUMAN PROTEIN DOMAINS (INTERPRO SIGNATURES) |
| | No Domain Hit |
| hP07-028.1 | HUMAN PANTHER CLASSIFICATIONS |
| | No Panther Hit |
| | HUMAN GENE ONTOLOGY |
| | PROCESS |
| | stress response > DNA damage response |
| | cell growth and maintenance > stress response |
| | spindle pole body and microtubule cycle (sensu Saccharomyces) |
| | peptidoglycan catabolism > mitotic spindle elongation |
| | mitotic spindle assembly |
| | FUNCTION |
| | nucleic acid binding > DNA binding |
| | DNA binding > ribosomal DNA (rDNA) binding |
| | LOCATION |
| | cytoplasm > peroxisome |
| | HUMAN PROTEIN DOMAINS (INTERPRO SIGNATURES) |
| | IPR002634 (BolA) |
| hP07-029 | HUMAN PANTHER CLASSIFICATIONS |
| | No Panther Hit |
| | HUMAN GENE ONTOLOGY |
| | PROCESS |
| | ectoderm development > epidermal differentiation |
| | FUNCTION |
| | protein binding > collagen binding |
| | LOCATION |
| | fibrillar collagen > collagen type III |
| | HUMAN PROTEIN DOMAINS (INTERPRO SIGNATURES) |
| | No Domain Hit |
| hP07-030 | HUMAN PANTHER CLASSIFICATIONS |
| | No Panther Hit |
| | HUMAN GENE ONTOLOGY |
| | PROCESS |
| | ectoderm development > neurogenesis |
| | phagocytosis > phagocytosis, engulfment |
| | cell death > apoptosis |
| | actin modification > cytoskeletal anchoring |
| | FUNCTION |
| | nucleotide binding > ATP binding |
| | cysteine-type endopeptidase > caspase |
| | enzyme > nitric oxide synthase |
| | mannosidase > beta-mannosidase |
| | LOCATION |
| | cell > cytoplasm |
| | nuclear membrane > nuclear membrane lumen |
| | plasma membrane > peripheral plasma membrane protein |
| | cell > nucleus |
| | HUMAN PROTEIN DOMAINS (INTERPRO SIGNATURES) |
| | IPR000050 (PID) |
| | IPR000050 (PID) |
| | IPR000050 (PTB) |
| hP07-031 | HUMAN PANTHER CLASSIFICATIONS |
| | No Panther Hit |
| | HUMAN GENE ONTOLOGY |
| | No Gene Ontology |
| | HUMAN PROTEIN DOMAINS (INTERPRO SIGNATURES) |
| | IPR000357 (HEAT REPEAT) |
| hP07-032 | HUMAN PANTHER CLASSIFICATIONS |
| | FAMILY (SUBFAMILY) |
| | F-BOX PROTEIN-RELATED(F-BOX PROTEIN) |
| | MOLECULAR FUNCTIONS |
| | MISCELLANEOUS FUNCTION > OTHER MISCELLANEOUS FUNCTION |
| | PROTEIN |
| | BIOLOGICAL PROCESS |
| | PROTEIN METABOLISM AND MODIFICATION > PROTEOLYSIS |
| | HUMAN GENE ONTOLOGY |
| | PROCESS |
| | proteolysis and peptidolysis > ubiquitin-dependent protein degradation |
| | protein metabolism and modification |
| | macromolecule catabolism > proteolysis and peptidolysis |
| | cell cycle > cell cycle control |
| | cell growth and maintenance > cell proliferation |
| | FUNCTION |
| | enzyme > N-acetylglucosaminylphosphatidylinositol deacetylase |
| | small protein conjugating enzyme > ubiquitin conjugating enzyme |
| | enzyme > ubiquitin--protein ligase |
| | ligand binding or carrier > protein binding |
| | LOCATION |
| | cell > ubiquitin ligase complex |
| | ubiquitin ligase complex |
| | nucleus |
| | cell wall > nuclear ubiquitin ligase complex |
| | mitochondrial membrane > mitochondrial outer membrane |
| | cytoplasm > endoplasmic reticulum |
| | GO cellular component > extracellular |
| | HUMAN PROTEIN DOMAINS (INTERPRO SIGNATURES) |
| | IPR001810 (FBOX) |
| | IPR001810 (F-box) |
| hP07-033 | HUMAN PANTHER CLASSIFICATIONS |
| | No Panther Hit |
| | HUMAN GENE ONTOLOGY |
| | PROCESS |
| | GO biological process > cell communication |
| | FUNCTION |
| | GO molecular function > enzyme inhibitor |
| | LOCATION |
| | nuclear membrane > nuclear membrane lumen |
| | HUMAN PROTEIN DOMAINS (INTERPRO SIGNATURES) |
| | IPR000694 (PRO RICH 2) |
| hP07-034 | HUMAN PANTHER CLASSIFICATIONS |
| | FAMILY (SUBFAMILY) |
| | PHOSPHOLIPASE C-RELATED(PHOSPHOLIPASE C-RELATE) |
| | MOLECULAR FUNCTIONS |
| | HYDROLASE > LIPASE > PHOSPHOLIPASE |
| | BIOLOGICAL PROCESS |
| | SIGNAL TRANSDUCTION > CELL SURFACE RECEPTOR MEDIATED |
| | SIGNAL TRANSDUCTION > G-PROTEIN MEDIATED SIGNALING |
| | HUMAN GENE ONTOLOGY |
| | FUNCTION |
| | inositol/phosphatidylinositol phosphodiesterase > 1-phosphatidylinositol-4,5- |
| | biphosphate phosphodiesterase |
| | phospholipase A2 > phospholipase C |
| | ligand binding or carrier > calcium binding |
| | LOCATION |
| | cell > cytoplasm |
| | cell > nucleus |
| | mitochondrial membrane > mitochondrial outer membrane |
| | GO cellular component > cellular_component unknown |
| | HUMAN PROTEIN DOMAINS (INTERPRO SIGNATURES) |
| | IPR000909 (PIPLC X DOMAIN) |
| | IPR000909 (PI-PLC-X) |
| | IPR001192 (PHPHLIPASEC) |
| | IPR000909 (PLCXc) |
| hP07-035 | HUMAN PANTHER CLASSIFICATIONS |
| | FAMILY (SUBFAMILY) |
| | CARBOXYPEPTIDASE-RELATED(CARBOXYPEPTIDASE M) |
| | MOLECULAR FUNCTIONS |
| | PROTEASE > METALLOPROTEASE |
| | BIOLOGICAL PROCESS |
| | BIOLOGICAL PROCESS UNCLASSIFIED |
| | HUMAN GENE ONTOLOGY |
| | PROCESS |
| | protein metabolism and modification |
| | macromolecule catabolism > proteolysis and peptidolysis |
| | G protein linked receptor protein signaling pathway > neuropeptide signaling |
| | pathway |
| | mesoderm development > skeletal development |
| | neurogenesis > central nervous system development |
| | transcription, DNA-dependent > transcription regulation |
| | FUNCTION |
| | exopeptidase > carboxypeptidase |
| | metallocarboxypeptidase > carboxypeptidase A |
| | metallocarboxypeptidase > carboxypeptidase H |
| | serine carboxypeptidase > carboxypeptidase D |
| | metallocarboxypeptidase > lysine (arginine) carboxypeptidase |
| | LOCATION |
| | plasma membrane > peripheral plasma membrane protein |
| | cell > membrane fraction |
| | cell > cytoplasm |
| | extracellular > extracellular space |
| | GO cellular component > extracellular |
| | HUMAN PROTEIN DOMAINS (INTERPRO SIGNATURES) |
| | IPR000834 (Zn carbOpept) |
| | IPR000834 (CRBOXYPTASEA) |
| | IPR000834 (CARBOXYPEPT ZN 1) |
| | IPR000834 (CARBOXYPEPT ZN 2) |
| hP07-036 | HUMAN PANTHER CLASSIFICATIONS |
| | FAMILY (SUBFAMILY) |
| | ADENYLYL CYCLASE-ASSOCIATED PROTEIN (ADENYLYL CYCLASE- |
| | ASSOCIATED PROTEIN) |
| | MOLECULAR FUNCTIONS |
| | MISCELLANEOUS FUNCTION > OTHER MISCELLANEOUS FUNCTION |
| | PROTEIN |
| | BIOLOGICAL PROCESS |
| | BIOLOGICAL PROCESS UNCLASSIFIED |
| | HUMAN GENE ONTOLOGY |
| | PROCESS |
| | cytoskeleton organization and biogenesis > establishment of cell polarity |
| | G protein signaling, adenylate cyclase activating pathway > adenylate cyclase |
| | activation |
| | cell communication > signal transduction |
| | organelle organization and biogenesis > cytoskeleton organization and biogenesis |
| | small GTPase mediated signal transduction > RAS protein signal transduction |
| | FUNCTION |
| | protein binding > adenylate cyclase binding |
| | protein binding > actin binding |
| | protein binding > cytoskeletal protein binding protein |
| | LOCATION |
| | nuclear membrane > nuclear membrane lumen |
| | cortex > actin cortical patch (sensu Saccharomyces) |
| | cell wall |
| | actin cytoskeleton |
| | HUMAN PROTEIN DOMAINS (INTERPRO SIGNATURES) |
| | IPR001837 (CAP 1) |
| hP07-036.1 | HUMAN PANTHER CLASSIFICATIONS |
| | FAMILY (SUBFAMILY) |
| | ADENYLYL CYCLASE-ASSOCIATED PROTEIN(ADENYLYL CYCLASE- |
| | ASSOCIATED PROTEIN) |
| | MOLECULAR FUNCTIONS |
| | MISCELLANEOUS FUNCTION > OTHER MISCELLANEOUS FUNCTION |
| | PROTEIN |
| | BIOLOGICAL PROCESS |
| | BIOLOGICAL PROCESS UNCLASSIFIED |
| | HUMAN GENE ONTOLOGY |
| | PROCESS |
| | cytoskeleton organization and biogenesis > establishment of cell polarity |
| | G protein signaling, adenylate cyclase activating pathway > adenylate cyclase |
| | activation |
| | cell communication > signal transduction |
| | organelle organization and biogenesis > cytoskeleton organization and biogenesis |
| | small GTPase mediated signal transduction > RAS protein signal transduction |
| | FUNCTION |
| | protein binding > adenylate cyclase binding |
| | protein binding > actin binding |
| | protein binding > cytoskeletal protein binding protein |
| | LOCATION |
| | nuclear membrane > nuclear membrane lumen |
| | cortex > actin cortical patch (sensu Saccharomyces) |
| | cell wall |
| | actin cytoskeleton |
| | HUMAN PROTEIN DOMAINS (INTERPRO SIGNATURES) |
| | IPR000694 (PRO RICH) |
| | IPR001837 (CAP) |
| | IPR001837 (CAP 1) |
| | IPR001837 (CAP 2) |
| hP07-037 | HUMAN PANTHER CLASSIFICATIONS |
| | FAMILY (SUBFAMILY) |
| | UBIQUITIN-CONJUGATING ENZYME-RELATED(UBIQUITIN- |
| | CONJUGATING ENZYME E2-17 KD 1-RELATED) |
| | MOLECULAR FUNCTIONS |
| | LIGASE > ALL NON-DNA LIGASES |
| | BIOLOGICAL PROCESS |
| | PROTEIN METABOLISM AND MODIFICATION > PROTEOLYSIS |
| | HUMAN GENE ONTOLOGY |
| | PROCESS |
| | ubiquitin-dependent protein degradation > ubiquitin cycle |
| | protein metabolism and modification > protein modification |
| | ubiquitin cycle > polyubiquitylation |
| | proteolysis and peptidolysis > ubiquitin-dependent protein degradation |
| | ubiquitin cycle > monoubiquitylation |
| | FUNCTION |
| | small protein conjugating enzyme > ubiquitin conjugating enzyme |
| | enzyme > ubiquitin--protein ligase |
| | small protein conjugating enzyme > ubiquitin-like conjugating enzyme |
| | Go molecular function > enzyme |
| | ubiquitin conjugating enzyme > cyclin selective ubiquitin conjugating enzyme |
| | LOCATION |
| | meiotic chromosome > synaptonemal complex |
| | ubiquitin ligase complex |
| | nucleus |
| | cell wall > nuclear ubiquitin ligase complex |
| | GO cellular component > cellular_component unknown |
| | cell > nucleus |
| | cell > nucleus |
| | HUMAN PROTEIN DOMAINS (INTERPRO SIGNATURES) |
| | IPR000608 (UBIQUITIN CONJUGAT 2) |
| | IPR000608 (UQ con) |
| hP07-038 | HUMAN PANTHER CLASSIFICATIONS |
| | FAMILY (SUBFAMILY) |
| | VACUOLAR SORTING RECEPTOR-RELATED |
| | HUMAN GENE ONTOLOGY |
| | PROCESS |
| | neurogenesis > central nervous system development |
| | transcription, DNA-dependent > transcription regulation |
| | protein modification > protein phosphorylation |
| | microtubule-based process |
| | nuclear congression |
| | peptidoglycan catabolism > microtubule-based movement |
| | cell death > apoptosis |
| | FUNCTION |
| | enzyme > nitric oxide synthase |
| | GO molecular function > cell cycle regulator |
| | nucleotide binding > ATP binding |
| | enzyme > protein kinase |
| | DNA binding > transcription factor |
| | LOCATION |
| | GO cellular component > extracellular |
| | mitochondrial membrane > mitochondrial inner membrane |
| | extracellular > extracellular space |
| | cell > nucleus |
| | plasma membrane > integral plasma membrane protein |
| | HUMAN PROTEIN DOMAINS (INTERPRO SIGNATURES) |
| | IPR000694 (PRO RICH) |
| | IPR001472 (NLS BP) |
| hP07-039 | HUMAN PANTHER CLASSIFICATIONS |
| | No Panther Hit |
| | HUMAN GENE ONTOLOGY |
| | PROCESS |
| | protein metabolism and modification |
| | macromolecule biosynthesis > protein biosynthesis |
| | cytoplasm organization and biogenesis > ribosome biogenesis |
| | FUNCTION |
| | glycosaminoglycan binding > heparin binding |
| | nucleic acid binding > RNA binding |
| | LOCATION |
| | GO cellular component > intracellular |
| | cytoplasm > ribosome |
| | large ribosomal subunit |
| | cytosolic ribosome |
| | cell wall > cytosolic ribosome |
| | ribosome |
| | cytosol |
| | HUMAN PROTEIN DOMAINS (INTERPRO SIGNATURES) |
| | IPR002673 (sp P25886 RL29 RAT) |
| | IPR002673 (Ribosomal L29e) |
| hP07-039.1 | HUMAN PANTHER CLASSIFICATIONS |
| | No Panther Hit |
| | HUMAN GENE ONTOLOGY |
| | PROCESS |
| | protein metabolism and modification |
| | macromolecule biosynthesis > protein biosynthesis |
| | cytoplasm organization and biogenesis > ribosome biogenesis |
| | FUNCTION |
| | glycosaminoglycan binding > heparin binding |
| | nucleic acid binding > RNA binding |
| | LOCATION |
| | GO cellular component > intracellular |
| | cytoplasm > ribosome |
| | large ribosomal subunit |
| | cytosolic ribosome |
| | cell wall > cytosolic ribosome |
| | ribosome |
| | cytosol |
| | HUMAN PROTEIN DOMAINS (INTERPRO SIGNATURES) |
| | No Domain Hit |
| hP07-039.2 | HUMAN PANTHER CLASSIFICATIONS |
| | No Panther Hit |
| | HUMAN GENE ONTOLOGY |
| | PROCESS |
| | protein metabolism and modification |
| | macromolecule biosynthesis > protein biosynthesis |
| | cytoplasm organization and biogenesis > ribosome biogenesis |
| | FUNCTION |
| | glycosaminoglycan binding > heparin binding |
| | nucleic acid binding > RNA binding |
| | HUMAN PROTEIN DOMAINS (INTERPRO SIGNATURES) |
| | IPR002673 (sp P25886 RL29 RAT) |
| | NULL (LYS RICH) |
| | IPR001472 (NLS BP) |
| | IPR002673 (Ribosomal L29e) |
| hP07-040 | HUMAN PANTHER CLASSIFICATIONS |
| | FAMILY (SUBFAMILY) |
| | PROTEIN-TYROSINE PHOSPHATASE(PROTEIN-TYROSINE |
| | PHOSPHATASE SH-PTP2) |
| | HUMAN GENE ONTOLOGY |
| | PROCESS |
| | protein modification > protein dephosphorylation |
| | cell surface receptor linked signal transduction > G protein linked receptor protein |
| | signaling pathway |
| | enzyme linked receptor protein signaling pathway > transmembrane receptor |
| | protein tyrosine phosphatase signaling pathway |
| | cell communication > signal transduction |
| | FUNCTION |
| | protein tyrosine phosphatase > prenylated protein tyrosine phosphatase |
| | protein phosphatase > protein tyrosine phosphatase |
| | enzyme > protein phosphatase |
| | protein tyrosine phosphatase > non-membrane spanning protein tyrosine phosphatase |
| | protein kinase > protein tyrosine kinase |
| | LOCATION |
| | cell > cytoplasm |
| | plasma membrane > integral plasma membrane protein |
| | cell > membrane fraction |
| | cell > plasma membrane |
| | cytoplasm > cytoskeleton |
| | HUMAN PROTEIN DOMAINS (INTERPRO SIGNATURES) |
| | IPR000387 (TYR PHOSPHATASE 2) |
| | IPR003595 (PTPc motif) |
| | IPR000387 (TYR PHOSPHATASE 1) |
| | IPR001687 (ATP GTP A) |
| | IPR000980 (SH2 2) |
| | IPR000242 (TYR PHOSPHATASE PTP) |
| | IPR000980 (SH2) |
| | IPR000242 (Y phosphatase) |
| | IPR000980 (SH2DOMAIN) |
| | IPR000242 (PRTYPHPHTASE) |
| | IPR000242 (PTPc) |
| | IPR000980 (SH2) |
| hP07-041 | HUMAN PANTHER CLASSIFICATIONS |
| | FAMILY (SUBFAMILY) |
| | C2H2 ZINC FINGER-RELATED(KRUEPPEL TYPE ZINC FINGER PROTEIN) |
| | MOLECULAR FUNCTIONS |
| | TRANSCRIPTION FACTOR > ZINC FINGER TRANSCRIPTION FACTOR > KRAB |
| | BOX TRANSCRIPTION FACTOR |
| | BIOLOGICAL PROCESS |
| | NUCLEOSIDE, NUCLEOTIDE AND NUCLEIC ACID METABOLISM > MRNA |
| | TRANSCRIPTION > MRNA TRANSCRIPTION REGULATION |
| | HUMAN GENE ONTOLOGY |
| | PROCESS |
| | transcription, DNA-dependent > transcription regulation |
| | GO biological process > developmental processes |
| | transcription regulation from Pol II promoter > repression of transcription from Pol |
| | II promoter |
| | cell growth and maintenance > stress response |
| | gametogenesis > spermatogenesis |
| | FUNCTION |
| | DNA binding > transcription factor |
| | nucleic acid binding > DNA binding |
| | RNA polymerase II transcription factor > specific RNA polymerase II transcription |
| | factor |
| | GO molecular function > nucleic acid binding |
| | ligand binding or carrier > protein binding |
| | LOCATION |
| | cell > nucleus |
| | nuclear membrane > nuclear membrane lumen |
| | cell > cytoplasm |
| | nucleoplasm > transcription factor complex |
| | HUMAN PROTEIN DOMAINS (INTERPRO SIGNATURES) |
| | IPR000822 (ZINC FINGER C2H2 2 3) |
| | IPR000822 (zf-C2H2) |
| | IPR000822 (ZnF C2H2) |
| | IPR000822 (ZINC FINGER C2H2 1) |
| bP07-042 | HUMAN PANTHER CLASSIFICATIONS |
| | FAMILY (SUBFAMILY) |
| | BETA2-MICROGLOBULIN, MHC CLASS II BETA CHAIN (BETA-2- |
| | MICROGLOBULIN) |
| | MOLECULAR FUNCTIONS |
| | DEFENSE/IMMUNITY PROTEIN > MAJOR HISTOCOMPATIBILITY |
| | COMPLEX ANTIGEN |
| | BIOLOGICAL PROCESS |
| | IMMUNITY AND DEFENSE > T-CELL MEDIATED IMMUNITY > MHCI- |
| | MEDIATED IMMUNITY |
| | HUMAN GENE ONTOLOGY |
| | PROCESS |
| | defence response > cellular defense response |
| | iron homeostasis > intracellular iron storage |
| | FUNCTION |
| | B cell receptor |
| | defense/immunity protein > immunoglobulin |
| | defense/immunity protein > immunoglobulin |
| | major histocompatibility complex antigen > class I major histocompatibility |
| | complex antigen |
| | molecular_function unknown > lymphocyte antigen |
| | LOCATION |
| | plasma membrane > integral plasma membrane protein |
| | cytosol > hemoglobin |
| | cell > plasma membrane |
| | HUMAN PROTEIN DOMAINS (INTERPRO SIGNATURES) |
| | No Domain Hit |
| hP07-042.1 | HUMAN PANTHER CLASSIFICATIONS |
| | FAMILY (SUBFAMILY) |
| | BETA2-MICROGLOBULIN, MHC CLASS II BETA CHAIN(BETA-2- |
| | MICROGLOBULIN) |
| | MOLECULAR FUNCTIONS |
| | DEFENSE/IMMUNITY PROTEIN > MAJOR HISTOCOMPATIBILITY |
| | COMPLEX ANTIGEN |
| | BIOLOGICAL PROCESS |
| | IMMUNITY AND DEFENSE > T-CELL MEDIATED IMMUNITY > MHCI- |
| | MEDIATED IMMUNITY |
| | HUMAN GENE ONTOLOGY |
| | PROCESS |
| | defence response > cellular defense response |
| | defence response > immune response |
| | stress response > defence response |
| | cell communication > signal transduction |
| | iron homeostasis > intracellular iron storage |
| | FUNCTION |
| | B cell receptor |
| | defense/immunity protein > immunoglobulin |
| | defense/immunity protein > immunoglobulin |
| | major histocompatibility complex antigen > class II major histocompatibility |
| | complex antigen |
| | major histocompatibility complex antigen > class II major histocompatibility |
| | complex antigen |
| | major histocompatibility complex antigen > class II major histocompatibility |
| | complex antigen |
| | LOCATION |
| | plasma membrane > integral plasma membrane protein |
| | cell > membrane fraction |
| | cytosol > hemoglobin |
| | GO cellular component > extracellular |
| | cell > plasma membrane |
| | HUMAN PROTEIN DOMAINS (INTERPRO SIGNATURES) |
| | IPR003006 (ig) |
| | IPR003597 (IGc1) |
| | IPR003006 (IG MHC) |
| hP07-042.2 | HUMAN PANTHER CLASSIFICATIONS |
| | No Panther Hit |
| | HUMAN GENE ONTOLOGY |
| | PROCESS |
| | defence response > cellular defense response |
| | defence response > immune response |
| | stress response > defence response |
| | cell communication > signal transduction |
| | iron homeostasis > intracellular iron storage |
| | FUNCTION |
| | B cell receptor |
| | defense/immunity protein > immunoglobulin |
| | defense/immunity protein > immunoglobulin |
| | major histocompatibility complex antigen > class II major histocompatibility |
| | complex antigen |
| | major histocompatibility complex antigen > class II major histocompatibility |
| | complex antigen |
| | major histocompatibility complex antigen > class II major histocompatibility |
| | complex antigen |
| | LOCATION |
| | plasma membrane > integral plasma membrane protein |
| | cell > membrane fraction |
| | cytosol > hemoglobin |
| | GO cellular component > extracellular |
| | cell > plasma membrane |
| | HUMAN PROTEIN DOMAINS (INTERPRO SIGNATURES) |
| | IPR003006 (ig) |
| | IPR003597 (IGc1) |
| | IPR003006 (IG MHC) |
| hP07-043 | HUMAN PANTHER CLASSIFICATIONS |
| | FAMILY (SUBFAMILY) |
| | POLYPYRIMIDINE TRACT-BINDING PROTEIN(POLYPYRIMIDINE |
| | TRACT-BINDING PROTEIN) |
| | MOLECULAR FUNCTIONS |
| | NUCLEIC ACID BINDING > MRNA PROCESSING FACTOR > MRNA |
| | SPLICING FACTOR |
| | BIOLOGICAL PROCESS |
| | NUCLEOSIDE, NUCLEOTIDE AND NUCLEIC ACID METABOLISM > PRE- |
| | MRNA PROCESSING > MRNA SPLICING |
| | HUMAN GENE ONTOLOGY |
| | PROCESS |
| | mRNA splicing > mRNA splice site selection |
| | transcription from Pol II promoter |
| | peptidoglycan catabolism > mRNA splicing |
| | developmental processes > embryogenesis and morphogenesis |
| | transcription, DNA-dependent > RNA processing |
| | cell growth and maintenance > cell shape and cell size control |
| | FUNCTION |
| | nucleic acid binding > poly-pyrimidine tract binding |
| | nucleic acid binding > RNA binding |
| | GO molecular function > nucleic acid binding |
| | ribonucleoprotein > heterogeneous nuclear ribonucleoprotein |
| | mRNA binding > pre-mRNA splicing factor |
| | LOCATION |
| | nucleus > nucleoplasm |
| | nucleus > spliceosome |
| | cell > nucleus |
| | nuclear membrane > nuclear inner membrane |
| | Golgi apparatus > Golgi lumen |
| | HUMAN PROTEIN DOMAINS (INTERPRO SIGNATURES) |
| | IPR000504 (RRM 4) |
| | IPR000504 (rrm) |
| | IPR000504 (RRM) |
| hP07-044 | HUMAN PANTHER CLASSIFICATIONS |
| | No Panther Hit |
| | HUMAN GENE ONTOLOGY |
| | FUNCTION |
| | enzyme > phosphoribosylamine- glycine ligase |
| | LOCATION |
| | plasma membrane > integral plasma membrane protein |
| | HUMAN PROTEIN DOMAINS (INTERPRO SIGNATURES) |
| | IPR000282 (CR2A) |
| hP07-045 | HUMAN PANTHER CLASSIFICATIONS |
| | FAMILY (SUBFAMILY) |
| | LIM DOMAIN PROTEIN-RELATED(gb def: hypothetical protein |
| | dkfzp434g171.1 - human) |
| | MOLECULAR FUNCTIONS |
| | MOLECULAR FUNCTION UNCLASSIFIED |
| | BIOLOGICAL PROCESS |
| | BIOLOGICAL PROCESS UNCLASSIFIED |
| | HUMAN GENE ONTOLOGY |
| | PROCESS |
| | transcription, DNA-dependent > transcription regulation |
| | cell communication > cell adhesion |
| | neurogenesis > central nervous system development |
| | transcription > transcription, DNA-dependent |
| | cell communication > signal transduction |
| | FUNCTION |
| | DNA binding > transcription factor |
| | GO molecular function > cell adhesion |
| | enzyme > nitric oxide synthase |
| | nucleic acid binding > DNA binding |
| | nucleotide binding > ATP binding |
| | LOCATION |
| | cell > nucleus |
| | cell-substrate adherens junction > focal adhesion |
| | nucleoplasm > transcription factor complex |
| | cell > cytoplasm |
| | GO cellular component > extracellular |
| | HUMAN PROTEIN DOMAINS (INTERPRO SIGNATURES) |
| | IPR001781 (sp Q17099 Q17099 ACAVI) |
| | IPR001781 (LIM DOMAIN 2 3) |
| | IPR001781 (LIM) |
| | IPR001781 (LIM) |
| | IPR001781 (LIM DOMAIN 1) |
| | IPR000345 (CYTOCHROME C) |
| hP07-046 | HUMAN PANTHER CLASSIFICATIONS |
| | FAMILY (SUBFAMILY) |
| | RETINOBLASTOMA BINDING PROTEIN-RELATED |
| | HUMAN GENE ONTOLOGY |
| | PROCESS |
| | transcription, DNA-dependent > transcription regulation |
| | defence response > immune response |
| | transcription regulation > transcription regulation from Pol II promoter |
| | nuclear organization and biogenesis > chromosome organization and biogenesis |
| | induction of apoptosis > induction of apoptosis by extracellular signals |
| | FUNCTION |
| | nucleic acid binding > DNA binding |
| | DNA binding > transcription factor |
| | transcription factor > transcription activating factor |
| | GO molecular function > nucleic acid binding |
| | heavy metal binding > zinc binding |
| | LOCATION |
| | cell > nucleus |
| | nuclear membrane > nuclear membrane lumen |
| | chromosome > chromatin |
| | cell > cytoplasm |
| | nucleus > nuclear membrane |
| | HUMAN PROTEIN DOMAINS (INTERPRO SIGNATURES) |
| | IPR000694 (PRO RICH) |
| | NULL (GLN RICH) |
| | IPR001965 (PHD) |
| | IPR001965 (PHD) |
| | IPR001965 (PHD) |
| hP07-047 | HUMAN PANTHER CLASSIFICATIONS |
| | FAMILY (SUBFAMILY) |
| | KELCH-RELATED |
| | HUMAN GENE ONTOLOGY |
| | PROCESS |
| | protein targeting > protein-vacuolar targeting |
| | actin modification > cytoskeletal anchoring |
| | transcription, DNA-dependent > transcription regulation |
| | defence response > humoral defense mechanism |
| | intracellular protein traffic > non-selective vesicle transport |
| | FUNCTION |
| | GO molecular function > molecular_function unknown |
| | enzyme > NAD(+) ADP-ribosyltransferase |
| | DNA binding > transcription factor |
| | nucleic acid binding > DNA binding |
| | phosphorylase kinase > phosphorylase kinase regulator |
| | LOCATION |
| | mitochondrion > mitochondrial matrix |
| | cytoskeleton > actin cytoskeleton |
| | cytoplasm > cytoskeleton |
| | cell > nucleus |
| | cell > cytoplasm |
| | HUMAN PROTEIN DOMAINS (INTERPRO SIGNATURES) |
| | IPR002110 (ANK REPEAT 3) |
| | IPR000210 (BTB) |
| | IPR002110 (ANK REP REGION) |
| | IPR000210 (BTB) |
| | IPR002110 (ank) |
| | IPR002110 (ANKYRIN) |
| | IPR002110 (ANK) |
| | IPR000210 (BTB) |
| | IPR002048 (EF HAND) |
| hP07-048 | HUMAN PANTHER CLASSIFICATIONS |
| | No Panther Hit |
| | HUMAN GENE ONTOLOGY |
| | PROCESS |
| | peptidoglycan catabolism > cholesterol biosynthesis |
| | cholesterol metabolism |
| | transcription, DNA-dependent > transcription regulation |
| | gametogenesis > spermatogenesis |
| | chromatin silencing > chromatin silencing at ribosomal DNA (rDNA) |
| | transcription > transcription, DNA-dependent |
| | FUNCTION |
| | DNA binding > transcription factor |
| | nucleic acid binding > DNA binding |
| | GO molecular function > nucleic acid binding |
| | DNA binding > transcription factor |
| | helicase |
| | LOCATION |
| | cell > nucleus |
| | GO cellular component > intracellular |
| | GO cellular component > extracellular |
| | HUMAN PROTEIN DOMAINS (INTERPRO SIGNATURES) |
| | IPR001878 (ZF CCHC 2) |
| | IPR001472 (NLS BP) |
| | IPR001878 (zf-CCHC) |
| | IPR001878 (ZnF C2HC) |
| hP07-049 | HUMAN PANTHER CLASSIFICATIONS |
| | FAMILY (SUBFAMILY) |
| | COILED-COIL PROTEIN |
| | HUMAN GENE ONTOLOGY |
| | PROCESS |
| | protein transport > peptide transport |
| | cell growth and maintenance > intracellular protein traffic |
| | FUNCTION |
| | RNA polymerase II transcription factor > enhancer binding |
| | motor > kinetochore motor |
| | ligand binding or carrier > protein binding |
| | LOCATION |
| | Golgi apparatus > Golgi lumen |
| | Golgi apparatus > Golgi cis-face |
| | secretory vesicle > endocytotic transport vesicle |
| | cytoplasm > cytosol |
| | nuclear membrane > nuclear membrane lumen |
| | HUMAN PROTEIN DOMAINS (INTERPRO SIGNATURES) |
| | NULL (GLU RICH) |
| | NULL (GLN RICH) |
| hP07-050 | HUMAN PANTHER CLASSIFICATIONS |
| | FAMILY (SUBFAMILY) |
| | LATROPHILIN-RELATED (G PROTEIN-COUPLED RECEPTOR 56) |
| | MOLECULAR FUNCTIONS |
| | RECEPTOR > G-PROTEIN COUPLED RECEPTOR |
| | BIOLOGICAL PROCESS |
| | SIGNAL TRANSDUCTION > CELL SURFACE RECEPTOR MEDIATED |
| | SIGNAL TRANSDUCTION > G-PROTEIN MEDIATED SIGNALING |
| | HUMAN GENE ONTOLOGY |
| | PROCESS |
| | cell surface receptor linked signal transduction > G protein linked receptor protein |
| | signaling pathway |
| | cell communication > cell adhesion |
| | cell communication > cell-cell signaling |
| | G protein linked receptor protein signaling pathway > neuropeptide signaling |
| | pathway |
| | neurogenesis > peripheral nervous system development |
| | FUNCTION |
| | ligand binding or carrier > calcium binding |
| | ligand binding or carrier > protein binding |
| | molecular_function unknown > lymphocyte antigen |
| | calcium binding > calcium sensing |
| | LOCATION |
| | plasma membrane > integral plasma membrane protein |
| | cell > membrane fraction |
| | cell > plasma membrane |
| | plasma membrane > intercellular junction |
| | HUMAN PROTEIN DOMAINS (INTERPRO SIGNATURES) |
| | IPR000203 (RECEPTOR PKD) |
| | IPR000832 (G PROTEIN RECEP F2 4) |
| | IPR000832 (7tm 2) |
| | IPR000203 (GPS) |
| | IPR000832 (GPCRSECRETIN) |
| | IPR003910 (GPR56ORPHANR) |
| | IPR000203 (GPS) |
| | IPR000873 (AMP BINDING) |
| hP07-050.1 | HUMAN PANTHER CLASSIFICATIONS |
| | FAMILY (SUBFAMILY) |
| | LATROPHILIN-RELATED (G PROTEIN-COUPLED RECEPTOR 56) |
| | MOLECULAR FUNCTIONS |
| | RECEPTOR > G-PROTEIN COUPLED RECEPTOR |
| | BIOLOGICAL PROCESS |
| | SIGNAL TRANSDUCTION > CELL SURFACE RECEPTOR MEDIATED |
| | SIGNAL TRANSDUCTION > G-PROTEIN MEDIATED SIGNALING |
| | HUMAN GENE ONTOLOGY |
| | PROCESS |
| | cell surface receptor linked signal transduction > G protein linked receptor protein |
| | signaling pathway |
| | cell communication > cell adhesion |
| | cell communication > cell-cell signaling |
| | G protein linked receptor protein signaling pathway > neuropeptide signaling |
| | pathway |
| | neurogenesis > peripheral nervous system development |
| | FUNCTION |
| | ligand binding or carrier > calcium binding |
| | ligand binding or carrier > protein binding |
| | molecular_function unknown > lymphocyte antigen |
| | calcium binding > calcium sensing |
| | LOCATION |
| | plasma membrane > integral plasma membrane protein |
| | cell > membrane fraction |
| | cell > plasma membrane |
| | plasma membrane > intercellular junction |
| | HUMAN PROTEIN DOMAINS (INTERPRO SIGNATURES) |
| | IPR000203 (RECEPTOR PKD) |
| | IPR000832 (G PROTEIN RECEP F2 4) |
| | IPR000832 (7tm 2) |
| | IPR000203 (GPS) |
| | IPR000832 (GPCRSECRETIN) |
| | IPR003910 (GPR56ORPHANR) |
| | IPR000203 (GPS) |
| | IPR000873 (AMP BINDING) |
| hP07-050.2 | HUMAN PANTHER CLASSIFICATIONS |
| | FAMILY (SUBFAMILY) |
| | LATROPHILIN-RELATED (G PROTEIN-COUPLED RECEPTOR 56) |
| | MOLECULAR FUNCTIONS |
| | RECEPTOR > G-PROTEIN COUPLED RECEPTOR |
| | BIOLOGICAL PROCESS |
| | SIGNAL TRANSDUCTION > CELL SURFACE RECEPTOR MEDIATED |
| | SIGNAL TRANSDUCTION > G-PROTEIN MEDIATED SIGNALING |
| | HUMAN GENE ONTOLOGY |
| | PROCESS |
| | cell surface receptor linked signal transduction > G protein linked receptor protein |
| | signaling pathway |
| | cell communication > cell adhesion |
| | cell communication > cell-cell signaling |
| | neurogenesis > central nervous system development |
| | G protein linked receptor protein signaling pathway > neuropeptide signaling |
| | pathway |
| | FUNCTION |
| | ligand binding or carrier > calcium binding |
| | enzyme > nitric oxide synthase |
| | ligand binding or carrier > protein binding |
| | molecular_function unknown > lymphocyte antigen |
| | enzyme > protein kinase |
| | LOCATION |
| | plasma membrane > integral plasma membrane protein |
| | cell > membrane fraction |
| | cell > plasma membrane |
| | microtubule organizing center > centrosome |
| | GO cellular component > extracellular |
| | HUMAN PROTEIN DOMAINS (INTERPRO SIGNATURES) |
| | IPR000203 (RECEPTOR PKD) |
| | IPR000832 (G PROTEIN RECEP F2 4) |
| | IPR000832 (7tm 2) |
| | IPR000203 (GPS) |
| | IPR000832 (GPCRSECRETIN) |
| | IPR003910 (GPR56ORPHANR) |
| | IPR000203 (GPS) |
| | IPR000873 (AMP BINDING) |
| hP07-050.3 | HUMAN PANTHER CLASSIFICATIONS |
| | FAMILY (SUBFAMILY) |
| | LATROPHILIN-RELATED(G PROTEIN-COUPLED RECEPTOR 56) |
| | MOLECULAR FUNCTIONS |
| | RECEPTOR > G-PROTEIN COUPLED RECEPTOR |
| | BIOLOGICAL PROCESS |
| | SIGNAL TRANSDUCTION > CELL SURFACE RECEPTOR MEDIATED |
| | SIGNAL TRANSDUCTION > G-PROTEIN MEDIATED SIGNALING |
| | HUMAN GENE ONTOLOGY |
| | PROCESS |
| | cell surface receptor linked signal transduction > G protein linked receptor protein |
| | signaling pathway |
| | cell communication > cell adhesion |
| | cell communication > cell-cell signaling |
| | neurogenesis > central nervous system development |
| | G protein linked receptor protein signaling pathway > neuropeptide signaling |
| | pathway |
| | FUNCTION |
| | ligand binding or carrier > calcium binding |
| | enzyme > nitric oxide synthase |
| | ligand binding or carrier > protein binding |
| | molecular_function unknown > lymphocyte antigen |
| | enzyme > protein kinase |
| | LOCATION |
| | plasma membrane > integral plasma membrane protein |
| | cell > membrane fraction |
| | cell > plasma membrane |
| | GO cellular component > extracellular |
| | microtubule organizing center > centrosome |
| | HUMAN PROTEIN DOMAINS (INTERPRO SIGNATURES) |
| | IPR000203 (RECEPTOR PKD) |
| | IPR000832 (G PROTEIN RECEP F2 4) |
| | IPR000832 (7tm 2) |
| | IPR000203 (GPS) |
| | IPR000832 (GPCRSECRETIN) |
| | IPR003910 (GPR56ORPHANR) |
| | IPR000203 (GPS) |
| | IPR000873 (AMP BINDING) |
| hP07-051 | HUMAN PANTHER CLASSIFICATIONS |
| | FAMILY (SUBFAMILY) |
| | INTEGRIN ALPHA(INTEGRIN ALPHA-4) |
| | MOLECULAR FUNCTIONS |
| | CELL ADHESION MOLECULE > OTHER CELL ADHESION MOLECULE |
| | BIOLOGICAL PROCESS |
| | CELL ADHESION |
| | HUMAN GENE ONTOLOGY |
| | FUNCTION |
| | cell adhesion > calcium-dependent cell adhesion |
| | transmembrane receptor > cell adhesion receptor |
| | protein binding > collagen binding |
| | cell adhesion > calcium-dependent cell adhesion |
| | molecular_function unknown > lymphocyte antigen |
| | GO molecular function > cell adhesion |
| | LOCATION |
| | integral plasma membrane protein > integrin |
| | cytoplasm > cytoskeleton |
| | cell > membrane fraction |
| | plasma membrane > integral plasma membrane protein |
| | cell > plasma membrane |
| | HUMAN PROTEIN DOMAINS (INTERPRO SIGNATURES) |
| | IPR000413 (INTEGRIN ALPHA 2 3) |
| | IPR000413 (integrin A) |
| | IPR000413 (FG-GAP) |
| | IPR000413 (INTEGRINA) |
| | IPR000413 (Int alpha) |
| | IPR000413 (INTEGRIN ALPHA) |
| hP07-052 | HUMAN PANTHER CLASSIFICATIONS |
| | No Panther Hit |
| | HUMAN GENE ONTOLOGY |
| | PROCESS |
| | intracellular signaling cascade > small GTPase mediated signal transduction |
| | cell communication > signal transduction |
| | small GTPase mediated signal transduction > RAS protein signal transduction |
| | cell surface receptor linked signal transduction > G protein linked receptor protein |
| | signaling pathway |
| | FUNCTION |
| | ligand binding or carrier > lipid binding |
| | DNA replication factor > DNA clamp loader |
| | nucleic acid binding > DNA binding |
| | ligand binding or carrier > calcium binding |
| | GO molecular function > ligand binding or carrier |
| | LOCATION |
| | cell > membrane fraction |
| | nuclear membrane > nuclear membrane lumen |
| | cell > cytoplasm |
| | cell > plasma membrane |
| | GO cellular component > cellular_component unknown |
| | HUMAN PROTEIN DOMAINS (INTERPRO SIGNATURES) |
| | IPR000651 (LTE DOMAIN) |
| | IPR001895 (GRF CDC25) |
| | IPR001895 (RasGEF) |
| | IPR001895 (RasGEF) |
| | IPR000651 (RasGEFN) |
| hP07-053 | HUMAN PANTHER CLASSIFICATIONS |
| | FAMILY (SUBFAMILY) |
| | ENHANCER OF ZESTE-RELATED |
| | HUMAN GENE ONTOLOGY |
| | PROCESS |
| | transcription, DNA-dependent > transcription regulation |
| | DNA packaging > chromatin architecture |
| | developmental processes > embryogenesis and morphogenesis |
| | transcription, DNA-dependent > transcription from Pol II promoter |
| | DNA metabolism > DNA packaging |
| | FUNCTION |
| | DNA binding > transcription factor |
| | nucleic acid binding > DNA binding |
| | DNA binding > chromatin binding |
| | transcription factor > transcription activating factor |
| | heavy metal binding > zinc binding |
| | LOCATION |
| | cell > nucleus |
| | nuclear membrane > nuclear membrane lumen |
| | cell > nucleus |
| | chromatin > heterochromatin |
| | mitotic chromosome |
| | nuclear chromosome > nuclear mitotic chromosome |
| | HUMAN PROTEIN DOMAINS (INTERPRO SIGNATURES) |
| | NULL (ARG RICH) |
| | IPR000694 (PRO RICH 2) |
| | NULL (GLU RICH) |
| | IPR001214 (SET) |
| | IPR001472 (NLS BP 3) |
| | IPR001214 (SET) |
| | IPR002965 (PRICHEXTENSN) |
| | IPR001214 (SET) |
| | IPR003616 (PostSET) |
| hP07-054 | HUMAN PANTHER CLASSIFICATIONS |
| | FAMILY (SUBFAMILY) |
| | MTG8-FAMILY MEMBER (MTG8 FAMILY MEMBER) |
| | MOLECULAR FUNCTIONS |
| | MISCELLANEOUS FUNCTION > OTHER MISCELLANEOUS FUNCTION |
| | PROTEIN |
| | BIOLOGICAL PROCESS |
| | NUCLEOSIDE, NUCLEOTIDE AND NUCLEIC ACID METABOLISM > MRNA |
| | TRANSCRIPTION > MRNA TRANSCRIPTION REGULATION |
| | ONCOGENESIS > ONCOGENE |
| | HUMAN GENE ONTOLOGY |
| | PROCESS |
| | cell growth and maintenance > cell proliferation |
| | transcription, DNA-dependent > transcription regulation |
| | gametogenesis > germ cell development |
| | metabolism > energy pathways |
| | transcription, DNA-dependent > transcription from Pol II promoter |
| | FUNCTION |
| | DNA binding > transcription factor |
| | nucleic acid binding > DNA binding |
| | transcription factor > transcription activating factor |
| | transcription factor > RNA polymerase II transcription factor |
| | LOCATION |
| | cell > nucleus |
| | nucleoplasm > transcription factor complex |
| | nuclear membrane > nuclear membrane lumen |
| | HUMAN PROTEIN DOMAINS (INTERPRO SIGNATURES) |
| | IPR000694 (PRO RICH) |
| | IPR002893 (zf-MYND) |
| | IPR003894 (TAFH) |
| hP07-054.1 | HUMAN PANTHER CLASSIFICATIONS |
| | FAMILY (SUBFAMILY) |
| | MTG8-FAMILY MEMBER (MTG8 FAMILY MEMBER) |
| | MOLECULAR FUNCTIONS |
| | MISCELLANEOUS FUNCTION > OTHER MISCELLANEOUS FUNCTION |
| | PROTEIN |
| | BIOLOGICAL PROCESS |
| | NUCLEOSIDE, NUCLEOTIDE AND NUCLEIC ACID METABOLISM > MRNA |
| | TRANSCRIPTION > MRNA TRANSCRIPTION REGULATION |
| | ONCOGENESIS > ONCOGENE |
| | HUMAN GENE ONTOLOGY |
| | PROCESS |
| | cell growth and maintenance > cell proliferation |
| | transcription, DNA-dependent > transcription regulation |
| | gametogenesis > germ cell development |
| | metabolism > energy pathways |
| | transcription, DNA-dependent > transcription from Pol II promoter |
| | FUNCTION |
| | DNA binding > transcription factor |
| | nucleic acid binding > DNA binding |
| | transcription factor > transcription activating factor |
| | transcription factor > RNA polymerase II transcription factor |
| | LOCATION |
| | cell > nucleus |
| | nucleoplasm > transcription factor complex |
| | nuclear membrane > nuclear membrane lumen |
| | GO cellular component > extracellular |
| | HUMAN PROTEIN DOMAINS (INTERPRO SIGNATURES) |
| | IPR002893 (zf-MYND) |
| | IPR003894 (TAFH) |
| hP07-054.2 | HUMAN PANTHER CLASSIFICATIONS |
| | FAMILY (SUBFAMILY) |
| | MTG8-FAMILY MEMBER(MTG8 FAMILY MEMBER) |
| | MOLECULAR FUNCTIONS |
| | MISCELLANEOUS FUNCTION > OTHER MISCELLANEOUS FUNCTION |
| | PROTEIN |
| | BIOLOGICAL PROCESS |
| | NUCLEOSIDE, NUCLEOTIDE AND NUCLEIC ACID METABOLISM > MRNA |
| | TRANSCRIPTION > MRNA TRANSCRIPTION REGULATION |
| | ONCOGENESIS > ONCOGENE |
| | HUMAN GENE ONTOLOGY |
| | PROCESS |
| | cell growth and maintenance > cell proliferation |
| | transcription, DNA-dependent > transcription regulation |
| | gametogenesis > germ cell development |
| | metabolism > energy pathways |
| | transcription, DNA-dependent > transcription from Pol II promoter |
| | FUNCTION |
| | DNA binding > transcription factor |
| | nucleic acid binding > DNA binding |
| | transcription factor > transcription activating factor |
| | transcription factor > RNA polymerase II transcription factor |
| | LOCATION |
| | cell > nucleus |
| | nucleoplasm > transcription factor complex |
| | nuclear membrane > nuclear membrane lumen |
| | HUMAN PROTEIN DOMAINS (INTERPRO SIGNATURES) |
| | IPR000694 (PRO RICH) |
| | IPR002893 (zf-MYND) |
| | IPR003894 (TAFH) |
| hP07-055 | HUMAN PANTHER CLASSIFICATIONS |
| | FAMILY (SUBFAMILY) |
| | PROTEIN TYROSINE KINASE (TYROSINE PROTEIN KINASE FES (FPS) |
| | (PTK GROUP IV)) |
| | MOLECULAR FUNCTIONS |
| | KINASE > PROTEIN KINASE > NON-RECEPTOR TYROSINE PROTEIN |
| | KINASE |
| | BIOLOGICAL PROCESS |
| | PROTEIN METABOLISM AND MODIFICATION > PROTEIN |
| | MODIFICATION > PROTEIN PHOSPHORYLATION |
| | SIGNAL TRANSDUCTION > INTRACELLULAR SIGNALING CASCADE > JAK- |
| | STAT CASCADE |
| | ONCOGENESIS > ONCOGENE |
| | HUMAN GENE ONTOLOGY |
| | PROCESS |
| | cell communication > signal transduction |
| | protein kinase cascade > JNK cascade |
| | xenobiotic metabolism > drug resistance |
| | cell cycle > cell cycle control |
| | FUNCTION |
| | protein kinase > protein tyrosine kidnase |
| | enzyme > protein kinase |
| | nucleotide binding > ATP binding |
| | enzyme > dihydrolipoamide S-succinyltransferase |
| | GO molecular function > cell cycle regulator |
| | LOCATION |
| | nuclear membrane > nuclear membrane lumen |
| | cell > nucleus |
| | cell > cytoplasm |
| | cell > plasma membrane |
| | GO cellular component > intracellular |
| | HUMAN PROTEIN DOMAINS (INTERPRO SIGNATURES) |
| | IPR000980 (SH2) |
| | IPR001895 (GRF CDC25) |
| | IPR000980 (SH2) |
| | IPR000980 (SH2) |
| | IPR001895 (RasGEF) |
| hP07-055.1 | HUMAN PANTHER CLASSIFICATIONS |
| | FAMILY (SUBFAMILY) |
| | PROTEIN TYROSINE KINASE(TYROSINE PROTEIN KINASE FES (FPS) |
| | (PTK GROUP IV)) |
| | MOLECULAR FUNCTIONS |
| | KINASE > PROTEIN KINASE > NON-RECEPTOR TYROSINE PROTEIN |
| | KINASE |
| | BIOLOGICAL PROCESS |
| | PROTEIN METABOLISM AND MODIFICATION > PROTEIN |
| | MODIFICATION > PROTEIN PHOSPHORYLATION |
| | SIGNAL TRANSDUCTION > INTRACELLULAR SIGNALING CASCADE > JAK- |
| | STAT CASCADE |
| | ONCOGENESIS > ONCOGENE |
| | HUMAN GENE ONTOLOGY |
| | PROCESS |
| | cell communication > signal transduction |
| | protein kinase cascade > JNK cascade |
| | xenobiotic metabolism > drug resistance |
| | cell cycle > cell cycle control |
| | FUNCTION |
| | protein kinase > protein tyrosine kinase |
| | enzyme > protein kinase |
| | nucleotide binding > ATP binding |
| | enzyme > dihydrolipoamide S-succinyltransferase |
| | GO molecular function > cell cycle regulator |
| | LOCATION |
| | nuclear membrane > nuclear membrane lumen |
| | cell > nucleus |
| | cell > cytoplasm |
| | cell > plasma membrane |
| | GO cellular component > intracellular |
| | HUMAN PROTEIN DOMAINS (INTERPRO SIGNATURES) |
| | IPR000980 (SH2) |
| | IPR001895 (GRF CDC25) |
| | IPR000980 (SH2) |
| | IPR000980 (SH2DOMAIN) |
| | IPR000980 (SH2) |
| | IPR001895 (RasGEF) |
| hP07-056 | HUMAN PANTHER CLASSIFICATIONS |
| | FAMILY (SUBFAMILY) |
| | BETA-1,6-N-ACETYLGLUCOSAMINYLTRANSFERASE-RELATED |
| | HUMAN GENE ONTOLOGY |
| | PROCESS |
| | protein glycosylation > O-linked glycosylation |
| | aminoglycan biosynthesis |
| | biosynthesis > glycosaminoglycan biosynthesis |
| | metabolism > carbohydrate metabolism |
| | GO biological process > developmental processes |
| | FUNCTION |
| | acetylglucosaminyltransferase > N-acetyllactosaminide beta-1,6-N- |
| | acetylglucosaminyltransferase |
| | oligosaccharyl transferase |
| | acetylglucosaminyltransferase > N-acetyllactosaminide beta-1,6-N- |
| | acetylglucosaminyltransferase |
| | LOCATION |
| | cell > membrane fraction |
| | cytoplasm > Golgi apparatus |
| | GO cellular component > extracellular |
| | HUMAN PROTEIN DOMAINS (INTERPRO SIGNATURES) |
| | No Domain Hit |
| hP07-057 | HUMAN PANTHER CLASSIFICATIONS |
| | FAMILY (SUBFAMILY) |
| | PHOSPHOGLYCERATE MUTASE (BISPHOSPHOGLYCERATE MUTASE) |
| | MOLECULAR FUNCTIONS |
| | ISOMERASE > MUTASE |
| | BIOLOGICAL PROCESS |
| | BLOOD CIRCULATION AND GAS EXCHANGE > OTHER BLOOD |
| | CIRCULATION AND GAS EXCHANGE ACTIVITY |
| | HUMAN GENE ONTOLOGY |
| | PROCESS |
| | catabolic carbohydrate metabolism |
| | peptidoglycan catabolism > glycolysis |
| | cell growth and maintenance > metabolism |
| | muscle contraction > striated muscle contraction |
| | anabolic carbohydrate metabolism > gluconeogenesis |
| | metabolism > carbohydrate metabolism |
| | FUNCTION |
| | enzyme > phosphoglycerate mutase |
| | GO molecular function > enzyme |
| | enzyme > bisphosphoglycerate mutase |
| | enzyme > bisphosphoglycerate phosphatase |
| | LOCATION |
| | cytoplasm > cytosol |
| | HUMAN PROTEIN DOMAINS (INTERPRO SIGNATURES) |
| | IPR001345 (PGAM) |
| | IPR001345 (PG MUTASE) |
| hP07-057.1 | HUMAN PANTHER CLASSIFICATIONS |
| | FAMILY (SUBFAMILY) |
| | PHOSPHOGLYCERATE MUTASE (BISPHOSPHOGLYCERATE MUTASE) |
| | MOLECULAR FUNCTIONS |
| | ISOMERASE > MUTASE |
| | BIOLOGICAL PROCESS |
| | BLOOD CIRCULATION AND GAS EXCHANGE > OTHER BLOOD |
| | CIRCULATION AND GAS EXCHANGE ACTIVITY |
| | HUMAN GENE ONTOLOGY |
| | PROCESS |
| | catabolic carbohydrate metabolism |
| | peptidoglycan catabolism > glycolysis |
| | cell growth and maintenance > metabolism |
| | muscle contraction > striated muscle contraction |
| | anabolic carbohydrate metabolism > gluconeogenesis |
| | metabolism > carbohydrate metabolism |
| | FUNCTION |
| | enzyme > phosphoglycerate mutase |
| | GO molecular function > enzyme |
| | enzyme > bisphosphoglycerate mutase |
| | enzyme > bisphosphoglycerate phosphatase |
| | LOCATION |
| | cytoplasm > cytosol |
| | HUMAN PROTEIN DOMAINS (INTERPRO SIGNATURES) |
| | IPR001345 (PGAM) |
| | IPR001345 (PG MUTASE) |
| hP07-057.2 | HUMAN PANTHER CLASSIFICATIONS |
| | FAMILY (SUBFAMILY) |
| | PHOSPHOGLYCERATE MUTASE (BISPHOSPHOGLYCERATE MUTASE) |
| | MOLECULAR FUNCTIONS |
| | ISOMERASE > MUTASE |
| | BIOLOGICAL PROCESS |
| | BLOOD CIRCULATION AND GAS EXCHANGE > OTHER BLOOD |
| | CIRCULATION AND GAS EXCHANGE ACTIVITY |
| | HUMAN GENE ONTOLOGY |
| | PROCESS |
| | catabolic carbohydrate metabolism |
| | peptidoglycan catabolism > glycolysis |
| | cell growth and maintenance > metabolism |
| | muscle contraction > striated muscle contraction |
| | anabolic carbohydrate metabolism > gluconeogenesis |
| | metabolism > carbohydrate metabolism |
| | FUNCTION |
| | enzyme > phosphoglycerate mutase |
| | GO molecular function > enzyme |
| | enzyme > bisphosphoglycerate mutase |
| | enzyme > bisphosphoglycerate phosphatase |
| | LOCATION |
| | cytoplasm > cytosol |
| | HUMAN PROTEIN DOMAINS (INTERPRO SIGNATURES) |
| | IPR001345 (PGAM) |
| | IPR001345 (PG MUTASE) |
| hP07-057.3 | HUMAN PANTHER CLASSIFICATIONS |
| | FAMILY (SUBFAMILY) |
| | PHOSPHOGLYCERATE MUTASE (BISPHOSPHOGLYCERATE MUTASE) |
| | MOLECULAR FUNCTIONS |
| | ISOMERASE > MUTASE |
| | BIOLOGICAL PROCESS |
| | BLOOD CIRCULATION AND GAS EXCHANGE > OTHER BLOOD |
| | CIRCULATION AND GAS EXCHANGE ACTIVITY |
| | HUMAN GENE ONTOLOGY |
| | PROCESS |
| | catabolic carbohydrate metabolism |
| | peptidoglycan catabolism > glycolysis |
| | cell growth and maintenance > metabolism |
| | muscle contraction > striated muscle contraction |
| | anabolic carbohydrate metabolism > gluconeogenesis |
| | metabolism > carbohydrate metabolism |
| | FUNCTION |
| | enzyme > phosphoglycerate mutase |
| | GO molecular function > enzyme |
| | enzyme > bisphosphoglycerate mutase |
| | enzyme > bisphosphoglycerate phosphatase |
| | LOCATION |
| | cytoplasm > cytosol |
| | HUMAN PROTEIN DOMAINS (INTERPRO SIGNATURES) |
| | IPR001345 (PGAM) |
| | IPR001345 (PG MUTASE) |
| hP07-058 | HUMAN PANTHER CLASSIFICATIONS |
| | FAMILY (SUBFAMILY) |
| | NUCLEOTIDE KINASES |
| | HUMAN GENE ONTOLOGY |
| | PROCESS |
| | metabolism > energy pathways |
| | cell growth and maintenance > metabolism |
| | UMP biosynthesis > uridine kinase reaction |
| | FUNCTION |
| | enzyme > NADH2 dehydrogenase |
| | enzyme > NADH dehydrogenase (ubiquinone) |
| | enzyme > deoxyguanosine kinase |
| | nucleotide binding > ATP binding |
| | LOCATION |
| | GO cellular component > intracellular |
| | cell > membrane fraction |
| | endoplasmic reticulum > endoplasmic reticulum lumen |
| | HUMAN PROTEIN DOMAINS (INTERPRO SIGNATURES) |
| | IPR002624 (dNK) |
| hP07-059 | HUMAN PANTHER CLASSIFICATIONS |
| | No Panther Hit |
| | HUMAN GENE ONTOLOGY |
| | PROCESS |
| | mesoderm development > muscle development |
| | FUNCTION |
| | calcium binding |
| | cysteine-type endopeptidase |
| | cysteine-type peptidase > calpain |
| | LOCATION |
| | dystroglycan complex > sarcoglycan complex |
| | plasma membrane > integral plasma membrane protein |
| | cell > membrane fraction |
| | HUMAN PROTEIN DOMAINS (INTERPRO SIGNATURES) |
| | No Domain Hit |
| hP07-059.1 | HUMAN PANTHER CLASSIFICATIONS |
| | No Panther Hit |
| | HUMAN GENE ONTOLOGY |
| | PROCESS |
| | mesoderm development > muscle development |
| | FUNCTION |
| | calcium binding |
| | cysteine-type endopeptidase |
| | cysteine-type peptidase > calpain |
| | LOCATION |
| | dystroglycan complex > sarcoglycan complex |
| | plasma membrane > integral plasma membrane protein |
| | cell > membrane fraction |
| | HUMAN PROTEIN DOMAINS (INTERPRO SIGNATURES) |
| | IPR001687 (ATP GTP A) |
| hP07-059.2 | HUMAN PANTHER CLASSIFICATIONS |
| | No Panther Hit |
| | HUMAN GENE ONTOLOGY |
| | PROCESS |
| | mesoderm development > muscle development |
| | FUNCTION |
| | calcium binding |
| | cysteine-type endopeptidase |
| | cysteine-type peptidase > calpain |
| | GO molecular function > cell adhesion |
| | LOCATION |
| | dystroglycan complex > sarcoglycan complex |
| | plasma membrane > integral plasma membrane protein |
| | cell > membrane fraction |
| | cell > plasma membrane |
| | HUMAN PROTEIN DOMAINS (INTERPRO SIGNATURES) |
| | IPR001687 (ATP GTP A) |
| hP07-060 | HUMAN PANTHER CLASSIFICATIONS |
| | FAMILY (SUBFAMILY) |
| | SERINE/THREONINE PROTEIN KINASE(RAC SERINE/THREONINE |
| | KINASE) |
| | MOLECULAR FUNCTIONS |
| | KINASE > PROTEIN KINASE > NON-RECEPTOR SERINE/THREONINE |
| | PROTEIN KINASE |
| | BIOLOGICAL PROCESS |
| | PROTEIN METABOLISM AND MODIFICATION > PROTEIN |
| | MODIFICATION > PROTEIN PHOSPHORYLATION |
| | SIGNAL TRANSDUCTION |
| | HUMAN GENE ONTOLOGY |
| | PROCESS |
| | protein modification > protein phosphorylation |
| | signal transduction |
| | cell communication > signal transduction |
| | temperature response > heat response |
| | nitrogen metabolism |
| | biosynthesis > nitric oxide biosynthesis |
| | FUNCTION |
| | enzyme > protein kinase |
| | nucleotide binding > ATP binding |
| | protein serine/threonine kinase > protein kinase C |
| | GO molecular function > cell cycle regulator |
| | protein kinase C > atypical protein kinase C |
| | LOCATION |
| | cell > cytoplasm |
| | GO cellular component > intracellular |
| | plasma membrane > peripheral plasma membrane protein |
| | cytoplasm > ribosome |
| | GO cellular component > cellular_component unknown |
| | HUMAN PROTEIN DOMAINS (INTERPRO SIGNATURES) |
| | IPR000719 (PROTEIN KINASE DOM) |
| | IPR000719 (PROTEIN KINASE ATP) |
| | IPR002290 (PROTEIN KINASE ST) |
| | IPR001849 (PH DOMAIN) |
| | IPR001849 (PH) |
| | IPR000961 (pkinase C) |
| | IPR000719 (pkinase) |
| | IPR001245 (TyrKc) |
| | IPR002290 (S TKc) |
| | IPR000961 (S TK X) |
| | IPR001849 (PH) |
| hP07-061 | HUMAN PANTHER CLASSIFICATIONS |
| | FAMILY (SUBFAMILY) |
| | DUAL SPECIFICITY AND SERINE/THREONINE PROTEIN KINASE |
| | HUMAN GENE ONTOLOGY |
| | PROCESS |
| | protein modification > protein phosphorylation |
| | cell communication > signal transduction |
| | M phase > mitosis |
| | FUNCTION |
| | enzyme > protein kinase |
| | nucleotide binding > ATP binding |
| | protein serine/threonine kinase > protein kinase C |
| | protein binding > calmodulin binding |
| | protein kinase C > atypical protein kinase C |
| | LOCATION |
| | cell > nucleus |
| | cell > cytoplasm |
| | plasma membrane > integral plasma membrane protein |
| | plasma membrane > peripheral plasma membrane protein |
| | GO cellular component > cellular_component unknown |
| | HUMAN PROTEIN DOMAINS (INTERPRO SIGNATURES) |
| | NULL (SER RICH) |
| | IPR002219 (DAGPEDOMAIN) |
| | IPR001245 (TyrKc) |
| | IPR002290 (S TKc) |
| | IPR002219 (C1) |
| | IPR001849 (PH) |
| | IPR000719 (PROTEIN KINASE ATP) |
| | IPR002290 (PROTEIN KINASE ST) |
| | IPR002219 (DAG PE BIND DOM 1) |
| | IPR002219 (DAG PE BIND DOM 2 2) |
| | IPR000719 (PROTEIN KINASE DOM) |
| | IPR001849 (PH DOMAIN) |
| | IPR000694 (PRO RICH) |
| | IPR001472 (NLS BP) |
| | IPR001849 (PH) |
| | IPR002219 (DAG PE-bind) |
| | IPR000719 (pkinase) |
| hP07-062 | HUMAN PANTHER CLASSIFICATIONS |
| | No Panther Hit |
| | HUMAN GENE ONTOLOGY |
| | PROCESS |
| | transcription, DNA-dependent > transcription regulation |
| | transcription, DNA-dependent > transcription from Pol II promoter |
| | apoptosis > anti-apoptosis |
| | FUNCTION |
| | DNA binding > transcription factor |
| | transcription factor > transcription activating factor |
| | LOCATION |
| | cell > nucleus |
| | nuclear membrane > nuclear membrane lumen |
| | HUMAN PROTEIN DOMAINS (INTERPRO SIGNATURES) |
| | NULL (ALA RICH) |
| | IPR000694 (PRO RICH) |
| | IPR003072 (NORNUCRECPTR) |
| hP07-062.1 | HUMAN PANTHER CLASSIFICATIONS |
| | No Panther Hit |
| | HUMAN GENE ONTOLOGY |
| | PROCESS |
| | transcription, DNA-dependent > transcription regulation |
| | transcription, DNA-dependent > transcription from Pol II promoter |
| | apoptosis > anti-apoptosis |
| | FUNCTION |
| | DNA binding > transcription factor |
| | transcription factor > transcription activating factor |
| | LOCATION |
| | cell > nucleus |
| | nuclear membrane > nuclear membrane lumen |
| | HUMAN PROTEIN DOMAINS (INTERPRO SIGNATURES) |
| | IPR000580 (sp O75157 O75157 HUMAN) |
| | IPR000580 (TSC22) |
| | IPR000580 (TSC22) |
| hP07-062.2 | HUMAN PANTHER CLASSIFICATIONS |
| | No Panther Hit |
| | HUMAN GENE ONTOLOGY |
| | PROCESS |
| | transcription, DNA-dependent > transcription regulation |
| | transcription, DNA-dependent > transcription from Pol II promoter |
| | apoptosis > anti-apoptosis |
| | FUNCTION |
| | DNA binding > transcription factor |
| | transcription factor > transcription activating factor |
| | LOCATION |
| | cell > nucleus |
| | nuclear membrane > nuclear membrane lumen |
| | HUMAN PROTEIN DOMAINS (INTERPRO SIGNATURES) |
| | IPR000580 (sp O75157 O75157 HUMAN) |
| | NULL (ALA RICH) |
| | IPR000694 (PRO RICH) |
| | IPR000580 (TSC22) |
| | IPR003072 (NORNUCRECPTR) |
| | IPR000580 (TSC22) |
| hP07-063 | HUMAN PANTHER CLASSIFICATIONS |
| | FAMILY (SUBFAMILY) |
| | C2H2 ZINC FINGER-RELATED |
| | HUMAN GENE ONTOLOGY |
| | PROCESS |
| | transcription, DNA-dependent > transcription regulation |
| | transcription regulation from Pol II promoter > repression of transcription from Pol |
| | II promoter |
| | GO biological process > developmental processes |
| | gametogenesis > spermatogenesis |
| | central nervous system development > brain development |
| | FUNCTION |
| | DNA binding > transcription factor |
| | nucleic acid binding > DNA binding |
| | GO molecular function > nucleic acid binding |
| | transcription factor > RNA polymerase II transcription factor |
| | RNA polymerase II transcription factor > specific RNA polymerase II transcription |
| | factor |
| | LOCATION |
| | cell > nucleus |
| | nuclear membrane > nuclear membrane lumen |
| | nucleoplasm > transcription factor complex |
| | transcription factor complex > mediator complex |
| | cell > plasma membrane |
| | HUMAN PROTEIN DOMAINS (INTERPRO SIGNATURES) |
| | IPR000822 (ZINC FINGER C2H2 2 2) |
| | IPR000822 (zf-C2H2) |
| | IPR000822 (ZnF C2H2) |
| | IPR000822 (ZINC FINGER C2H2 1) |
| | IPR000345 (CYTOCHROME C) |
| hP07-064 | HUMAN PANTHER CLASSIFICATIONS |
| | No Panther Hit |
| | HUMAN GENE ONTOLOGY |
| | PROCESS |
| | humoral defense mechanism > antimicrobial response |
| | cell communication > signal transduction |
| | FUNCTION |
| | GO molecular function > molecular_function unknown |
| | LOCATION |
| | plasma membrane > integral plasma membrane protein |
| | HUMAN PROTEIN DOMAINS (INTERPRO SIGNATURES) |
| | No Domain Hit |
| hP07-065 | HUMAN PANTHER CLASSIFICATIONS |
| | FAMILY (SUBFAMILY) |
| | NADC/MODD-RELATED (gb def: quinolinate phosphoribosyltransferase; |
| | nicotinate-nucleotide pyrophosphorylase [homo sapiens]) |
| | MOLECULAR FUNCTIONS |
| | TRANSFERASE > GLYCOSYLTRANSFERASE |
| | BIOLOGICAL PROCESS |
| | COENZYME AND PROSTHETIC GROUP METABOLISM > COENZYME |
| | METABOLISM |
| | HUMAN GENE ONTOLOGY |
| | PROCESS |
| | biosynthesis > nicotinamide adenine dinucleotide (NAD) biosynthesis |
| | nicotinamide metabolism |
| | metabolism > energy pathways |
| | cell-cell signaling > synaptic transmission |
| | vitamin metabolism > water-soluble vitamin metabolism |
| | FUNCTION |
| | enzyme > nicotinate-nucleotide pyrophosphorylase (carboxylating) |
| | GO molecular function > enzyme |
| | LOCATION |
| | mitochondrion > mitochondrial matrix |
| | cell wall > periplasmic space |
| | HUMAN PROTEIN DOMAINS (INTERPRO SIGNATURES) |
| | IPR002638 (QRPTase) |
| hP07-065.1 | HUMAN PANTHER CLASSIFICATIONS |
| | FAMILY (SUBFAMILY) |
| | NADC/MODD-RELATED(gb def: quinolinate phosphoribosyltransferase; |
| | nicotinate-nucleotide pyrophosphorylase [homo sapiens]) |
| | MOLECULAR FUNCTIONS |
| | TRANSFERASE > GLYCOSYLTRANSFERASE |
| | BIOLOGICAL PROCESS |
| | COENZYME AND PROSTHETIC GROUP METABOLISM > COENZYME |
| | METABOLISM |
| | HUMAN GENE ONTOLOGY |
| | PROCESS |
| | biosynthesis > nicotinamide adenine dinucleotide (NAD) biosynthesis |
| | nicotinamide metabolism |
| | metabolism > energy pathways |
| | cell-cell signaling > synaptic transmission |
| | vitamin metabolism > water-soluble vitamin metabolism |
| | FUNCTION |
| | enzyme > nicotinate-nucleotide pyrophosphorylase (carboxylating) |
| | GO molecular function > enzyme |
| | LOCATION |
| | mitochondrion > mitochondrial matrix |
| | cell wall > periplasmic space |
| | HUMAN PROTEIN DOMAINS (INTERPRO SIGNATURES) |
| | IPR002638 (QRPTase) |
| hP07-066 | HUMAN PANTHER CLASSIFICATIONS |
| | FAMILY (SUBFAMILY) |
| | G-PROTEIN MODULATOR RAB-GTPASE ACTIVATING PROTEIN- |
| | RELATED(RAB GTPASE ACTIVATING PROTEIN-RELATED) |
| | MOLECULAR FUNCTIONS |
| | MISCELLANEOUS FUNCTION > OTHER MISCELLANEOUS FUNCTION |
| | PROTEIN |
| | BIOLOGICAL PROCESS |
| | ONCOGENESIS |
| | CELL CYCLE > CELL CYCLE CONTROL |
| | HUMAN GENE ONTOLOGY |
| | PROCESS |
| | GO biological process > developmental processes |
| | protein metabolism and modification > protein modification |
| | cell growth and maintenance > cell proliferation |
| | organelle organization and biogenesis > cytoskeleton organization and biogenesis |
| | mesoderm development > muscle development |
| | FUNCTION |
| | ligand binding or carrier > protein binding |
| | GO molecular function > motor |
| | nucleotide binding > ATP binding |
| | actin binding > tubilin binding |
| | adenosinetriphosphatase > myosin ATPase |
| | LOCATION |
| | cell > cytoplasm |
| | actin cytoskeleton > non-muscle myosin |
| | cell wall > muscle myosin |
| | thick filament |
| | actin cytoskeleton > non-muscle myosin |
| | non-muscle myosin |
| | thin filament |
| | cell wall > muscle myosin |
| | cell > cytoplasm |
| | HUMAN PROTEIN DOMAINS (INTERPRO SIGNATURES) |
| | NULL (SER RICH) |
| | IPR000195 (RAB GAP) |
| | IPR000195 (TBC) |
| | IPR000195 (TBC) |
| | IPR000515 (BPD TRANSP INN MEMBR) |
| | IPR001687 (ATP GTP A) |
| hP07-067 | HUMAN PANTHER CLASSIFICATIONS |
| | No Panther Hit |
| | HUMAN GENE ONTOLOGY |
| | PROCESS |
| | GO biological process > developmental processes |
| | cell communication > signal transduction |
| | transmembrane receptor protein serine/threonine kinase signaling pathway > TGFbeta |
| | receptor signaling pathway |
| | cell communication > cell adhesion |
| | humoral defense mechanism > antimicrobial response |
| | FUNCTION |
| | ligand binding or carrier > glycosaminoglycan binding |
| | ligand binding or carrier > protein binding |
| | serine-type endopeptidase > chymotrypsin |
| | serine-type endopeptidase > trypsin |
| | LOCATION |
| | cell > membrane fraction |
| | HUMAN PROTEIN DOMAINS (INTERPRO SIGNATURES) |
| | IPR001472 (NLS BP) |
| | IPR001507 (zona pellucida) |
| | IPR001507 (ZPELLUCIDA) |
| | IPR001507 (ZP) |
| | IPR001507 (ZP DOMAIN) |
| hP07-068 | HUMAN PANTHER CLASSIFICATIONS |
| | FAMILY (SUBFAMILY) |
| | RAS SUPERFAMILY (RAS2) |
| | MOLECULAR FUNCTIONS |
| | SELECT REGULATORY MOLECULE > G-PROTEIN > SMALL GTPASE |
| | BIOLOGICAL PROCESS |
| | SIGNAL TRANSDUCTION |
| | ONCOGENESIS > ONCOGENE |
| | HUMAN GENE ONTOLOGY |
| | PROCESS |
| | intracellular signaling cascade > small GTPase mediated signal transduction |
| | cell cycle > cell cycle control |
| | cell growth and maintenance > cell shape and cell size control |
| | embryogenesis and morphogenesis > histogenesis and organogenesis |
| | LOCATION |
| | cell > cytoplasm |
| | plasma membrane > peripheral plasma membrane protein |
| | cell > plasma membrane |
| | endosome > late endosome |
| | GO cellular component > intracellular |
| | HUMAN PROTEIN DOMAINS (INTERPRO SIGNATURES) |
| | IPR001806 (ras) |
| | IPR001806 (RASTRNSFRMNG) |
| | IPR003577 (RAS) |
| | IPR003578 (RHO) |
| | IPR003579 (RAB) |
| hP07-068.1 | HUMAN PANTHER CLASSIFICATIONS |
| | FAMILY (SUBFAMILY) |
| | RAS SUPERFAMILY (RAS2) |
| | MOLECULAR FUNCTIONS |
| | SELECT REGULATORY MOLECULE > G-PROTEIN > SMALL GTPASE |
| | BIOLOGICAL PROCESS |
| | SIGNAL TRANSDUCTION |
| | ONCOGENESIS > ONCOGENE |
| | HUMAN GENE ONTOLOGY |
| | PROCESS |
| | intracellular signaling cascade > small GTPase mediated signal transduction |
| | cell cycle > cell cycle control |
| | cell growth and maintenance > cell shape and cell size control |
| | cell growth and maintenance > intracellular protein traffic |
| | LOCATION |
| | cell > cytoplasm |
| | plasma membrane > peripheral plasma membrane protein |
| | endosome > late endosome |
| | cell > plasma membrane |
| | GO cellular component > intracellular |
| | HUMAN PROTEIN DOMAINS (INTERPRO SIGNATURES) |
| | IPR001806 (ras) |
| | IPR001806 (RASTRNSFRMNG) |
| | IPR003577 (RAS) |
| | IPR003578 (RHO) |
| | IPR003579 (RAB) |
| hP07-068.2 | HUMAN PANTHER CLASSIFICATIONS |
| | FAMILY (SUBFAMILY) |
| | RAS SUPERFAMILY(RAS2) |
| | MOLECULAR FUNCTIONS |
| | SELECT REGULATORY MOLECULE > G-PROTEIN > SMALL GTPASE |
| | BIOLOGICAL PROCESS |
| | SIGNAL TRANSDUCTION |
| | ONCOGENESIS > ONCOGENE |
| | HUMAN GENE ONTOLOGY |
| | PROCESS |
| | intracellular signaling cascade > small GTPase mediated signal transduction |
| | cell cycle > cell cycle control |
| | cell growth and maintenance > intracellular protein traffic |
| | cell growth and maintenance > cell shape and cell size control |
| | LOCATION |
| | cell > cytoplasm |
| | plasma membrane > peripheral plasma membrane protein |
| | endosome > late endosome |
| | cell > plasma membrane |
| | GO cellular component > intracellular |
| | HUMAN PROTEIN DOMAINS (INTERPRO SIGNATURES) |
| | IPR001806 (ras) |
| | IPR001806 (RASTRNSFRMNG) |
| | IPR003577 (RAS) |
| | IPR003578 (RHO) |
| | IPR003579 (RAB) |
| | IPR002041 (RAN) |
| | IPR001687 (ATP GTP A) |
| 07.069 | HUMAN PANTHER CLASSIFICATIONS |
| | No Panther Hit |
| | HUMAN GENE ONTOLOGY |
| | No Gene Ontology |
| | HUMAN PROTEIN DOMAINS (INTERPRO SIGNATURES) |
| | No Domain Hit |
| hP07-069.1 | HUMAN PANTHER CLASSIFICATIONS |
| | No Panther Hit |
| | HUMAN GENE ONTOLOGY |
| | No Gene Ontology |
| | HUMAN PROTEIN DOMAINS (INTERPRO SIGNATURES) |
| | IPR000345 (CYTOCHROME C) |
| hP07-070 | HUMAN PANTHER CLASSIFICATIONS |
| | FAMILY (SUBFAMILY) |
| | CHOLINE/ETHANOLAMINE KINASE-RELATED(ETHANOLAMINE |
| | KINASE) |
| | MOLECULAR FUNCTIONS |
| | KINASE > OTHER KINASE |
| | BIOLOGICAL PROCESS |
| | LIPID, FATTY ACID AND STEROID METABOLISM > PHOSPHOLIPID |
| | METABOLISM |
| | HUMAN GENE ONTOLOGY |
| | PROCESS |
| | transport > lipid transport |
| | nucleotide metabolism > lipid metabolism |
| | glycerophospholipid metabolism |
| | amine biosynthesis > phosphatidylcholine biosynthesis |
| | FUNCTION |
| | enzyme > ethanolamine kinase |
| | enzyme > choline kinase |
| | GO molecular function > enzyme |
| | LOCATION |
| | cell > cytoplasm |
| | cytoplasm > cytosol |
| | HUMAN PROTEIN DOMAINS (INTERPRO SIGNATURES) |
| | IPR002573 (Choline kinase) |
| hP07-071 | HUMAN PANTHER CLASSIFICATIONS |
| | FAMILY (SUBFAMILY) |
| | TETRASPANIN-RELATED(gb def: transmembrane 4 superfamily member [homo |
| | sapiens]) |
| | MOLECULAR FUNCTIONS |
| | MOLECULAR FUNCTION UNCLASSIFIED |
| | BIOLOGICAL PROCESS |
| | BIOLOGICAL PROCESS UNCLASSIFIED |
| | HUMAN GENE ONTOLOGY |
| | PROCESS |
| | protein glycosylation > N-linked glycosylation |
| | eye morphogenesis > mystery cell fate differentiation |
| | cell communication > cell adhesion |
| | sensory perception > vision |
| | cell growth and maintenance > cell motility |
| | FUNCTION |
| | molecular_function unknown > tumor antigen |
| | GO molecular function > cell adhesion |
| | 3&apos;, 5&apos;-cyclic-nucleotide phosphodiesterase > cGMP-specific |
| | phosphodiesterase |
| | mannosidase > beta-mannosidase |
| | glucosidase > mannosyl-oligosaccharide glucosidase (processing A-glucosidase I) |
| | LOCATION |
| | cell > membrane fraction |
| | plasma membrane > integral plasma membrane protein |
| | cell > plasma membrane |
| | cytoplasm > lysosome |
| | lysosome > lysosomal membrane |
| | HUMAN PROTEIN DOMAINS (INTERPRO SIGNATURES) |
| | IPR000301 (TM4 2) |
| | IPR000301 (transmembrane4) |
| | IPR000301 (TMFOUR) |
| hP07-072 | HUMAN PANTHER CLASSIFICATIONS |
| | FAMILY (SUBFAMILY) |
| | PHOSPHATIDYLINOSITOL-4-PHOSPHATE 5-KINASE- |
| | RELATED(PHOSPHATIDYLINOSITOL-4-PHOSPHATE 5-KINASE TYPE II) |
| | MOLECULAR FUNCTIONS |
| | KINASE > OTHER KINASE |
| | BIOLOGICAL PROCESS |
| | SIGNAL TRANSDUCTION > CELL SURFACE RECEPTOR MEDIATED |
| | SIGNAL TRANSDUCTION > G-PROTEIN MEDIATED SIGNALING |
| | HUMAN GENE ONTOLOGY |
| | PROCESS |
| | phospholipid metabolism > glycerophospholipid metabolism |
| | cell communication > signal transduction |
| | FUNCTION |
| | GO molecular function > enzyme |
| | LOCATION |
| | cell > cytoplasm |
| | nuclear membrane > nuclear membrane lumen |
| | HUMAN PROTEIN DOMAINS (INTERPRO SIGNATURES) |
| | IPR002498 (PIP5K) |
| | IPR002498 (PIPKc) |
| hP07-073 | HUMAN PANTHER CLASSIFICATIONS |
| | FAMILY (SUBFAMILY) |
| | CALMODULIN-RELATED(CALCIUM-BINDING PROTEIN P22) |
| | MOLECULAR FUNCTIONS |
| | SELECT CALCIUM BINDING PROTEIN > CALMODULIN RELATED |
| | PROTEIN |
| | BIOLOGICAL PROCESS |
| | INTRACELLULAR PROTEIN TRAFFIC > EXOCYTOSIS > CONSTITUTIVE |
| | EXOCYTOSIS |
| | HUMAN GENE ONTOLOGY |
| | PROCESS |
| | cell surface receptor linked signal transduction > G protein linked receptor protein |
| | signaling pathway |
| | N-terminal fatty acid:protein modification > protein myristylation |
| | DNA repair > double-strand break repair |
| | monovalent inorganic cation transport > potassium transport |
| | M phase > mitosis |
| | FUNCTION |
| | ligand binding or carrier > calcium binding |
| | ligand binding or carrier > protein binding |
| | enzyme > protein phosphatase |
| | protein binding > calmodulin binding |
| | GO molecular function > cell adhesion |
| | LOCATION |
| | cell > cytoplasm |
| | cytoplasm > synaptic vesicle |
| | cell > plasma membrane |
| | microtubule organizing center > centrosome |
| | cell > nucleus |
| | HUMAN PROTEIN DOMAINS (INTERPRO SIGNATURES) |
| | IPR002048 (EF HAND 2 2) |
| | IPR002048 (efhand) |
| | IPR002048 (EFh) |
| | IPR002048 (EF HAND) |
| hP07-074 | HUMAN PANTHER CLASSIFICATIONS |
| | FAMILY (SUBFAMILY) |
| | TPR REPEAT-CONTAINING PROTEIN |
| | HUMAN GENE ONTOLOGY |
| | PROCESS |
| | sister chromatid cohesion > mitotic sister chromatid cohesion |
| | protein glycosylation > O-linked glycosylation |
| | cell communication > signal transduction |
| | FUNCTION |
| | mRNA binding > pre-mRNA splicing factor |
| | enzyme > acetylglucosaminyltransferase |
| | legend binding or carrier > protein binding |
| | LOCATION |
| | cell > cytoplasm |
| | cytoplasm > cytosol |
| | cell > nucleus |
| | HUMAN PROTEIN DOMAINS (INTERPRO SIGNATURES) |
| | NULL (SER RICH) |
| | IPR001440 (TPR REGION) |
| | NULL (LYS RICH) |
| | IPR001440 (TPR REPEAT 8) |
| | IPR001440 (TPR) |
| | IPR001440 (TPR) |
| hP07-075 | HUMAN PANTHER CLASSIFICATIONS |
| | No Panther Hit |
| | HUMAN GENE ONTOLOGY |
| | No Gene Ontology |
| | HUMAN PROTEIN DOMAINS (INTERPRO SIGNATURES) |
| | No Domain Hit |
| hP07-075.1 | HUMAN PANTHER CLASSIFICATIONS |
| | No Panther Hit |
| | HUMAN GENE ONTOLOGY |
| | PROCESS |
| | histogenesis and organogenesis > ectoderm development |
| | apoptosis > anti-apoptosis |
| | mesoderm development > skeletal development |
| | cell communication > signal transduction |
| | defence response > immune response |
| | FUNCTION |
| | GO molecular function > apoptosis inhibitor |
| | molecular_function unknown > lymphocyte antigen |
| | LOCATION |
| | GO cellular component > extracellular |
| | cell > soluble fraction |
| | extracellular > extracellular matrix |
| | cell > membrane fraction |
| | plasma membrane > integral plasma membrane protein |
| | HUMAN PROTEIN DOMAINS (INTERPRO SIGNATURES) |
| | No Domain Hit |
| hP07-075.2 | HUMAN PANTHER CLASSIFICATIONS |
| | No Panther Hit |
| | HUMAN GENE ONTOLOGY |
| | PROCESS |
| | histogenesis and organogenesis > ectoderm development |
| | apoptosis > anti-apoptosis |
| | cell communication > signal transduction |
| | defence response > immune response |
| | FUNCTION |
| | GO molecular function > apoptosis inhibitor |
| | molecular_function unknown > lymphocyte antigen |
| | LOCATION |
| | GO cellular component > extracellular |
| | cell > soluble fraction |
| | cell > plasma membrane |
| | cell > membrane fraction |
| | plasma membrane > integral plasma membrane protein |
| | HUMAN PROTEIN DOMAINS (INTERPRO SIGNATURES) |
| | No Domain Hit |
| hP07-076 | HUMAN PANTHER CLASSIFICATIONS |
| | No Panther Hit |
| | HUMAN GENE ONTOLOGY |
| | FUNCTION |
| | ligand binding or carrier > lipid binding |
| | LOCATION |
| | nuclear membrane > nuclear membrane lumen |
| | Golgi apparatus > Golgi lumen |
| | HUMAN PROTEIN DOMAINS (INTERPRO SIGNATURES) |
| | No Domain Hit |
| hP07-076.1 | HUMAN PANTHER CLASSIFICATIONS |
| | No Panther Hit |
| | HUMAN GENE ONTOLOGY |
| | FUNCTION |
| | ligand binding or carrier > lipid binding |
| | LOCATION |
| | nuclear membrane > nuclear membrane lumen |
| | Golgi apparatus > Golgi lumen |
| | HUMAN PROTEIN DOMAINS (INTERPRO SIGNATURES) |
| | No Domain Hit |
| hP07-076.2 | HUMAN PANTHER CLASSIFICATIONS |
| | No Panther Hit |
| | HUMAN GENE ONTOLOGY |
| | PROCESS |
| | small GTPase mediated signal transduction > RHO protein signal transduction |
| | cell communication > signal transduction |
| | FUNCTION |
| | ligand binding or carrier > lipid binding |
| | enzyme > gamma-butyrobetaine, 2-oxoglutarate dioxygenase |
| | enzyme activator > GTPase activator |
| | small GTPase regulatory/interacting protein |
| | GTPase activator > RHO GTPase activator |
| | LOCATION |
| | nuclear membrane > nuclear membrane lumen |
| | Golgi apparatus > Golgi lumen |
| | cell > cytoplasm |
| | HUMAN PROTEIN DOMAINS (INTERPRO SIGNATURES) |
| | IPR002913 (START) |
| | IPR002913 (START) |
| hP07-076.3 | HUMAN PANTHER CLASSIFICATIONS |
| | No Panther Hit |
| | HUMAN GENE ONTOLOGY |
| | PROCESS |
| | small GTPase mediated signal transduction > RHO protein signal transduction |
| | cell communication > signal transduction |
| | FUNCTION |
| | ligand binding or carrier > lipid binding |
| | enzyme > gamma-butyrobetaine, 2-oxoglutarate dioxygenase |
| | enzyme activator > GTPase activator |
| | small GTPase regulatory/interacting protein |
| | GTPase activator > RHO GTPase activator |
| | LOCATION |
| | nuclear membrane > nuclear membrane lumen |
| | Golgi apparatus > Golgi lumen |
| | cell > cytoplasm |
| | HUMAN PROTEIN DOMAINS (INTERPRO SIGNATURES) |
| | IPR002913 (START) |
| | IPR002913 (START) |
| hP07-077 | HUMAN PANTHER CLASSIFICATIONS |
| | FAMILY (SUBFAMILY) |
| | RHO GDP-DISSOCIATION INHIBITOR FAMILY MEMBER(RHO GDP- |
| | DISSOCIATION INHIBITOR 3) |
| | MOLECULAR FUNCTIONS |
| | MISCELLANEOUS FUNCTION > OTHER MISCELLANEOUS FUNCTION |
| | PROTEIN |
| | BIOLOGICAL PROCESS |
| | SIGNAL TRANSDUCTION |
| | HUMAN GENE ONTOLOGY |
| | PROCESS |
| | small GTPase mediated signal transduction > RHO protein signal transduction |
| | cell adhesion |
| | cell cycle |
| | peptidoglycan catabolism > actin cytoskeleton reorganization |
| | cytoskeleton organization and biogenesis |
| | defence response > immune response |
| | GO biological process > developmental processes |
| | FUNCTION |
| | ligand binding or carrier > protein binding |
| | enzyme activator > GTPase activator |
| | small GTPase regulatory/interacting protein |
| | LOCATION |
| | cell > cytoplasm |
| | plasma membrane > peripheral plasma membrane protein |
| | cytoplasm > cytosol |
| | HUMAN PROTEIN DOMAINS (INTERPRO SIGNATURES) |
| | IPR000406 (Rho GDI) |
| | IPR000406 (RHOGDI) |
| hP07-078 | HUMAN PANTHER CLASSIFICATIONS |
| | FAMILY (SUBFAMILY) |
| | TUMOR NECROSIS FACTOR RECEPTOR SUPERFAMILY (TUMOR |
| | NECROSIS FACTOR RECEPTOR SUPERFAMILY, MEMBER 14) |
| | HUMAN GENE ONTOLOGY |
| | FUNCTION |
| | O-glucosyl hydrolase |
| | antimicrobial response protein > lysozyme |
| | GO molecular function > apoptosis inhibitor |
| | glycosaminoglycan binding > hyaluronic acid binding |
| | molecular_function unknown > lymphocyte antigen |
| | sugar binding > lectin |
| | LOCATION |
| | plasma membrane > integral plasma membrane protein |
| | cell > membrane fraction |
| | cell > plasma membrane |
| | GO cellular component > extracellular |
| | integral plasma membrane protein > integral plasma membrane proteoglycan |
| | HUMAN PROTEIN DOMAINS (INTERPRO SIGNATURES) |
| | IPR001368 (sp Q92956 Q92956 HUMAN) |
| | IPR001368 (TNFR NGFR 2 2) |
| | IPR001368 (TNFR c6) |
| | IPR001368 (TNFR) |
| | IPR001368 (TNFR NGFR 1) |
| hP07-078.1 | HUMAN PANTHER CLASSIFICATIONS |
| | FAMILY (SUBFAMILY) |
| | TUMOR NECROSIS FACTOR RECEPTOR SUPERFAMILY (TUMOR |
| | NECROSIS FACTOR RECEPTOR SUPERFAMILY, MEMBER 14) |
| | HUMAN GENE ONTOLOGY |
| | FUNCTION |
| | O-glucosyl hydrolase |
| | antimicrobial response protein > lysozyme |
| | GO molecular function > apoptosis inhibitor |
| | glycosaminoglycan binding > hyaluronic acid binding |
| | molecular_function unknown > lymphocyte antigen |
| | sugar binding > lectin |
| | LOCATION |
| | plasma membrane > integral plasma membrane protein |
| | cell > membrane fraction |
| | cell > plasma membrane |
| | integral plasma membrane protein > integral plasma membrane proteoglycan |
| | GO cellular component > extracellular |
| | HUMAN PROTEIN DOMAINS (INTERPRO SIGNATURES) |
| | IPR001368 (sp Q92956 Q92956 HUMAN) |
| | IPR001368 (TNFR NGFR 2 2) |
| | IPR001368 (TNFR c6) |
| | IPR001368 (TNFR) |
| | IPR001368 (TNFR NGFR 1) |
| hP07-078.2 | HUMAN PANTHER CLASSIFICATIONS |
| | FAMILY (SUBFAMILY) |
| | TUMOR NECROSIS FACTOR RECEPTOR SUPERFAMILY(TUMOR |
| | NECROSIS FACTOR RECEPTOR SUPERFAMILY, MEMBER 14) |
| | HUMAN GENE ONTOLOGY |
| | FUNCTION |
| | O-glucosyl hydrolase |
| | antimicrobial response protein > lysozyme |
| | GO molecular function > apoptosis inhibitor |
| | glycosaminoglycan binding > hyaluronic acid binding |
| | molecular_function unknown > lymphocyte antigen |
| | sugar binding > lectin |
| | LOCATION |
| | plasma membrane > integral plasma membrane protein |
| | cell > membrane fraction |
| | cell > plasma membrane |
| | integral plasma membrane protein > integral plasma membrane proteoglycan |
| | GO cellular component > extracellular |
| | HUMAN PROTEIN DOMAINS (INTERPRO SIGNATURES) |
| | IPR001368 (sp Q92956 Q92956 HUMAN) |
| | IPR001368 (TNFR NGFR2 2) |
| | IPR001368 (TNFR c6) |
| | IPR001368 (TNFR) |
| | IPR001368 (TNFR NGFR 1) |
| hP07-079 | HUMAN PANTHER CLASSIFICATIONS |
| | No Panther Hit |
| | HUMAN GENE ONTOLOGY |
| | FUNCTION |
| | enzyme > UDP-glucose 6-dehydrogenase |
| | LOCATION |
| | mitochondrion > mitochondrial matrix |
| | cell > cytoplasm |
| | HUMAN PROTEIN DOMAINS (INTERPRO SIGNATURES) |
| | IPR003329 (Cytidylyl trans) |
| | IPR000794 (B KETOACYL SYNTHASE) |
| hP07-080 | HUMAN PANTHER CLASSIFICATIONS |
| | FAMILY (SUBFAMILY) |
| | COILED-COIL INTERMEDIATE FILAMENT FAMILY PROTEIN |
| | HUMAN GENE ONTOLOGY |
| | PROCESS |
| | organelle organization and biogenesis > cytoskeleton organization and biogenesis |
| | cell motility > muscle contraction |
| | muscle development > myogenesis |
| | cell growth and maintenance > cell shape and cell size control |
| | cell shape and cell size control > cell shape control |
| | FUNCTION |
| | RNA polymerase II transcription factor > enhancer binding |
| | LOCATION |
| | cytoskeleton > intermediate filament |
| | intermediate filament > neurofilament |
| | cytoplasm > cytoskeleton |
| | HUMAN PROTEIN DOMAINS (INTERPRO SIGNATURES) |
| | IPR001664 (filament) |
| hP07-081 | HUMAN PANTHER CLASSIFICATIONS |
| | FAMILY (SUBFAMILY) |
| | CD36 ANTIGEN-RELATED(PLATELET GLYCOPROTEIN IV) |
| | MOLECULAR FUNCTIONS |
| | RECEPTOR > OTHER RECEPTOR |
| | BIOLOGICAL PROCESS |
| | LIPID, FATTY ACID AND STEROID METABOLISM > LIPID AND FATTY |
| | ACID TRANSPORT |
| | SIGNAL TRANSDUCTION |
| | IMMUNITY AND DEFENSE > MACROPHAGE-MEDIATED IMMUNITY |
| | APOPTOSIS > OTHER APOPTOSIS |
| | CELL STRUCTURE AND MOTILITY > CELL STRUCTURE |
| | HUMAN GENE ONTOLOGY |
| | PROCESS |
| | steroid metabolism > cholesterol metabolism |
| | cell communication > cell adhesion |
| | lipid metabolism > fatty acid metabolism |
| | nucleotide metabolism > lipid metabolism |
| | FUNCTION |
| | GO molecular function > cell adhesion |
| | mannosidase > beta-mannosidase |
| | LOCATION |
| | cell > plasma membrane |
| | cell > membrane fraction |
| | plasma membrane > integral plasma membrane protein |
| | lysosome > lysosomal membrane |
| | endoplasmic reticulum > endoplasmic reticulum lumen |
| | HUMAN PROTEIN DOMAINS (INTERPRO SIGNATURES) |
| | IPR002159 (CD36) |
| hP07-082 | HUMAN PANTHER CLASSIFICATIONS |
| | No Panther Hit |
| | HUMAN GENE ONTOLOGY |
| | No Gene Ontology |
| | HUMAN PROTEIN DOMAINS (INTERPRO SIGNATURES) |
| | IPR000063 (THIOREDOXIN 2) |
| | IPR001687 (ATP GTP A) |
| hP07-083 | HUMAN PANTHER CLASSIFICATIONS |
| | FAMILY (SUBFAMILY) |
| | HEPARIN-BINDING GROWTH FACTOR FAMILY |
| | MEMBER/FGF(FIBROBLAST GROWTH FACTOR-RELATED) |
| | MOLECULAR FUNCTIONS |
| | SIGNALING MOLECULE > GROWTH FACTOR |
| | BIOLOGICAL PROCESS |
| | SIGNAL TRANSDUCTION > INTRACELLULAR SIGNALING CASCADE > MAPKKK |
| | CASCADE |
| | SIGNAL TRANSDUCTION > CELL COMMUNICATION > LIGAND- |
| | MEDIATED SIGNALING |
| | SIGNAL TRANSDUCTION > CELL SURFACE RECEPTOR MEDIATED |
| | SIGNAL TRANSDUCTION > RECEPTOR PROTEIN TYROSINE KINASE SIGNALING |
| | PATHWAY |
| | ONCOGENESIS > ONCOGENE |
| | CELL STRUCTURE AND MOTILITY > CELL MOTILITY |
| | HUMAN GENE ONTOLOGY |
| | PROCESS |
| | cell communication > signal transduction |
| | cell communication > cell-cell signaling |
| | embryogenesis and morphogenesis > gastrulation |
| | cell proliferation > positive control of cell proliferation |
| | ectoderm development > neurogenesis |
| | FUNCTION |
| | GO molecular function > cell cycle regulator |
| | LOCATION |
| | extracellular > extracellular space |
| | GO cellular component > extracellular |
| | cell > cytoplasm |
| | cell > nucleus |
| | cell > soluble fraction |
| | HUMAN PROTEIN DOMAINS (INTERPRO SIGNATURES) |
| | IPR002209 (sp P37237 FGF8 MOUSE) |
| | IPR002209 (FGF) |
| | IPR002348 (IL1HBGF) |
| | IPR002209 (FGF) |
| | IPR002209 (HBGF FGF) |
| hP07-084 | HUMAN PANTHER CLASSIFICATIONS |
| | FAMILY (SUBFAMILY) |
| | GALACTOSYLTRANSFERASE-RELATED |
| | HUMAN GENE ONTOLOGY |
| | PROCESS |
| | transport > ion transport |
| | neurogenesis > central nervous system development |
| | transcription, DNA-dependent > transcription regulation |
| | protein modification > protein phosphorylation |
| | cell death > apoptosis |
| | FUNCTION |
| | glucosidase > mannosyl-oligosaccharide glucosidase (processing A-glucosidase I) |
| | enzyme > nitric oxide synthase |
| | GO molecular function > cell cycle regulator |
| | enzyme > protein kinase |
| | nucleotide binding > ATP binding |
| | LOCATION |
| | cell > plasma membrane |
| | GO cellular component > extracellular |
| | Golgi apparatus > Golgi lumen |
| | mitochondrial membrane > mitochondrial inner membrane |
| | extracellular > extracellular space |
| | HUMAN PROTEIN DOMAINS (INTERPRO SIGNATURES) |
| | No Domain Hit |
| hP07-085 | HUMAN PANTHER CLASSIFICATIONS |
| | FAMILY (SUBFAMILY) |
| | LIM DOMAIN PROTEIN-RELATED (PINCH) |
| | MOLECULAR FUNCTIONS |
| | CELL ADHESION MOLECULE > OTHER CELL ADHESION MOLECULE |
| | BIOLOGICAL PROCESS |
| | SIGNAL TRANSDUCTION |
| | CELL ADHESION |
| | HUMAN GENE ONTOLOGY |
| | PROCESS |
| | ageing > cell ageing |
| | transcription > transcription, DNA-dependent |
| | cell communication > cell adhesion |
| | embryogenesis and morphogenesis > histogenesis and organogenesis |
| | FUNCTION |
| | DNA binding > transcription factor |
| | GO molecular function > cell adhesion |
| | nucleic acid binding > DNA binding |
| | nucleotide binding > ATP binding |
| | enzyme > protein kinase |
| | LOCATION |
| | cell > nucleus |
| | cell > cytoplasm |
| | cell-substrate adherens junction > focal adhesion |
| | nuclear membrane > nuclear membrane lumen |
| | microtubule cytoskeleton > microtubule associated protein |
| | HUMAN PROTEIN DOMAINS (INTERPRO SIGNATURES) |
| | IPR001781 (sp P48059 PINC HUMAN) |
| | IPR001781 (LIM DOMAIN 2 5) |
| | IPR001472 (NLS BP) |
| | IPR001781 (LIM) |
| | IPR001781 (LIM) |
| | IPR001781 (LIM DOMAIN 1) |
| | IPR000345 (CYTOCHROME C) |
| hP07-085.1 | HUMAN PANTHER CLASSIFICATIONS |
| | FAMILY (SUBFAMILY) |
| | LIM DOMAIN PROTEIN-RELATED(PINCH) |
| | MOLECULAR FUNCTIONS |
| | CELL ADHESION MOLECULE > OTHER CELL ADHESION MOLECULE |
| | BIOLOGICAL PROCESS |
| | SIGNAL TRANSDUCTION |
| | CELL ADHESION |
| | HUMAN GENE ONTOLOGY |
| | PROCESS |
| | ageing > cell ageing |
| | transcription > transcription, DNA-dependent |
| | cell communication > cell adhesion |
| | embryogenesis and morphogenesis > histogenesis and organogenesis |
| | FUNCTION |
| | DNA binding > transcription factor |
| | GO molecular function > cell adhesion |
| | nucleic acid binding > DNA binding |
| | nucleotide binding > ATP binding |
| | enzyme > protein kinase |
| | LOCATION |
| | cell > nucleus |
| | cell > cytoplasm |
| | cell-substrate adherens junction > focal adhesion |
| | nuclear membrane > nuclear membrane lumen |
| | nucleoplasm > transcription factor complex |
| | HUMAN PROTEIN DOMAINS (INTERPRO SIGNATURES) |
| | IPR001781 (sp P48059 PINC HUMAN) |
| | IPR001781 (LIM DOMAIN 2 5) |
| | IPR001472 (NLS BP) |
| | IPR001781 (LIM) |
| | IPR001781 (LIM) |
| | IPR001781 (LIM DOMAIN 1) |
| | IPR000345 (CYTOCHROME C) |
| hP07-086 | HUMAN PANTHER CLASSIFICATIONS |
| | No Panther Hit |
| | HUMAN GENE ONTOLOGY |
| | PROCESS |
| | neurogenesis > central nervous system development |
| | FUNCTION |
| | enzyme > nitric oxide synthase |
| | HUMAN PROTEIN DOMAINS (INTERPRO SIGNATURES) |
| | No Domain Hit |
| hP07-087 | HUMAN PANTHER CLASSIFICATIONS |
| | FAMILY (SUBFAMILY) |
| | N-ACETYLGLUCOSAMINYLTRANSFERASE-RELATED |
| | HUMAN GENE ONTOLOGY |
| | PROCESS |
| | biosynthesis > glucosylceramide biosynthesis |
| | glucosylceramide metabolism |
| | glycosphingolipid metabolism |
| | biosynthesis > glucosylceramide biosynthesis |
| | ectoderm development > epidermal differentiation |
| | FUNCTION |
| | oligosaccharyl transferase > ceramide glucosyltransferase |
| | LOCATION |
| | extracellular > extracellular space |
| | cell > membrane fraction |
| | cell > cytoplasm |
| | HUMAN PROTEIN DOMAINS (INTERPRO SIGNATURES) |
| | IPR001173 (Glycos transf 2) |
| hP07-087.1 | HUMAN PANTHER CLASSIFICATIONS |
| | FAMILY (SUBFAMILY) |
| | N-ACETYLGLUCOSAMINYLTRANSFERASE-RELATED |
| | HUMAN GENE ONTOLOGY |
| | PROCESS |
| | biosynthesis > glucosylceramide biosynthesis |
| | glucosylceramide metabolism |
| | glycosphingolipid metabolism |
| | biosynthesis > glucosylceramide biosynthesis |
| | ectoderm development > epidermal differentiation |
| | FUNCTION |
| | oligosaccharyl transferase > ceramide glucosyltransferase |
| | LOCATION |
| | extracellular > extracellular space |
| | cell > membrane fraction |
| | cell > cytoplasm |
| | HUMAN PROTEIN DOMAINS (INTERPRO SIGNATURES) |
| | IPR001173 (GLYC TRANS) |
| | IPR001173 (Glycos transf 2) |
| hP07-088 | HUMAN PANTHER CLASSIFICATIONS |
| | FAMILY (SUBFAMILY) |
| | BASIC HELIX-LOOP-HELIX/PAS TRANSCRIPTION FACTOR(NEURONAL |
| | PAS DOMAIN PROTEIN 2) |
| | MOLECULAR FUNCTIONS |
| | TRANSCRIPTION FACTOR > BASIC HELIX-LOOP-HELIX |
| | TRANSCRIPTION FACTOR |
| | BIOLOGICAL PROCESS |
| | NUCLEOSIDE, NUCLEOTIDE AND NUCLEIC ACID METABOLISM > MRNA |
| | TRANSCRIPTION > MRNA TRANSCRIPTION REGULATION |
| | DEVELOPMENTAL PROCESSES > ECTODERM DEVELOPMENT > NEUROGENESIS |
| | HUMAN GENE ONTOLOGY |
| | PROCESS |
| | cell communication > signal transduction |
| | transcription, DNA-dependent > transcription regulation |
| | rhythmic behavior > circadian rhythm |
| | transcription regulation > transcription regulation from Pol II promoter |
| | neurogenesis > central nervous system development |
| | FUNCTION |
| | DNA binding > transcription factor |
| | nucleic acid binding > DNA binding |
| | RNA polymerase II transcription factor > enhancer binding |
| | ligand binding or carrier > steroid binding |
| | transcription factor > transcription activating factor |
| | LOCATION |
| | cell > nucleus |
| | HUMAN PROTEIN DOMAINS (INTERPRO SIGNATURES) |
| | IPR001092 (HELIX LOOP HELIX 2) |
| | IPR001610 (PAC) |
| | IPR003015 (HELIX LOOP HELIX) |
| | IPR000014 (PAS REPEAT) |
| | NULL (GLN RICH) |
| | IPR001610 (PAC) |
| | IPR001092 (HLH) |
| | IPR000014 (PAS) |
| | IPR001067 (NCTRNSLOCATR) |
| | IPR000014 (PAS) |
| | IPR001092 (HLH) |
| hP07-089 | HUMAN PANTHER CLASSIFICATIONS |
| | FAMILY (SUBFAMILY) |
| | REGULATORY PROTEIN SIR2-RELATED(REGULATORY PROTEIN SIR2- |
| | RELATED) |
| | MOLECULAR FUNCTIONS |
| | TRANSCRIPTION FACTOR > OTHER TRANSCRIPTION FACTOR |
| | BIOLOGICAL PROCESS |
| | NUCLEOSIDE, NUCLEOTIDE AND NUCLEIC ACID METABOLISM > MRNA |
| | TRANSCRIPTION > MRNA TRANSCRIPTION REGULATION |
| | HUMAN GENE ONTOLOGY |
| | PROCESS |
| | chromatin modelling > chromatin silencing |
| | protein modification > protein ADP-ribosylation |
| | transcription, DNA-dependent > transcription regulation |
| | protein metabolism and modification > protein modification |
| | chromatin silencing > maintenance of chromatin silencing |
| | FUNCTION |
| | enzyme > NAD(+) ADP-ribosyltransferase |
| | nucleic acid binding > DNA binding |
| | LOCATION |
| | nuclear membrane > nuclear membrane lumen |
| | cell > nucleus |
| | nucleus > chromatin silencing complex |
| | cell > cytoplasm |
| | chromosome > telomere |
| | HUMAN PROTEIN DOMAINS (INTERPRO SIGNATURES) |
| | IPR003000 (SIR2) |
| | IPR003000 (SIR2) |
| hP07-090 | HUMAN PANTHER CLASSIFICATIONS |
| | No Panther Hit |
| | HUMAN GENE ONTOLOGY |
| | LOCATION |
| | nuclear membrane > nuclear membrane lumen |
| | HUMAN PROTEIN DOMAINS (INTERPRO SIGNATURES) |
| | IPR001394 (UCH 2 3) |
| hP07-091 | HUMAN PANTHER CLASSIFICATIONS |
| | No Panther Hit |
| | HUMAN GENE ONTOLOGY |
| | No Gene Ontology |
| | HUMAN PROTEIN DOMAINS (INTERPRO SIGNATURES) |
| | No Domain Hit |
| hP07-092 | HUMAN PANTHER CLASSIFICATIONS |
| | FAMILY (SUBFAMILY) |
| | HEPARIN-BINDING GROWTH FACTOR FAMILY |
| | MEMBER/FGF(FIBROBLAST GROWTH FACTOR-4) |
| | MOLECULAR FUNCTIONS |
| | SIGNALING MOLECULE > GROWTH FACTOR |
| | BIOLOGICAL PROCESS |
| | SIGNAL TRANSDUCTION > INTRACELLULAR SIGNALING CASCADE > MAPKKK |
| | CASCADE |
| | SIGNAL TRANSDUCTION > CELL COMMUNICATION > LIGAND- |
| | MEDIATED SIGNALING |
| | SIGNAL TRANSDUCTION > CELL SURFACE RECEPTOR MEDIATED |
| | SIGNAL TRANSDUCTION > RECEPTOR PROTEIN TYROSINE KINASE SIGNALING |
| | PATHWAY |
| | ONCOGENESIS > ONCOGENE |
| | DEVELOPMENTAL PROCESSES > ECTODERM DEVELOPMENT > NEUROGENESIS |
| | HUMAN GENE ONTOLOGY |
| | PROCESS |
| | cell communication > signal transduction |
| | cell communication > cell-cell signaling |
| | cell proliferation > positive control of cell proliferation |
| | MAPKKK cascade > activation of MAPK |
| | embryogenesis and morphogenesis > histogenesis and organogenesis |
| | FUNCTION |
| | GO molecular function > cell cycle regulator |
| | glycosaminoglycan binding > heparin binding |
| | cytokine > fibroblast growth factor receptor ligand |
| | LOCATION |
| | extracellular > extracellular space |
| | GO cellular component > extracellular |
| | cell > cytoplasm |
| | cell > nucleus |
| | cell > soluble fraction |
| | HUMAN PROTEIN DOMAINS (INTERPRO SIGNATURES) |
| | IPR002209 (sp P08620 FGF4 HUMAN) |
| | IPR002209 (FGF) |
| | IPR002348 (IL1HBGF) |
| | IPR002209 (HBGFFGF) |
| | IPR002209 (FGF) |
| | IPR002209 (HBGF FGF) |
| | IPR001064 (CRYSTALLIN BETAGAMMA) |
| | IPR001687 (ATP GTP A) |
| hP07-093 | HUMAN PANTHER CLASSIFICATIONS |
| | FAMILY (SUBFAMILY) |
| | HEPARIN-BINDING GROWTH FACTOR FAMILY |
| | MEMBER/FGF(FIBROBLAST GROWTH FACTOR-3) |
| | MOLECULAR FUNCTIONS |
| | SIGNALING MOLECULE > GROWTH FACTOR |
| | BIOLOGICAL PROCESS |
| | SIGNAL TRANSDUCTION > INTRACELLULAR SIGNALING CASCADE > MAPKKK |
| | CASCADE |
| | SIGNAL TRANSDUCTION > CELL COMMUNICATION > LIGAND- |
| | MEDIATED SIGNALING |
| | SIGNAL TRANSDUCTION > CELL SURFACE RECEPTOR MEDIATED |
| | SIGNAL TRANSDUCTION > RECEPTOR PROTEIN TYROSINE KINASE SIGNALING |
| | PATHWAY |
| | ONCOGENESIS > ONCOGENE |
| | HUMAN GENE ONTOLOGY |
| | PROCESS |
| | cell communication > signal transduction |
| | cell communication > cell-cell signaling |
| | embryogenesis and morphogenesis > histogenesis and organogenesis |
| | ectoderm development > neurogenesis |
| | cell proliferation > positive control of cell proliferation |
| | FUNCTION |
| | GO molecular function > cell cycle regulator |
| | glycosaminoglycan binding > heparin binding |
| | cytokine > fibroblast growth factor receptor ligand |
| | sugar binding > chitin binding |
| | LOCATION |
| | extracellular > extracellular space |
| | GO cellular component > extracellular |
| | cell > cytoplasm |
| | cell > nucleus |
| | cell > soluble fraction |
| | HUMAN PROTEIN DOMAINS (INTERPRO SIGNATURES) |
| | IPR002209 (sp P11487 FGF3 HUMAN) |
| | IPR002209 (FGF) |
| | IPR002348 (IL1HBGF) |
| | IPR002209 (HBGFFGF) |
| | IPR002209 (FGF) |
| | IPR002209 (HBGF FGF) |
| hP07-094 | HUMAN PANTHER CLASSIFICATIONS |
| | No Panther Hit |
| | HUMAN GENE ONTOLOGY |
| | PROCESS |
| | neurogenesis > central nervous system development |
| | transcription from Pol I promoter > transcription termination from Pol I promoter |
| | transcription, DNA-dependent > transcription regulation |
| | DNA dependent DNA replication > DNA topological change |
| | microtubule-based process |
| | nuclear congression |
| | peptidoglycan catabolism > microtubule-based movement |
| | FUNCTION |
| | enzyme > nitric oxide synthase |
| | cell cycle regulator > cyclin |
| | GO molecular function > cell cycle regulator |
| | nucleotide binding > ATP binding |
| | nucleic acid binding > DNA binding |
| | LOCATION |
| | GO cellular component > extracellular |
| | cell > plasma membrane |
| | mitochondrial membrane > mitochondrial inner membrane |
| | cell > nucleus |
| | nuclear membrane > nuclear membrane lumen |
| | HUMAN PROTEIN DOMAINS (INTERPRO SIGNATURES) |
| | IPR001005 (MYB 3) |
| | IPR001005 (myb DNA-binding) |
| | IPR001005 (SANT) |
| hP07-094.1 | HUMAN PANTHER CLASSIFICATIONS |
| | No Panther Hit |
| | HUMAN GENE ONTOLOGY |
| | PROCESS |
| | neurogenesis > central nervous system development |
| | transcription from Pol I promoter > transcription termination from Pol I promoter |
| | transcription, DNA-dependent > transcription regulation |
| | DNA dependent DNA replication > DNA topological change |
| | microtubule-based process |
| | nuclear congression |
| | peptidoglycan catabolism > microtubule-based movement |
| | FUNCTION |
| | enzyme > nitric oxide synthase |
| | cell cycle regulator > cyclin |
| | GO molecular function > cell cycle regulator |
| | nucleotide binding > ATP binding |
| | nucleic acid binding > DNA binding |
| | LOCATION |
| | cell > plasma membrane |
| | GO cellular component > extracellular |
| | mitochondrial membrane > mitochondrial inner membrane |
| | cell > nucleus |
| | nuclear membrane > nuclear membrane lumen |
| | HUMAN PROTEIN DOMAINS (INTERPRO SIGNATURES) |
| | IPR001005 (MYB 3) |
| | IPR001472 (NLS BP 2) |
| | IPR001005 (myb DNA-binding) |
| | IPR001005 (SANT) |
| hP07-095 | HUMAN PANTHER CLASSIFICATIONS |
| | FAMILY (SUBFAMILY) |
| | RIBONUCLEOPROTEIN (gb def: putative protein [arabidopsis thaliana]) |
| | MOLECULAR FUNCTIONS |
| | MOLECULAR FUNCTION UNCLASSIFIED |
| | BIOLOGICAL PROCESS |
| | BIOLOGICAL PROCESS UNCLASSIFIED |
| | HUMAN GENE ONTOLOGY |
| | PROCESS |
| | transcription, DNA-dependent > RNA splicing |
| | transcription from Pol II promoter |
| | peptidoglycan catabolism > mRNA editing |
| | ectoderm development > neurogenesis |
| | transcription, DNA-dependent > RNA splicing |
| | RNA processing > pre-mRNA processing |
| | FUNCTION |
| | nucleic acid binding > RNA binding |
| | single-stranded RNA binding > poly(A) binding |
| | DNA binding > transcription factor |
| | nucleic acid binding > ribonucleoprotein |
| | ribonucleoprotein > heterogeneous nuclear ribonucleoprotein |
| | LOCATION |
| | cell > nucleus |
| | cell > cytoplasm |
| | HUMAN PROTEIN DOMAINS (INTERPRO SIGNATURES) |
| | IPR000504 (RRM) |
| | IPR000504 (rrm) |
| | IPR000504 (RRM) |
| | IPR000504 (RRM RNP 1) |
| hP07-095.1 | HUMAN PANTHER CLASSIFICATIONS |
| | FAMILY (SUBFAMILY) |
| | RIBONUCLEOPROTEIN |
| | HUMAN GENE ONTOLOGY |
| | PROCESS |
| | transcription from Pol II promoter |
| | peptidoglycan catabolism > mRNA editing |
| | transcription, DNA-dependent > RNA splicing |
| | transcription, DNA-dependent > RNA splicing |
| | transcription from Pol II promoter |
| | peptidoglycan catabolism > mRNA editing |
| | cell death > apoptosis |
| | FUNCTION |
| | nucleic acid binding > RNA binding |
| | GO molecular function > nucleic acid binding |
| | single-stranded RNA binding > poly(A) binding |
| | DNA binding > transcription factor |
| | ribonucleoprotein > heterogeneous nuclear ribonucleoprotein |
| | LOCATION |
| | cell > nucleus |
| | cell > cytoplasm |
| | nuclear membrane > nuclear membrane lumen |
| | cytoplasm > lysosome |
| | HUMAN PROTEIN DOMAINS (INTERPRO SIGNATURES) |
| | NULL (ALA RICH) |
| | IPR000504 (RRM 3) |
| | IPR001472 (NLS BP) |
| | IPR000504 (rrm) |
| | IPR000504 (RRM) |
| | IPR000504 (RRM RNP 1) |
| hP07-096 | HUMAN PANTHER CLASSIFICATIONS |
| | No Panther Hit |
| | HUMAN GENE ONTOLOGY |
| | PROCESS |
| | drug transport > multidrug transport |
| | FUNCTION |
| | enzyme > N-acetylglucosaminylphosphatidylinositol deacetylase |
| | LOCATION |
| | plasma membrane > integral plasma membrane protein |
| | mitochondrial membrane > mitochondrial inner membrane |
| | HUMAN PROTEIN DOMAINS (INTERPRO SIGNATURES) |
| | IPR003864 (DUF221) |
| hP07-097 | HUMAN PANTHER CLASSIFICATIONS |
| | FAMILY (SUBFAMILY) |
| | PAIRED BOX PROTEIN(HOMEOBOX PROTEIN ARISTALESS-RELATED) |
| | MOLECULAR FUNCTIONS |
| | TRANSCRIPTION FACTOR > HOMEOTIC TRANSCRIPTION FACTOR |
| | BIOLOGICAL PROCESS |
| | NUCLEOSIDE, NUCLEOTIDE AND NUCLEIC ACID METABOLISM > MRNA |
| | TRANSCRIPTION > MRNA TRANSCRIPTION REGULATION |
| | DEVELOPMENTAL PROCESSES > ECTODERM DEVELOPMENT > NEUROGENESIS |
| | HUMAN GENE ONTOLOGY |
| | PROCESS |
| | transcription, DNA-dependent > transcription regulation |
| | eye-antennal disc metamorphosis > eye morphogenesis |
| | GO biological process > developmental processes |
| | neurogenesis > central nervous system development |
| | transcription, DNA-dependent > transcription from Pol II promoter |
| | FUNCTION |
| | DNA binding > transcription factor |
| | nucleic acid binding > DNA binding |
| | transcription factor > transcription activating factor |
| | transcription factor > RNA polymerase II transcription factor |
| | LOCATION |
| | cell > nucleus |
| | nucleoplasm > transcription factor complex |
| | nuclear membrane > nuclear membrane lumen |
| | GO cellular component > extracellular |
| | cell > cytoplasm |
| | HUMAN PROTEIN DOMAINS (INTERPRO SIGNATURES) |
| | NULL (GLY RICH) |
| | NULL (ALA RICH) |
| | IPR001356 (HOMEOBOX 2) |
| | IPR001356 (homeobox) |
| | IPR001356 (HOMEOBOX) |
| | IPR000104 (ANTIFREEZEI) |
| | IPR000047 (HTHREPRESSR) |
| | IPR001356 (HOX) |
| | IPR001356 (HOMEOBOX 1) |
| hP07-098 | HUMAN PANTHER CLASSIFICATIONS |
| | FAMILY (SUBFAMILY) |
| | ETS DOMAIN PROTEIN(ETS-DOMAIN PROTEIN ELK-3) |
| | MOLECULAR FUNCTIONS |
| | TRANSCRIPTION FACTOR > OTHER TRANSCRIPTION FACTOR |
| | BIOLOGICAL PROCESS |
| | NUCLEOSIDE, NUCLEOTIDE AND NUCLEIC ACID METABOLISM > MRNA |
| | TRANSCRIPTION > MRNA TRANSCRIPTION INITIATION > MRNA |
| | TRANSCRIPTION REGULATION |
| | SIGNAL TRANSDUCTION > INTRACELLULAR SIGNALING CASCADE > MAPKKK |
| | CASCADE |
| | ONCOGENESIS > ONCOGENE |
| | DEVELOPMENTAL PROCESSES > OTHER DEVELOPMENTAL PROCESS |
| | HUMAN GENE ONTOLOGY |
| | PROCESS |
| | transcription, DNA-dependent > transcription regulation |
| | transcription, DNA-dependent > transcription from Pol II promoter |
| | transcription regulation > transcription regulation from Pol II promoter |
| | cell communication > signal transduction |
| | GO biological process > developmental processes |
| | FUNCTION |
| | DNA binding > transcription factor |
| | nucleic acid binding > DNA binding |
| | GO molecular function > cell cycle regulator |
| | transcription factor > RNA polymerase II transcription factor |
| | transcription factor > transcription activating factor |
| | LOCATION |
| | cell > nucleus |
| | GO cellular component > intracellular |
| | nuclear membrane > nuclear membrane lumen |
| | HUMAN PROTEIN DOMAINS (INTERPRO SIGNATURES) |
| | NULL (SER RICH) |
| | IPR002341 (HSF ETS) |
| | IPR000418 (ETS DOMAIN 3) |
| | IPR000418 (Ets) |
| | IPR000418 (ETSDOMAIN) |
| | IPR000418 (ETS) |
| | IPR000418 (ETS DOMAIN 1) |
| | IPR000418 (ETS DOMAIN 2) |
| hP07-099 | HUMAN PANTHER CLASSIFICATIONS |
| | No Panther Hit |
| | HUMAN GENE ONTOLOGY |
| | PROCESS |
| | stress response > defence response |
| | neurogenesis > central nervous system development |
| | transcription, DNA-dependent > transcription regulation |
| | microtubule-based process |
| | nuclear congression |
| | peptidoglycan catabolism > microtubule-based movement |
| | protein modification > protein phosphorylation |
| | FUNCTION |
| | enzyme > nitric oxide synthase |
| | metallocarboxypeptidase > carboxypeptidase A |
| | GO molecular function > cell cycle regulator |
| | nucleotide binding > ATP binding |
| | nucleic acid binding > DNA binding |
| | LOCATION |
| | nuclear membrane > nuclear membrane lumen |
| | GO cellular component > extracellular |
| | mitochondrial membrane > mitochondrial inner membrane |
| | cell > nucleus |
| | extracellular > extracellular space |
| | HUMAN PROTEIN DOMAINS (INTERPRO SIGNATURES) |
| | No Domain Hit |
| hP07-100 | HUMAN PANTHER CLASSIFICATIONS |
| | FAMILY (SUBFAMILY) |
| | DIPHTHINE SYNTHASE(DIPHTHINE SYNTHASE) |
| | MOLECULAR FUNCTIONS |
| | SYNTHASE AND SYNTHETASE > SYNTHASE |
| | TRANSFERASE > METHYLTRANSFERASE |
| | BIOLOGICAL PROCESS |
| | BIOLOGICAL PROCESS UNCLASSIFIED |
| | HUMAN GENE ONTOLOGY |
| | PROCESS |
| | cell growth and maintenance > metabolism |
| | FUNCTION |
| | enzyme > diphthine synthase |
| | enzyme > methyltransferase |
| | LOCATION |
| | mitochondrion > mitochondrial matrix |
| | HUMAN PROTEIN DOMAINS (INTERPRO SIGNATURES) |
| | IPR000878 (TP methylase) |
| hP07-101 | HUMAN PANTHER CLASSIFICATIONS |
| | FAMILY (SUBFAMILY) |
| | WD DOMAIN-CONTAINING PROTEIN |
| | HUMAN GENE ONTOLOGY |
| | PROCESS |
| | cell communication > signal transduction |
| | cell surface receptor linked signal transduction > G protein linked receptor protein |
| | signaling pathway |
| | G protein linked receptor protein signaling pathway > acetyl choline receptor |
| | signaling, muscarinic pathway |
| | protein modification > protein ADP-ribosylation |
| | small GTPase mediated signal transduction > RAS protein signal transduction |
| | FUNCTION |
| | heterotrimeric G-protein GTPase > heterotrimeric G-protein GTPase, beta-subunit |
| | glucosidase > mannosyl-oligosaccharide glucosidase (processing A-glucosidase I) |
| | heterotrimeric G-protein GTPase > heterotrimeric G-protein GTPase, alpha-subunit |
| | GO molecular function > enzyme inhibitor |
| | mannosidase > beta-mannosidase |
| | LOCATION |
| | plasma membrane > peripheral plasma membrane protein |
| | cytosol > heterotrimeric G-protein complex |
| | spindle pole body > intermediate layer of spindle pole body |
| | cell > nucleus |
| | cell > cytoplasm |
| | HUMAN PROTEIN DOMAINS (INTERPRO SIGNATURES) |
| | IPR001680 (WD REPEATS 2 4) |
| | IPR001680 (WD REPEATS REGION) |
| | IPR001680 (WD40) |
| | IPR001680 (WD40) |
| hP07-102 | HUMAN PANTHER CLASSIFICATIONS |
| | FAMILY (SUBFAMILY) |
| | CALCIUM-ACTIVATED POTASSIUM CHANNEL-RELATED(CALCIUM- |
| | ACTIVATED POTASSIUM CHANNEL) |
| | MOLECULAR FUNCTIONS |
| | ION CHANNEL > VOLTAGE-GATED ION CHANNEL > VOLTAGE-GATED |
| | POTASSIUM CHANNEL |
| | BIOLOGICAL PROCESS |
| | TRANSPORT > ION TRANSPORT > CATION TRANSPORT |
| | HUMAN GENE ONTOLOGY |
| | PROCESS |
| | monovalent inorganic cation transport > potassium transport |
| | stress response > defence response |
| | cell-cell signaling > synaptic transmission |
| | ectoderm development > neurogenesis |
| | LOCATION |
| | integral plasma membrane protein > voltage-gated potassium channel |
| | cell > membrane fraction |
| | plasma membrane > integral plasma membrane protein |
| | HUMAN PROTEIN DOMAINS (INTERPRO SIGNATURES) |
| | IPR001622 (CHANNEL PORE K) |
| | IPR003091 (KCHANNEL) |
| hP07-103 | HUMAN PANTHER CLASSIFICATIONS |
| | FAMILY (SUBFAMILY) |
| | HELICASE SKI2-RELATED |
| | HUMAN GENE ONTOLOGY |
| | PROCESS |
| | heat response > heat shock response |
| | DNA metabolism |
| | mitotic S phase |
| | DNA replication and chromosome cycle |
| | peptidoglycan catabolism > DNA replication |
| | protein targeting > protein-membrane targeting |
| | protein metabolism and modification > protein folding |
| | SRP-dependent, co-translational membrane targeting > SRP-dependent, co- |
| | translational membrane targeting, translocation |
| | FUNCTION |
| | GO molecular function > chaperone |
| | chaperone > heat shock protein |
| | nucleic acid binding > DNA binding |
| | nucleic acid binding > RNA binding |
| | chaperone > cochaperone |
| | LOCATION |
| | mitochondrion > mitochondrial matrix |
| | nuclear membrane > nuclear membrane lumen |
| | cytoplasm > endoplasmic reticulum |
| | GO cellular component > extracellular |
| | cell > cytoplasm |
| | HUMAN PROTEIN DOMAINS (INTERPRO SIGNATURES) |
| | NULL (LYS RICH) |
| | IPR001623 (DNAJ 2) |
| | IPR001472 (NLS BP) |
| | IPR001623 (DnaJ) |
| | IPR003095 (DNAJPROTEIN) |
| | IPR001623 (DnaJ) |
| hP07-104 | HUMAN PANTHER CLASSIFICATIONS |
| | FAMILY (SUBFAMILY) |
| | HOMER(HOMER-3) |
| | MOLECULAR FUNCTIONS |
| | SIGNALING MOLECULE > OTHER SIGNALING MOLECULE |
| | BIOLOGICAL PROCESS |
| | SIGNAL TRANSDUCTION > INTRACELLULAR SIGNALING CASCADE > CALCIUM |
| | MEDIATED SIGNALING |
| | SIGNAL TRANSDUCTION > CELL SURFACE RECEPTOR MEDIATED |
| | SIGNAL TRANSDUCTION > G-PROTEIN MEDIATED SIGNALING |
| | NEURONAL ACTIVITIES > OTHER NEURONAL ACTIVITY |
| | HUMAN GENE ONTOLOGY |
| | PROCESS |
| | glutamate signaling pathway > metabotrophic glutamate receptor signaling pathway |
| | synaptic transmission > modulation of synapse |
| | G protein signaling, linked to IP3 second messenger (phospholipase C activating) > metabotrophic |
| | glutamate receptor, phospholipase C activating pathway |
| | cell growth and maintenance > cell shape and cell size control |
| | FUNCTION |
| | ligand binding or carrier > protein binding |
| | protein binding > actin binding |
| | LOCATION |
| | integral plasma membrane protein > integral plasma membrane proteoglycan |
| | cell-substrate adherens junction > focal adhesion |
| | HUMAN PROTEIN DOMAINS (INTERPRO SIGNATURES) |
| | IPR000697 (RANBP1 WASP) |
| | IPR001960 (WH1) |
| | IPR001960 (WH1) |
| hP07-105 | HUMAN PANTHER CLASSIFICATIONS |
| | No Panther Hit |
| | HUMAN GENE ONTOLOGY |
| | FUNCTION |
| | ligand binding or carrier > lipid binding |
| | LOCATION |
| | cell > cytoplasm |
| | Golgi apparatus > Golgi lumen |
| | HUMAN PROTEIN DOMAINS (INTERPRO SIGNATURES) |
| | IPR002913 (START) |
| | IPR002913 (START) |
| hP07-106 | HUMAN PANTHER CLASSIFICATIONS |
| | FAMILY (SUBFAMILY) |
| | EGF-LIKE DOMAIN-CONTAINING(NOTCH-RELATED) |
| | MOLECULAR FUNCTIONS |
| | RECEPTOR > OTHER RECEPTOR |
| | SIGNALING MOLECULE > MEMBRANE-BOUND SIGNALING MOLECULE |
| | BIOLOGICAL PROCESS |
| | SIGNAL TRANSDUCTION > CELL COMMUNICATION > CELL |
| | ADHESION-MEDIATED SIGNALING |
| | SIGNAL TRANSDUCTION > CELL SURFACE RECEPTOR MEDIATED |
| | SIGNAL TRANSDUCTION > OTHER RECEPTOR MEDIATED SIGNALING PATHWAY |
| | DEVELOPMENTAL PROCESSES > ECTODERM DEVELOPMENT > NEUROGENESIS |
| | CELL PROLIFERATION AND DIFFERENTIATION |
| | HUMAN GENE ONTOLOGY |
| | PROCESS |
| | ectoderm development > neurogenesis |
| | embryogenesis and morphogenesis > histogenesis and organogenesis |
| | eye morphogenesis > mystery cell fate differentiation |
| | mesoderm development > skeletal development |
| | ectoderm development > epidermal differentiation |
| | FUNCTION |
| | ligand binding or carrier > calcium binding |
| | enzyme > NAD(+) ADP-ribosyltransferase |
| | ligand binding or carrier > protein binding |
| | GO molecular function > cell adhesion |
| | GO molecular function > ligand binding or carrier |
| | LOCATION |
| | cell > membrane fraction |
| | plasma membrane > integral plasma membrane protein |
| | extracellular > extracellular matrix |
| | extracellular > extracellular space |
| | fibrillar collagen > collagen type III |
| | HUMAN PROTEIN DOMAINS (INTERPRO SIGNATURES) |
| | IPR000800 (NOTCH LIN REPEAT 3) |
| | IPR002110 (ank) |
| | IPR001438 (EGFBLOOD) |
| | IPR002049 (EGFLAMININ) |
| | IPR000800 (NOTCH) |
| | IPR001881 (EGF CA) |
| | IPR000561 (EGF) |
| | IPR000800 (NL) |
| | IPR002110 (ANK) |
| | IPR000152 (ASX HYDROXYL) |
| | IPR000561 (EGF 2) |
| | IPR002110 (ANK REPEAT 4) |
| | IPR000561 (EGF 1) |
| | IPR001881 (EGF CA) |
| | IPR001687 (ATP GTP A) |
| | IPR001881 (EGF CA 2 23) |
| | IPR000742 (EGF 2 DOMAIN 20) |
| | IPR000694 (PRO RICH) |
| | NULL (CYS RICH) |
| | IPR002110 (ANK REP REGION) |
| | IPR000561 (EGF) |
| | IPR000800 (notch) |
| hP07-107 | HUMAN PANTHER CLASSIFICATIONS |
| | FAMILY (SUBFAMILY) |
| | GLYCOSYL PHOSPHORYLASE-RELATED(UNCHARACTERIZED) |
| | MOLECULAR FUNCTIONS |
| | MOLECULAR FUNCTION UNKNOWN |
| | BIOLOGICAL PROCESS |
| | BIOLOGICAL PROCESS UNKNOWN |
| | HUMAN GENE ONTOLOGY |
| | PROCESS |
| | metabolism > carbohydrate metabolism |
| | cell growth and maintenance > stress response |
| | FUNCTION |
| | trehalase > alpha-alpha-trehalase |
| | LOCATION |
| | cytoplasm > vacuole |
| | HUMAN PROTEIN DOMAINS (INTERPRO SIGNATURES) |
| | No Domain Hit |
| hP07-108 | HUMAN PANTHER CLASSIFICATIONS |
| | FAMILY (SUBFAMILY) |
| | KRUEPPEL-SUBFAMILY C2H2-TYPE ZINC-FINGER |
| | PROTEIN(ESCARGOT/SNAIL PROTEIN) |
| | MOLECULAR FUNCTIONS |
| | TRANSCRIPTION FACTOR > ZINC FINGER TRANSCRIPTION FACTOR > KRAB |
| | BOX TRANSCRIPTION FACTOR |
| | BIOLOGICAL PROCESS |
| | NUCLEOSIDE, NUCLEOTIDE AND NUCLEIC ACID METABOLISM > MRNA |
| | TRANSCRIPTION > MRNA TRANSCRIPTION REGULATION |
| | DEVELOPMENTAL PROCESSES > DETERMINATION OF |
| | DORSAL/VENTRAL AXIS |
| | HUMAN GENE ONTOLOGY |
| | PROCESS |
| | transcription, DNA-dependent > transcription regulation |
| | skeletal development > cartilage condensation |
| | ectoderm development > neurogenesis |
| | FUNCTION |
| | nucleic acid binding > DNA binding |
| | DNA binding > transcription factor |
| | LOCATION |
| | cell > nucleus |
| | HUMAN PROTEIN DOMAINS (INTERPRO SIGNATURES) |
| | No Domain Hit |
| hP07-108.1 | HUMAN PANTHER CLASSIFICATIONS |
| | No Panther Hit |
| | HUMAN GENE ONTOLOGY |
| | PROCESS |
| | transcription, DNA-dependent > transcription regulation |
| | GO biological process > developmental processes |
| | ectoderm development > neurogenesis |
| | transcription regulation from Pol II promoter > repression of transcription from Pol |
| | II promoter |
| | skeletal development > cartilage condensation |
| | FUNCTION |
| | DNA binding > transcription factor |
| | nucleic acid binding > DNA binding |
| | GO molecular function > nucleic acid binding |
| | transcription factor > transcription activating factor |
| | transcription factor > RNA polymerase II transcription factor |
| | LOCATION |
| | cell > nucleus |
| | nuclear membrane > nuclear membrane lumen |
| | nucleoplasm > transcription factor complex |
| | endoplasmic reticulum > endoplasmic reticulum membrane |
| | HUMAN PROTEIN DOMAINS (INTERPRO SIGNATURES) |
| | IPR000822 (ZINC FINGER C2H2 2 4) |
| | IPR000822 (zf-C2H2) |
| | IPR000822 (ZnF C2H2) |
| | IPR000822 (ZINC FINGER C2H2 1) |
| hP07-109 | HUMAN PANTHER CLASSIFICATIONS |
| | FAMILY (SUBFAMILY) |
| | BETA-1,4-GALACTOSYLTRANSFERASE-RELATED(BETA-1,4- |
| | GALACTOSYLTRANSFERASE-RELATED) |
| | MOLECULAR FUNCTIONS |
| | TRANSFERASE > GLYCOSYLTRANSFERASE |
| | BIOLOGICAL PROCESS |
| | PROTEIN METABOLISM AND MODIFICATION > PROTEIN |
| | MODIFICATION > PROTEIN GLYCOSYLATION |
| | HUMAN GENE ONTOLOGY |
| | PROCESS |
| | biosynthesis > lactose biosynthesis |
| | lactose metabolism |
| | lipid metabolism > membrane lipid metabolism |
| | neurogenesis > central nervous system development |
| | transcription, DNA-dependent > transcription regulation |
| | carbohydrate metabolism > proteoglycan metabolism |
| | FUNCTION |
| | enzyme > galactosyltransferase |
| | galactosyltransferase > beta-N-acetylglucosaminyl-glycopeptide beta-1,4- |
| | galactosyltransferase |
| | enzyme > N-acetyllactosamine synthase |
| | enzyme > lactose synthase |
| | enzyme > nitric oxide synthase |
| | LOCATION |
| | cytoplasm > Golgi apparatus |
| | cell > membrane fraction |
| | GO cellular component > extracellular |
| | Golgi apparatus > Golgi membrane |
| | mitochondrial membrane > mitochondrial inner membrane |
| | HUMAN PROTEIN DOMAINS (INTERPRO SIGNATURES) |
| | IPR003859 (Galactosyl T 2) |
| hP07-110 | HUMAN PANTHER CLASSIFICATIONS |
| | FAMILY (SUBFAMILY) |
| | UBIQUTTIN-CONJUGATING ENZYME-RELATED(UBIQUITIN- |
| | CONJUGATING ENZYME-RELATED) |
| | MOLECULAR FUNCTIONS |
| | MOLECULAR FUNCTION UNCLASSIFIED |
| | BIOLOGICAL PROCESS |
| | PROTEIN METABOLISM AND MODIFICATION > PROTEOLYSIS |
| | CELL CYCLE > CELL CYCLE CONTROL |
| | HUMAN GENE ONTOLOGY |
| | PROCESS |
| | DNA repair > DNA repair regulation |
| | ubiquitin cycle > polyubiquitylation |
| | cell cycle > cell cycle control |
| | cell growth and maintenance > cell proliferation |
| | protein metabolism and modification > protein modification |
| | FUNCTION |
| | small protein conjugating enzyme > ubiquitin conjugating enzyme |
| | enzyme > ubiquitin-protein ligase |
| | LOCATION |
| | GO cellular component > cellular_component unknown |
| | ubiquitin ligase complex |
| | nucleus |
| | cell wall > nuclear ubiquitin ligase complex |
| | HUMAN PROTEIN DOMAINS (INTERPRO SIGNATURES) |
| | IPR000608 (UBIQUITIN CONJUGAT 2) |
| | IPR000608 (UQ con) |
| | IPR000608 (UBCc) |
| hP07-111 | HUMAN PANTHER CLASSIFICATIONS |
| | No Panther Hit |
| | HUMAN GENE ONTOLOGY |
| | PROCESS |
| | protein modification > protein phosphorylation |
| | FUNCTION |
| | protein kinase inhibitor > cAMP-dependent protein kinase inhibitor |
| | enzyme inhibitor > protein kinase inhibitor |
| | LOCATION |
| | cell > cytoplasm |
| | HUMAN PROTEIN DOMAINS (INTERPRO SIGNATURES) |
| | IPR000694 (PRO RICH) |
| hP07-111.1 | HUMAN PANTHER CLASSIFICATIONS |
| | No Panther Hit |
| | HUMAN GENE ONTOLOGY |
| | PROCESS |
| | protein modification > protein phosphorylation |
| | FUNCTION |
| | protein kinase inhibitor > cAMP-dependent protein kinase inhibitor |
| | enzyme inhibitor > protein kinase inhibitor |
| | LOCATION |
| | cell > cytoplasm |
| | HUMAN PROTEIN DOMAINS (INTERPRO SIGNATURES) |
| | No Domain Hit |
| hP07-112 | HUMAN PANTHER CLASSIFICATIONS |
| | FAMILY (SUBFAMILY) |
| | VOLTAGE-DEPENDENT POTASSIUM CHANNEL ALPHA |
| | SUBUNIT(VOLTAGE-GATED POTASSIUM CHANNEL PROTEIN KV1.5) |
| | MOLECULAR FUNCTIONS |
| | ION CHANNEL > VOLTAGE-GATED ION CHANNEL > VOLTAGE-GATED |
| | POTASSIUM CHANNEL |
| | BIOLOGICAL PROCESS |
| | TRANSPORT > ION TRANSPORT > CATION TRANSPORT |
| | HUMAN GENE ONTOLOGY |
| | PROCESS |
| | monovalent inorganic cation transport > potassium transport |
| | ion transport > cation transport |
| | transport > ion transport |
| | cell motility > muscle contraction |
| | cell-cell signaling > synaptic transmission |
| | FUNCTION |
| | nucleic acid binding > RNA binding |
| | LOCATION |
| | integral plasma membrane protein > voltage-gated potassium channel |
| | cell > membrane fraction |
| | plasma membrane > integral plasma membrane protein |
| | HUMAN PROTEIN DOMAINS (INTERPRO SIGNATURES) |
| | IPR000636 (CATION CHANNEL TM) |
| | IPR001622 (CHANNEL PORE K) |
| | IPR000636 (ion trans) |
| | IPR003131 (K tetra) |
| | IPR003091 (KCHANNEL) |
| | IPR003280 (2POREKCHANEL) |
| | IPR000210 (BTB) |
| hP07-113 | HUMAN PANTHER CLASSIFICATIONS |
| | FAMILY (SUBFAMILY) |
| | AMP DEAMINASE-RELATED(AMP DEAMINASE 1) |
| | MOLECULAR FUNCTIONS |
| | HYDROLASE > DEAMINASE |
| | BIOLOGICAL PROCESS |
| | NUCLEOSIDE, NUCLEOTIDE AND NUCLEIC ACID METABOLISM > PURINE |
| | METABOLISM |
| | MUSCLE CONTRACTION |
| | HUMAN GENE ONTOLOGY |
| | PROCESS |
| | metabolism > nucleobase, nucleoside, nucleotide and nucleic acid metabolism |
| | purine ribonucleoside monophosphate metabolism > AMP catabolism |
| | purine ribonucleoside monophosphate catabolism |
| | AMP catabolism > adenylate deaminase reaction |
| | metabolism > nucleobase, nucleoside, nucleotide and nucleic acid metabolism |
| | FUNCTION |
| | enzyme > AMP deaminase |
| | LOCATION |
| | cell > cytoplasm |
| | cell > membrane fraction |
| | HUMAN PROTEIN DOMAINS (INTERPRO SIGNATURES) |
| | IPR001365 (A deaminase) |
| | IPR001365 (A DEAMINASE) |
| hP07-114 | HUMAN PANTHER CLASSIFICATIONS |
| | FAMILY (SUBFAMILY) |
| | MYOSIN HEAVY CHAIN(MYOSIN I) |
| | MOLECULAR FUNCTIONS |
| | CYTOSKELETAL PROTEIN > ACTIN FAMILY CYTOSKELETAL PROTEIN > ACTIN |
| | BINDING MOTOR PROTEIN |
| | BIOLOGICAL PROCESS |
| | BIOLOGICAL PROCESS UNCLASSIFIED |
| | HUMAN GENE ONTOLOGY |
| | PROCESS |
| | organelle organization and biogenesis > cytoskeleton organization and biogenesis |
| | protein metabolism and modification > protein modification |
| | mesoderm development > muscle development |
| | muscle contraction > muscle contraction regulation |
| | striated muscle contraction > striated muscle contraction regulation |
| | FUNCTION |
| | GO molecular function > motor |
| | nucleotide binding > ATP binding |
| | adenosinetriphosphatase > myosin ATPase |
| | protein binding > calmodulin binding |
| | protein binding > actin binding |
| | LOCATION |
| | actin cytoskeleton > non-muscle myosin |
| | cell wall > muscle myosin |
| | thick filament |
| | actin cytoskeleton > non-muscle myosin |
| | cytoplasm > cytoskeleton |
| | non-muscle myosin |
| | thin filament |
| | cell wall > muscle myosin |
| | cytoskeleton > actin cytoskeleton |
| | HUMAN PROTEIN DOMAINS (INTERPRO SIGNATURES) |
| | IPR001609 (sp Q12965 Q12965 HUMAN) |
| | IPR001687 (ATP GTP A) |
| | IPR001452 (SH3) |
| | IPR001472 (NLS BP) |
| | IPR001452 (SH3) |
| | IPR001609 (myosin head) |
| | IPR001452 (SH3DOMAIN) |
| | IPR001609 (MYOSINHEAVY) |
| | IPR001452 (SH3) |
| | IPR001609 (MYSc) |
| hP07-115 | HUMAN PANTHER CLASSIFICATIONS |
| | FAMILY (SUBFAMILY) |
| | SERINE/THREONINE PROTEIN KINASE(SERINE/THREONINE-PROTEIN |
| | KINASE NDR) |
| | MOLECULAR FUNCTIONS |
| | KINASE > PROTEIN KINASE |
| | BIOLOGICAL PROCESS |
| | PROTEIN METABOLISM AND MODIFICATION > PROTEIN |
| | MODIFICATION > PROTEIN PHOSPHORYLATION |
| | HUMAN GENE ONTOLOGY |
| | PROCESS |
| | protein modification > protein phosphorylation |
| | cell communication > signal transduction |
| | N-terminal fatty acid:protein modification > protein myristylation |
| | cell cycle > cell cycle control |
| | FUNCTION |
| | enzyme > protein kinase |
| | nucleotide binding > ATP binding |
| | cyclic-nucleotide dependent protein kinase > cAMP-dependent protein kinase |
| | protein serine/threonine kinase > protein kinase C |
| | cyclic-nucleotide dependent protein kinase > cGMP-dependent protein kinase |
| | LOCATION |
| | cell > cytoplasm |
| | cell > nucleus |
| | plasma membrane > peripheral plasma membrane protein |
| | cell > plasma membrane |
| | cytoplasm > ribosome |
| | HUMAN PROTEIN DOMAINS (INTERPRO SIGNATURES) |
| | IPR000719 (PROTEIN KINASE DOM) |
| | IPR000719 (pkinase) |
| | IPR002290 (S TKc) |
| | IPR000961 (S TK X) |
| hP07-116 | HUMAN PANTHER CLASSIFICATIONS |
| | FAMILY (SUBFAMILY) |
| | METABOLITE TRANSPORTERS(GLYCEROL-3-PHOSPHATE |
| | TRANSPORTER-RELATED) |
| | MOLECULAR FUNCTIONS |
| | TRANSPORTER > OTHER TRANSPORTER |
| | BIOLOGICAL PROCESS |
| | CARBOHYDRATE METABOLISM |
| | TRANSPORT > CARBOHYDRATE TRANSPORT |
| | HUMAN GENE ONTOLOGY |
| | PROCESS |
| | cation transport > organic cation transport |
| | cell growth and maintenance > transport |
| | polysaccharide metabolism > glycogen metabolism |
| | monosaccharide metabolism > glucose metabolism |
| | transport > carbohydrate transport |
| | FUNCTION |
| | enzyme > glucose-6-phosphatase |
| | LOCATION |
| | plasma membrane > integral plasma membrane protein |
| | cell > membrane fraction |
| | endoplasmic reticulum > microsome |
| | cytoplasm > endoplasmic reticulum |
| | HUMAN PROTEIN DOMAINS (INTERPRO SIGNATURES) |
| | NULL (TRP RICH) |
| hP07-117 | HUMAN PANTHER CLASSIFICATIONS |
| | No Panther Hit |
| | HUMAN GENE ONTOLOGY |
| | No Gene Ontology |
| | HUMAN PROTEIN DOMAINS (INTERPRO SIGNATURES) |
| | IPR000051 (SAM BIND) |
| hP07-118 | HUMAN PANTHER CLASSIFICATIONS |
| | FAMILY (SUBFAMILY) |
| | PHOSPHOLIPASE C-RELATED (PHOSPHOLIPASE C-BETA-4) |
| | MOLECULAR FUNCTIONS |
| | HYDROLASE > LIPASE > PHOSPHOLIPASE |
| | BIOLOGICAL PROCESS |
| | LIPID, FATTY ACID AND STEROID METABOLISM > PHOSPHOLIPID |
| | METABOLISM |
| | SIGNAL TRANSDUCTION > CELL SURFACE RECEPTOR MEDIATED |
| | SIGNAL TRANSDUCTION > G-PROTEIN MEDIATED SIGNALING |
| | SENSORY PERCEPTION > VISION |
| | HUMAN GENE ONTOLOGY |
| | PROCESS |
| | lipid metabolism > membrane lipid metabolism |
| | nucleotide metabolism > lipid metabolism |
| | cell communication > signal transduction |
| | membrane lipid metabolism > phospholipid metabolism |
| | FUNCTION |
| | phospholipase A2 > phospholipase C |
| | inositol/phosphatidylinositol phosphodiesterase > 1-phosphatidylinositol-4,5- |
| | biphosphate phosphodiesterase |
| | ligand binding or carrier > calcium binding |
| | nucleotide binding > ATP binding |
| | GO molecular function > motor |
| | LOCATION |
| | cell > nucleus |
| | cell > cytoplasm |
| | mitochondrial membrane > mitochondrial outer membrane |
| | GO cellular component > cellular_component unknown |
| | actin cytoskeleton > non-muscle myosin |
| | HUMAN PROTEIN DOMAINS (INTERPRO SIGNATURES) |
| | IPR001711 (sp Q9Z0G6 Q9Z0G6 RAT) |
| | IPR000909 (PLCXc) |
| | IPR001711 (PLCYc) |
| | IPR000008 (C2) |
| | IPR001687 (ATP GTP A) |
| | IPR001711 (PIPLC Y DOMAIN) |
| | NULL (LYS RICH) |
| | IPR000008 (C2 DOMAIN 2) |
| | IPR000909 (PIPLC X DOMAIN) |
| | IPR001711 (PI-PLC-Y) |
| | IPR000909 (PI-PLC-X) |
| | IPR000008 (C2) |
| | IPR001192 (PHPHLIPASEC) |
| hP07-118.1 | HUMAN PANTHER CLASSIFICATIONS |
| | FAMILY (SUBFAMILY) |
| | PHOSPHOLIPASE C-RELATED(PHOSPHOLIPASE C-BETA-4) |
| | MOLECULAR FUNCTIONS |
| | HYDROLASE > LIPASE > PHOSPHOLIPASE |
| | BIOLOGICAL PROCESS |
| | LIPID, FATTY ACID AND STEROID METABOLISM > PHOSPHOLIPID |
| | METABOLISM |
| | SIGNAL TRANSDUCTION > CELL SURFACE RECEPTOR MEDIATED |
| | SIGNAL TRANSDUCTION > G-PROTEIN MEDIATED SIGNALING |
| | SENSORY PERCEPTION > VISION |
| | HUMAN GENE ONTOLOGY |
| | PROCESS |
| | lipid metabolism > membrane lipid metabolism |
| | nucleotide metabolism > lipid metabolism |
| | cell communication > signal transduction |
| | membrane lipid metabolism > phospholipid metabolism |
| | FUNCTION |
| | phospholipase A2 > phospholipase C |
| | inositol/phosphatidylinositol phosphodiesterase > 1-phosphatidylinositol-4,5- |
| | biphosphate phosphodiesterase |
| | ligand binding or carrier > calcium binding |
| | nucleotide binding > ATP binding |
| | GO molecular function > motor |
| | LOCATION |
| | cell > nucleus |
| | cell > cytoplasm |
| | mitochondrial membrane > mitochondrial outer membrane |
| | GO cellular component > cellular_component unknown |
| | actin cytoskeleton > non-muscle myosin |
| | HUMAN PROTEIN DOMAINS (INTERPRO SIGNATURES) |
| | IPR001711 (sp Q9Z0G6 Q9Z0G6 RAT) |
| | IPR000909 (PLCXc) |
| | IPR001711 (PLCYc) |
| | IPR000008 (C2) |
| | IPR001687 (ATP GTP A) |
| | IPR001711 (PIPLC Y DOMAIN) |
| | NULL (LYS RICH) |
| | IPR000008 (C2 DOMAIN 2) |
| | IPR000909 (PIPLC X DOMAIN) |
| | IPR001711 (PI-PLC-Y) |
| | IPR000909 (PI-PLC-X) |
| | IPR000008 (C2) |
| | IPR001192 (PHPHLIPASEC) |
| hP07-119 | HUMAN PANTHER CLASSIFICATIONS |
| | FAMILY (SUBFAMILY) |
| | CATION-TRANSPORTING ATPASE(SODIUM/POTASSIUM- |
| | TRANSPORTING ATPASE ALPHA-1 CHAIN) |
| | MOLECULAR FUNCTIONS |
| | TRANSPORTER > CATION TRANSPORTER |
| | HYDROLASE > OTHER HYDROLASE |
| | BIOLOGICAL PROCESS |
| | TRANSPORT > ION TRANSPORT > CATION TRANSPORT |
| | HUMAN GENE ONTOLOGY |
| | PROCESS |
| | monovalent inorganic cation transport > potassium transport |
| | monovalent inorganic cation transport > sodium transport |
| | monovalent inorganic cation transport > hydrogen transport |
| | ion transport > cation transport |
| | di-, tri-valent inorganic cation transport > calcium ion transport |
| | FUNCTION |
| | nucleotide binding > ATP binding |
| | obsolete |
| | adenosinetriphosphatase > plasma membrane cation-transporting ATPase |
| | enzyme > adenosinetriphosphatase |
| | calcium binding > calcium storage |
| | P-type ATPase |
| | calcium ion transporter |
| | adenosinetriphosphatase > plasma membrane cation-transporting ATPase |
| | LOCATION |
| | cell > membrane fraction |
| | plasma membrane > integral plasma membrane protein |
| | endoplasmic reticulum > smooth endoplasmic reticulum |
| | endoplasmic reticulum > microsome |
| | cytoplasm > endoplasmic reticulum |
| | HUMAN PROTEIN DOMAINS (INTERPRO SIGNATURES) |
| | IPR001757 (E1-E2 ATPase) |
| | IPR000661 (Na K ATPase C) |
| | IPR000661 (Na K ATPase N) |
| | IPR001454 (Hydrolase) |
| | IPR000661 (NAKATPASE) |
| | IPR001757 (CATATPASE) |
| | IPR001757 (ATPASE E1 E2) |
| hP07-120 | HUMAN PANTHER CLASSIFICATIONS |
| | FAMILY (SUBFAMILY) |
| | PROSTAGLANDIN F2-ALPHA RECEPTOR REGULATORY PROTEIN- |
| | RELATED(PROSTAGLANDIN F2-ALPHA RECEPTOR REGULATORY PROTEIN-RELATED) |
| | MOLECULAR FUNCTIONS |
| | MOLECULAR FUNCTION UNCLASSIFIED |
| | BIOLOGICAL PROCESS |
| | SIGNAL TRANSDUCTION > CELL SURFACE RECEPTOR MEDIATED |
| | SIGNAL TRANSDUCTION |
| | IMMUNITY AND DEFENSE > B-CELL- AND ANTIBODY-MEDIATED |
| | IMMUNITY |
| | HUMAN GENE ONTOLOGY |
| | PROCESS |
| | humoral defense mechanism > antimicrobial response |
| | FUNCTION |
| | O-glucosyl hydrolase |
| | antimicrobial response protein > lysozyme |
| | B cell receptor |
| | defense/immunity protein > immunoglobulin |
| | LOCATION |
| | cell > membrane fraction |
| | plasma membrane > integral plasma membrane protein |
| | HUMAN PROTEIN DOMAINS (INTERPRO SIGNATURES) |
| | IPR003006 (ig) |
| | IPR003599 (IG) |
| hP07-121 | HUMAN PANTHER CLASSIFICATIONS |
| | FAMILY (SUBFAMILY) |
| | RAS SUPERFAMILY(RAP) |
| | MOLECULAR FUNCTIONS |
| | SELECT REGULATORY MOLECULE > G-PROTEIN > SMALL GTPASE |
| | BIOLOGICAL PROCESS |
| | SIGNAL TRANSDUCTION |
| | CELL CYCLE > CELL CYCLE CONTROL |
| | HUMAN GENE ONTOLOGY |
| | PROCESS |
| | intracellular signaling cascade > small GTPase mediated signal transduction |
| | cell cycle > cell cycle control |
| | cell growth and maintenance > cell shape and cell size control |
| | cell growth and maintenance > intracellular protein traffic |
| | cell communication > signal transduction |
| | LOCATION |
| | cell > cytoplasm |
| | plasma membrane > peripheral plasma membrane protein |
| | cell > plasma membrane |
| | endosome > late endosome |
| | GO cellular component > intracellular |
| | HUMAN PROTEIN DOMAINS (INTERPRO SIGNATURES) |
| | IPR001806 (ras) |
| | IPR001806 (RASTRNSFRMNG) |
| | IPR003577 (RAS) |
| | IPR003578 (RHO) |
| | IPR003579 (RAB) |
| | IPR002041 (RAN) |
| | IPR001687 (ATP GTP A) |
| hP07-122 | HUMAN PANTHER CLASSIFICATIONS |
| | FAMILY (SUBFAMILY) |
| | COILED-COIL PROTEIN |
| | HUMAN GENE ONTOLOGY |
| | PROCESS |
| | developmental processes > embryogenesis and morphogenesis |
| | organelle organization and biogenesis > cytoskeleton organization and biogenesis |
| | cell growth and maintenance > cell motility |
| | protein metabolism and modification > protein modification |
| | cell communication > cell adhesion |
| | FUNCTION |
| | GO molecular function > ligand binding or carrier |
| | GO molecular function > motor |
| | glycosaminoglycan binding > hyaluronic acid binding |
| | nucleotide binding > ATP binding |
| | motor > kinetochore motor |
| | LOCATION |
| | intracellular > cell |
| | actin cytoskeleton > non-muscle myosin |
| | nuclear membrane > nuclear membrane lumen |
| | plasma membrane > intercellular junction |
| | extracellular > extracellular matrix |
| | HUMAN PROTEIN DOMAINS (INTERPRO SIGNATURES) |
| | IPR000533 (TROPOMYOSIN) |
| hP07-123 | HUMAN PANTHER CLASSIFICATIONS |
| | FAMILY (SUBFAMILY) |
| | TRANSCRIPTION FACTOR ETS-RELATED(C-ETS-2-RELATED) |
| | MOLECULAR FUNCTIONS |
| | TRANSCRIPTION FACTOR > OTHER TRANSCRIPTION FACTOR |
| | BIOLOGICAL PROCESS |
| | NUCLEOSIDE, NUCLEOTIDE AND NUCLEIC ACID METABOLISM > MRNA |
| | TRANSCRIPTION > MRNA TRANSCRIPTION REGULATION |
| | SIGNAL TRANSDUCTION > INTRACELLULAR SIGNALING CASCADE > MAPKKK |
| | CASCADE |
| | ONCOGENESIS > ONCOGENE |
| | APOPTOSIS > INHIBITION OF APOPTOSIS |
| | HUMAN GENE ONTOLOGY |
| | PROCESS |
| | transcription, DNA-dependent > transcription regulation |
| | transcription, DNA-dependent > transcription from Pol II promoter |
| | cell proliferation > negative control of cell proliferation |
| | mesoderm development > skeletal development |
| | GO biological process > developmental processes |
| | FUNCTION |
| | DNA binding > transcription factor |
| | nucleic acid binding > DNA binding |
| | GO molecular function > cell cycle regulator |
| | transcription factor > RNA polymerase II transcription factor |
| | transcription factor > transcription activating factor |
| | LOCATION |
| | cell > nucleus |
| | GO cellular component > intracellular |
| | nuclear membrane > nuclear membrane lumen |
| | HUMAN PROTEIN DOMAINS (INTERPRO SIGNATURES) |
| | IPR002341 (HSF ETS) |
| | IPR000418 (ETS DOMAIN 3) |
| | IPR000418 (Ets) |
| | IPR003118 (SAM PNT) |
| | IPR000418 (ETSDOMAIN) |
| | IPR000418 (ETS) |
| | IPR003118 (SAM PNT) |
| | IPR000418 (ETS DOMAIN 1) |
| | IPR000418 (ETS DOMAIN 2) |
| hP07-124 | HUMAN PANTHER CLASSIFICATIONS |
| | FAMILY (SUBFAMILY) |
| | SH3-BINDING DOMAIN GLUTAMATE RICH PROTEIN (SH3-BINDING |
| | DOMAIN GLUTAMIC ACID-RICH PROTEIN) |
| | MOLECULAR FUNCTIONS |
| | MOLECULAR FUNCTION UNCLASSIFIED |
| | BIOLOGICAL PROCESS |
| | DEVELOPMENTAL PROCESSES > MESODERM DEVELOPMENT > HEART |
| | DEVELOPMENT |
| | HUMAN GENE ONTOLOGY |
| | PROCESS |
| | protein metabolism and modification > protein complex assembly |
| | LOCATION |
| | cell > cytoplasm |
| | HUMAN PROTEIN DOMAINS (INTERPRO SIGNATURES) |
| | NULL (GLU RICH) |
| hP07-124.1 | HUMAN PANTHER CLASSIFICATIONS |
| | FAMILY (SUBFAMILY) |
| | SH3-BINDING DOMAIN GLUTAMATE RICH PROTEIN(SH3-BINDING |
| | DOMAIN GLUTAMIC ACID-RICH PROTEIN) |
| | MOLECULAR FUNCTIONS |
| | MOLECULAR FUNCTION UNCLASSIFIED |
| | BIOLOGICAL PROCESS |
| | DEVELOPMENTAL PROCESSES > MESODERM DEVELOPMENT > HEART |
| | DEVELOPMENT |
| | HUMAN GENE ONTOLOGY |
| | PROCESS |
| | protein metabolism and modification > protein complex assembly |
| | LOCATION |
| | cell > cytoplasm |
| | HUMAN PROTEIN DOMAINS (INTERPRO SIGNATURES) |
| | NULL (GLU RICH) |
| hP07-125 | HUMAN PANTHER CLASSIFICATIONS |
| | FAMILY (SUBFAMILY) |
| | PROTEIN-TYROSINE PHOSPHATASE(PROTEIN-TYROSINE |
| | PHOSPHATASE) |
| | MOLECULAR FUNCTIONS |
| | PHOSPHATASE > PROTEIN PHOSPHATASE |
| | BIOLOGICAL PROCESS |
| | PROTEIN METABOLISM AND MODIFICATION > PROTEIN |
| | MODIFICATION > PROTEIN PHOSPHORYLATION |
| | HUMAN GENE ONTOLOGY |
| | PROCESS |
| | protein modification > protein dephosphorylation |
| | enzyme linked receptor protein signaling pathway > transmembrane receptor |
| | protein tyrosine phosphatase signaling pathway |
| | isoprenoid catabolism > one-carbon compound metabolism |
| | defasciculation of neuron > defasciculation of motor neuron |
| | FUNCTION |
| | protein phosphatase > protein tyrosine phosphatase |
| | protein tyrosine phosphatase > prenylated protein tyrosine phosphatase |
| | enzyme > protein phosphatase |
| | protein tyrosine phosphatase > prenylated protein tyrosine phosphatase |
| | transmembrane receptor |
| | protein tyrosine phosphatase > prenylated protein tyrosine phosphatase |
| | LOCATION |
| | cell > cytoplasm |
| | cell > plasma membrane |
| | cell > membrane fraction |
| | plasma membrane > integral plasma membrane protein |
| | cell > soluble fraction |
| | HUMAN PROTEIN DOMAINS (INTERPRO SIGNATURES) |
| | IPR000387 (TYR PHOSPHATASE 2) |
| | IPR000694 (PRO RICH) |
| | IPR000242 (TYR PHOSPHATASE PTP) |
| | IPR000242 (Y phosphatase) |
| | IPR000242 (PRTYPHPHTASE) |
| | IPR000242 (PTPc) |
| | IPR003595 (PTPc motif) |
| | IPR000387 (TYR PHOSPHATASE 1) |
| hP07-126 | HUMAN PANTHER CLASSIFICATIONS |
| | FAMILY (SUBFAMILY) |
| | 60S RIBOSOMAL PROTEIN L17 FAMILY MEMBER(60S RIBOSOMAL |
| | PROTEIN L17) |
| | MOLECULAR FUNCTIONS |
| | NUCLEIC ACID BINDING > RIBOSOMAL PROTEIN |
| | BIOLOGICAL PROCESS |
| | PROTEIN METABOLISM AND MODIFICATION > PROTEIN |
| | BIOSYNTHESIS |
| | HUMAN GENE ONTOLOGY |
| | PROCESS |
| | protein metabolism and modification |
| | macromolecule biosynthesis > protein biosynthesis |
| | monovalent inorganic cation transport > sodium transport |
| | FUNCTION |
| | nucleic acid binding > RNA binding |
| | LOCATION |
| | cytoplasm > ribosome |
| | GO cellular component > intracellular |
| | large ribosomal subunit |
| | cytosolic ribosome |
| | plasma membrane > integral plasma membrane protein |
| | HUMAN PROTEIN DOMAINS (INTERPRO SIGNATURES) |
| | IPR001063 (sp P24049 RL17 RAT) |
| | IPR001063 (Ribosomal L22) |
| hP07-127 | HUMAN PANTHER CLASSIFICATIONS |
| | FAMILY (SUBFAMILY) |
| | DUAL SPECIFICITY AND SERINE/THREONINE PROTEIN |
| | KINASE(PROTEIN KINASE SNF1-RELATED) |
| | MOLECULAR FUNCTIONS |
| | KINASE > PROTEIN KINASE > NON-RECEPTOR SERINE/THREONINE |
| | PROTEIN KINASE |
| | BIOLOGICAL PROCESS |
| | PROTEIN METABOLISM AND MODIFICATION > PROTEIN |
| | MODIFICATION > PROTEIN PHOSPHORYLATION |
| | SIGNAL TRANSDUCTION > INTRACELLULAR SIGNALING CASCADE |
| | HUMAN GENE ONTOLOGY |
| | PROCESS |
| | protein modification > protein phosphorylation |
| | cell communication > signal transduction |
| | monosaccharide metabolism > glucose metabolism |
| | metabolism > carbohydrate metabolism |
| | M phase > mitosis |
| | FUNCTION |
| | enzyme > protein kinase |
| | nucleotide binding > ATP binding |
| | protein binding > calmodulin binding |
| | ligand binding or carrier > calcium binding |
| | protein kinase > protein tyrosine kinase |
| | LOCATION |
| | cell > cytoplasm |
| | cell > nucleus |
| | cytoskeleton > microtubule cytoskeleton |
| | GO cellular component > intracellular |
| | microtubule organizing center > centrosome |
| | HUMAN PROTEIN DOMAINS (INTERPRO SIGNATURES) |
| | IPR000719 (PROTEIN KINASE DOM) |
| | NULL (GLN RICH) |
| | IPR000719 (pkinase) |
| | IPR001245 (TYRKINASE) |
| | IPR001245 (TyrKc) |
| | IPR002290 (S TKc) |
| | IPR002290 (PROTEIN KINASE ST) |
| hP07-128 | HUMAN PANTHER CLASSIFICATIONS |
| | No Panther Hit |
| | HUMAN GENE ONTOLOGY |
| | PROCESS |
| | cell communication > cell adhesion |
| | FUNCTION |
| | ligand binding or carrier > glycosaminoglycan binding |
| | LOCATION |
| | GO cellular component > extracellular |
| | HUMAN PROTEIN DOMAINS (INTERPRO SIGNATURES) |
| | No Domain Hit |

[0290] A CA protein (CAP) is an inhibitor of transcription wherein the CAP sequence is encoded by a nucleic acid comprising a nucleic acid sequence selected from the group consisting of hR07-021, hR07-041, hR07-045, hR07-046, hR07-047, hR07-048, hR07-053, hR07-054, hR07-054.1, hR07-054.2, hR07-062, hR07-062.1, hR07-062.2, hR07-063, hR07-080, hR07-088, hR07-089, hR07-095, hR07-095.1, hR07-097, hR07-098, hR07-108, hR07-108.1, and hR07-123.

[0291] A CA protein (CAP) is a G-protein coupled receptor antagonist wherein the CAP sequence is encoded by a nucleic acid comprising a nucleic acid sequence selected from the group consisting of hR07-012, hR07-025, hR07-050, hR07-050.1, hR07-050.2, and hR07-050.3

[0292] A CA protein (CAP) is a growth factor antagonist wherein the CAP sequence is encoded by a nucleic acid comprising a nucleic acid sequence selected from the group consisting of hR07-083, hR67-092, hR07-093, and hR07-106.

[0293] A CA protein (CAP) is a serine-threonine kinase antagonist wherein the CAP sequence is encoded by a nucleic acid comprising a nucleic acid sequence selected from the group consisting of hR07-060, hR07-061, hR07-067, hR07-115, and hR07-127.

[0294] A CA protein (CAP) is a tyrosine kinase antagonist wherein the CAP sequence is encoded by a nucleic acid comprising a nucleic acid sequence selected from the group consisting of hR07-004, hR07-006, hR07-008, hR07-055, and hR07-055.1.

[0295] A CA protein (CAP) is expressed on a cell surface, wherein the CA protein is selected from the group consisting of hP07-003, hP07-014, hP07-035, hP07-042, hP07-044, hP07-051, hP07-064, hP07-067, hP07-071, hP07-075, hP07-078, hP07-081, hP07-083, hP07-092, hP07-093, hP07-102, hP07-106, hP07-112, hP07-120, and hP07-128.

[0296] Certain aspects of the present invention are described in greater detail in the non-limiting examples that follow.

### EXAMPLES

[0297] The following examples are put forth so as to provide those of ordinary skill in the art with a complete disclosure and description of how to make and use the present invention, and are not intended to limit the scope of what the inventors regard as their invention nor are they intended to represent that the experiments below are all and only experiments performed. Efforts have been made to ensure accuracy with respect to numbers used (e.g. amounts, temperature, etc.) but some experimental errors and deviations should be accounted for. Unless indicated otherwise, parts are parts by weight, molecular weight is weight average molecular weight, temperature is in degrees-Celsius, and pressure is at or near atmospheric.

### Example 1

### Insertion Site Analysis Following Tumor Induction in Mice

[0298] Tumors are induced in mice using either mouse mammary tumor virus (MMTV) or murine leukemia virus (MLV). MM causes mammary adenocarcinomas and MLV causes a variety of different hematopoetic malignancies (primarily T- or B-cell lymphomas). Three routes of infection are used: (1) injection of neonates with purified virus preparations, (2) infection by milk-borne virus during nursing, and (3) genetic transmission of pathogenic proviruses via the germ-line (Akvr1 and/or Mtv2). The type of malignancy present in each affected mouse is determined by histological analysis of H&E-stained thin sections of formalin-fixed, parafin-embedded biopsy samples. Host DNA sequences flanking all clonally-integrated proviruses in each tumor are recovered by nested anchored-PCR using two virus-specific primers and two primers specific for a 40 bp double stranded DNA anchor ligated to restriction enzyme digested tumor DNA. Amplified bands representing host/virus junction fragments are cloned and sequenced. Then the host sequences (called “tags”) are used to BLAST analyze the Celera mouse genomic sequence. For each individual tag, three parameters are recorded: (1) the mouse chromosome assignment, (2) base pair coordinates at which the integration occurred, and (3) provirus orientation. Using this information, all available tags from all analyzed tumors are mapped to the mouse genome. To identify the protooncogene targets of provirus insertion mutation, the provirus integration pattern at each cluster of integrants is analyzed relative to the locations of all known genes in the transcriptome. The presence of provirus at the same locus in two or more independent tumors is prima facie evidence that a protooncogene is present at or very near the proviral integration sites. This is because the genome is too large for random integrations to result in observable clustering. Any clustering that is detected is unequivocal evidence for biological selection during tumorigenesis. In order to identify the human orthologs of the protooncogene targets of provirus insertion mutation, a comparative analysis of syntenic regions of the mouse and human genomes is performed.

[0299] An example of PCR amplification of host/virus junction fragments is presented in FIG. 1. Lane 1 contains the amplification products from normal control DNA and lane 2 contains the amplification products from tumor DNA. The bands result from 5′ host/virus junction fragments present in the DNA samples. Lane 1 has bands from the env/3′ LTR junctions from all proviruses (upper) and the host/5′ LTR from the pathogenic endogenous Mtv2 provirus present in this particular mouse strain. This endogenous provirus is detected because its sequence is identical to the new clonally integrated proviruses in the tumor. All four new clonally integrated proviruses known to be in this tumor are readily detected.

### Example 2

### Analysis of Quantitative RT-PCR: Comparative C_{T} Method

[0300] The expression level of target genes is quantified using the ABI PRISM 7900HT Sequence Detection System (Applied Biosystems, California). The method is based on the quantitation of the initial copy number of target template in comparison to that of a reference (normalizer) housekeeper gene (Pre-Developed TaqMan® Assay Reagents Gene Expression Quantification Protocol, Applied Biosystems, 2001). Accumulation of DNA product with each PCR cycle is related to amplicon efficiency and the initial template concentration. Therefore the amplification efficiency of both the target and the normalizer must be approximately equal. The threshold cycle (C_{T}), which is dependent on the starting template copy number and the DNA amplification efficiency, is a PCR cycle during which PCR product growth is exponential. With a similar dynamic range for the target and normalizer, the comparative C_{T} method is applicable.

[0301] An example of the comparative C_{T} method of gene expression for quantitative RT-PCR is shown in FIG. 2. In the first step, assays are performed in quadruplicate on a normal tissue and several sample tissues. In these tissues, the means and standard deviations of C_{T} values are determined for housekeeper genes (chosen as controls if shown to be biologically stable among various samples, irrespective of disease state) and for the target gene. FIG. 2 shows an example of average C_{T} values for a housekeeper gene and target gene. These values can fall within a range from upper teens to 40 depending on the intrinsic expression level of the gene in the particular tissue. The coefficient of variance of all replicate sets cannot exceed 1.5%.

[0302] An assessment of how the ΔC_{T} changes with template dilution verifies that the efficiencies of the target and housekeeper amplicons are approximately equal if the log input amount of template RNA versus ΔC_{T} plot has a slope<0.10. With the relative efficiencies verified for target and housekeeper, the ΔΔC_{T} comparative calculation becomes valid, as mentioned above. An example of the calculated difference between the C_{T} values of target and housekeeper genes (ΔC_{T}) for various samples is shown in FIG. 3. The ΔΔC_{T} is calculated for each sample by subtracting its ΔC_{T} value from the ΔC_{T} value of the baseline (calibrator) sample. If the expression is increased in some samples and decreased in others, ΔΔC_{T} will be a mixture of negative and positive values. The final step in the calculation is to transform these values to absolute values. The formula for this is:
Comparative expression level=2^{-ΔΔCT}

[0303] The final value for the calibrator should always be one. FIG. 4 shows the ΔΔC_{T} and comparative expression level for each sample from FIG. 3.

### Example 3

### Detection of Elevated Levels of cDNA Associated with Cancer Using Arrays

[0304] cDNA sequences representing a variety of candidate CA genes to be screened for differential expression in cancer are assayed by hybridization on polynucleotide arrays. The cDNA sequences include cDNA clones isolated from cell lines or tissues of interest. The cDNA sequences analyzed also include polynucleotides comprising sequence overlap with sequences in the Unigene database, and which encode a variety of gene products of various origins, functionality, and levels of characterization. cDNAs are spotted onto reflective slides (Amersham) according to methods well known in the art at a density of 9,216 spots per slide representing 4,068 sequences (including controls) spotted in duplicate, with approximately 0.8 μl of an approximately 200 ng/μl solution of cDNA.

[0305] PCR products of selected cDNA clones corresponding to the gene products of interest are prepared in a 50% DMSO solution. These PCR products are spotted onto Amersham aluminum microarray slides at a density of 9216 clones per array using a Molecular Dynamics Generation m spotting robot. Clones are spotted in duplicate, for a total of 4608 different sequences per chip.

[0306] cDNA probes are prepared from total RNA obtained by laser capture microdissection (LCM, Arcturus Enginering Inc., Mountain View, Calif.) of tumor tissue samples and normal tissue samples isolated from patients.

[0307] Total RNA is first reverse transcribed into cDNA using a primer containing a T7 RNA polymerase promoter, followed by second strand DNA synthesis. cDNA is then transcribed in vitro to produce antisense RNA using the T7 promoter-mediated expression (see, e.g., Luo et al. (1999) Nature Med 5:117-122), and the antisense RNA is then converted into cDNA. The second set of cDNAs are again transcribed in vitro, using the T7 promoter, to provide antisense RNA. This antisense RNA is then fluorescently labeled, or the RNA is again converted into cDNA, allowing for a third round of T7-mediated amplification to produce more antisense RNA. Thus the procedure provides for two or three rounds of in vitro transcription to produce the final RNA used for fluorescent labeling. Probes are labeled by making fluorescently labeled cDNA from the RNA starting material. Fluorescently labeled cDNAs prepared from the tumor RNA sample are compared to fluorescently labeled cDNAs prepared from normal cell RNA sample. For example, the cDNA probes from the normal cells are labeled with Cy3 fluorescent dye (green) and the cDNA probes prepared from suspected cancer cells are labeled with Cy5 fluorescent dye (red).

[0308] The differential expression assay is performed by mixing equal amounts of probes from tumor cells and normal cells of the same patient. The arrays are prehybridized by incubation for about 2 hrs at 60° C. in 5×SSC, 0.2% SDS, 1 mM EDTA, and then washing three times in water and twice in isopropanol. Following prehybridization of the array, the probe mixture is then hybridized to the array under conditions of high stringency (overnight at 42° C. in 50% formamide, 5×SSC, and 0.2% SDS. After hybridization, the array is washed at 55° C. three times as follows: 1) first wash in 1×SSC/0.2% SDS; 2) second wash in 0.1×SSC/0.2% SDS; and 3) third wash in 0.1×SSC.

[0309] The arrays are then scanned for green and red fluorescence using a Molecular Dynamics Generation m dual color laser-scanner/detector. The images are processed using BioDiscovery Autogene software, and the data from each scan set normalized The experiment is repeated, this time labeling the two probes with the opposite color in order to perform the assay in both “color directions.” Each experiment is sometimes repeated with two more slides (one in each color direction). The data from each scan is normalized, and the level of fluorescence for each sequence on the array expressed as a ratio of the geometric mean of 8 replicate spots/genes from the four arrays or 4 replicate spots/gene from 2 arrays or some other permutation.

[0310] Normalization: The objective of normalization is to generate a cDNA library in which all transcripts expressed in a particular cell type or tissue are equally represented (S. M. Weissman, Mol. Biol. Med. 4(3):133-143 (1987); Patanjali, et al., Proc. Natl. Acad. Sci. USA 88(5):1943-1947 (1991)), and therefore isolation of as few as 30,000 recombinant clones in an optimally normalized library may represent the entire gene expression repertoire of a cell, estimated to number 10,000 per cell.

[0311] Total RNA is extracted from harvested cells using RNeasy™ Protect Kit (Qiagen, Valencia, Calif.), following manufacturer's recommended procedures. RNA is quantified using RiboGreen™ RNA quantification kit (Molecular Probes, Inc. Eugene, Oreg.). One μg of total RNA is reverse transcribed and PCR amplified using SMART™ PCR cDNA synthesis kit (ClonTech, Palo Alto, Calif.). The cDNA products are size-selected by agarose gel electrophoresis using standard procedures (Sambrook, J. T., et al. Molecular Cloning: A Laboratory Manual, 2d ed., Cold Spring Harbor Laboratory Press, NY). The cDNA is extracted using Bio 101 Geneclean® II kit (Qbiogene, Carlsbad, Calif.). Normalization of the cDNA is carried out using kinetics of hybridization principles: 1.0 μg of cDNA is denatured by heat at 100° C. for 10 minutes, then incubated at 42° C. for_{—}42 hours in the presence of 120 mMNaCl, 10 mM Tris.HCl (pH=8.0), 5 mM EDTA.Na+ and 50% formamide. Single-stranded cDNA (“normalized”) is purified by hydroxyapatite chromatography (#130-0520, BioRad, Hercules, Calif.) following the manufacturer's recommended procedures, amplified and converted to double-stranded cDNA by three cycles of PCR amplification, and cloned into plasmid vectors using standard procedures (Sambrook, J. T., et al. Molecular Cloning: A Laboratory Manual, 2d ed., Cold Spring Harbor Laboratory Press, NY). All primers/adaptors used in the normalization and cloning process are provided by the manufacturer in the SMART™ PCR cDNA synthesis kit (ClonTech, Palo Alto, Calif.). Supercompetent cells (XL-2 Blue Ultracompetent Cells, Stratagene, California) are transfected with the normalized cDNA libraries, plated on solid media and grown overnight at 36° C.

[0312] The sequences of 10,000 recombinants per normalized library are analyzed by capillary sequencing using the ABI PRISM 3700 DNA Analyzer (Applied Biosystems, California). To determine the representation of transcripts in a library, BLAST analysis is performed on the clone sequences to assign transcript identity to each isolated clone, i.e., the sequences of the isolated polynucleotides are first masked to eliminate low complexity sequences using the XBLAST masking program (Claverie “Effective Large-Scale Sequence Similarity Searches,” Computer Methods for Macromolecular Sequence Analysis, Doolittle, ed., Meth. Enzymol. 266:212-227 Academic Press, NY, N.Y. (1996); see particularly Claverie, in “Automated DNA Sequencing and Analysis Techniques” Adams et al., eds., Chap. 36, p. 267 Academic Press, San Diego, 1994 and Claverie et al. Comput Chem (1993) 17:191). Generally, masking does not influence the final search results, except to eliminate sequences of relative little interest due to their low complexity, and to eliminate multiple “hits” based on similarity to repetitive regions common to multiple sequences, e.g., Alu repeats. The remaining sequences are then used in a BLASTN vs. GenBank search. The sequences are also used as query sequence in a BLASTX vs. NRP (non-redundant proteins) database search.

[0313] Automated sequencing reactions are performed using a Perkin-Elmer PRISM Dye Terminator Cycle Sequencing Ready Reaction Kit containing AmpliTaq DNA Polymerase, FS, according to the manufacturer's directions. The reactions are cycled on a GeneAmp PCR System 9600 as per manufacturer's instructions, except that they are annealed at 20° C. or 30° C. for one minute. Sequencing reactions are ethanol precipitated, pellets are resuspended in 8 microliters of loading buffer, 1.5 microliters is loaded on a sequencing gel, and the data is collected by an ABI PRISM 3700 DNA Sequencer. (Applied Biosystems, Foster City, Calif.).

[0314] The number of times a sequence is represented in a library is determined by performing sequence identity analysis on the cloned cDNA sequences and assigning transcript identity to each isolated clone. First, each sequence is checked to determine if it is a bacterial, ribosomal, or mitochondrial contaminant. Such sequences are excluded from the subsequent analysis. Second, sequence artifacts, such as vector and repetitive elements, are masked and/or removed from each sequence.

[0315] The remaining sequences are compared via BLAST (Altschul et al, J. Mol. Biol., 215:40, 1990) to GenBank and EST databases for gene identification and are compared with each other via FastA Pearson & Lipman, PNAS, 85:2444, 1988) to calculate the frequency of cDNA appearance in the normalized cDNA library. The sequences are also searched against the GenBank and GeneSeq nucleotide databases using the BLASTN program (BLASTN 1.3 MP: Altschul et al., J. Mol. Bio. 215:403, 1990). Fourth, the sequences are analyzed against a non-redundant protein (NRP) database with the BLASTX program (BLASTX 1.3 MP: Altschul et al., supra). This protein database is a combination of the Swiss-Prot, PIR, and NCBI GenPept protein databases. The BLASTX program is run using the default BLOSUM-62 substitution matrix with the filter parameter: “xnu+seg”. The score cutoff utilized is 75. Assembly of overlapping clones into contigs is done using the program Sequencher (Gene Codes Corp.; Ann Arbor, Mich.). The assembled contigs are analyzed using the programs in the GCG package (Genetic Computer Group, University Research Park, 575 Science Drive, Madison, Wis. 53711) Suite Version 10.1.

### Example 4

### Detection of CA-Sequences in Human Cancer Cells and Tissues

[0316] DNA from prostate and breast cancer tissues and other human cancer tissues, human colon, normal human tissues including non-cancerous prostate, and from other human cell lines are extracted following the procedure of Delli Bovi et al. (1986, Cancer Res. 46:6333-6338). The DNA is resuspended in a solution containing 0.05 M Tris HCl buffer, pH 7.8, and 0.1 mM EDTA, and the amount of DNA recovered is determined by microfluorometry using Hoechst 33258 dye. Cesarone, C. et al., Anal Biochem 100:188-197 (1979).

[0317] Polymerase chain reaction (PCR) is performed using Taq polymerase following the conditions recommended by the manufacturer (Perlin Elmer Cetus) with regard to buffer, Mg²⁺, and nucleotide concentrations. Thermocycling is performed in a DNA cycler by denaturation at 94° C. for 3 min. followed by either 35 or 50 cycles of 94° C. for 1.5 mil, 50° C. for 2 min. and 72° C. for 3 mL The ability of the PCR to amplify the selected regions of the CA gene is tested by using a cloned CA polynucleotide(s) as a positive template(s). Optimal Mg²⁺, primer concentrations and requirements for the different cycling temperatures are determined with these templates. The master mix recommended by the manufacturer is used. To detect possible contamination of the master mix components, reactions without template are routinely tested.

[0318] Southern blotting and hybridization are performed as described by Southern, E. M., (J. Mol. Biol. 98:503-517, 1975), using the cloned sequences labeled by the random primer procedure (Feinberg, A. P., et al., 1983, Anal. Biochem. 132:6-13). Prehybridization and hybridization are performed in a solution containing 6×SSPE, 5% Denhardt's, 0.5% SDS, 50% formamide, 100 μg/ml denaturated salmon testis DNA, incubated for 18 hrs at 42° C., followed by washings with 2×SSC and 0.5% SDS at room temperature and at 37° C. and finally in 0.1×SSC with 0.5% SDS at 68° C. for 30 min (Sambrook et al., 1989, in “Molecular Cloning: A Laboratory Manual”, Cold Spring Harbor Lab. Press). For paraffin-embedded tissue sections the conditions described by Wright and Manos (1990, in “PCR Protocols”, Innis et al., eds., Academic Press, pp. 153-158) are followed using primers designed to detect a 250 bp sequence.

### Example 5

### Detection of CA Sequences in Human Cancer Cells and Tissues

[0319] DNA from human cancer tissues, normal human tissues and from other human cell lines is extracted following the procedure of Delli Bovi et al. (1986, Cancer Res. 46:6333-6338). The DNA is resuspended in a solution containing 0.05 M Tris HCl buffer, pH 7.8, and 0.1 mM EDTA, and the amount of DNA recovered is determined by microfluorometry using Hoechst 33258 dye. Cesarone, C. et al., Anal Biochem 100:188-197 (1979).

[0320] Polymerase chain reaction (PCR) is performed using Taq polymerase following the conditions recommended by the manufacturer (Perkin Elmer Cetus) with regard to buffer, Mg²⁺, and nucleotide concentrations. Thermocycling is performed in a DNA cycler by denaturation at 94° C. for 3 min. followed by either 35 or 50 cycles of 94° C. for 1.5 min, 50° C. for 2 min. and 72° C. for 3 min. The ability of the PCR to amplify the selected regions of CA genes is tested by using a cloned CA polynucleotide(s) as a positive template(s). Optimal Mg²⁺, primer concentrations and requirements for the different cycling temperatures are determined with these templates. The master mix recommended by the manufacturer is used. To detect possible contamination of the master mix components, reactions without template are routinely tested.

[0321] Southern blotting and hybridization are performed as described by Southern, E. M., (J. Mol. Biol. 98:503-517, 1975), using the cloned sequences labeled by the random primer procedure (Feinberg, A. P., et al., 1983, Anal. Biochem. 132:6-13). Prehybridization and hybridization are performed in a solution containing 6×SSPE, 5% Denhardt's, 0.5% SDS, 50% formamide, 100 μg/ml denaturated salmon testis DNA, incubated for 18 hrs at 42° C., followed by washings with 2×SSC and 0.5% SDS at room temperature and at 37° C. and finally in 0.1×SSC with 0.5% SDS at 68° C. for 30 min (Sambrook et al., 1989, in “Molecular Cloning: A Laboratory Manual”, Cold Spring Harbor Lab. Press). For paraffin-embedded tissue sections the conditions described by Wright and Manos (1990, in “PCR Protocols”, Innis et al., eds., Academic Press, pp. 153-158) are followed using primers designed to detect a 250 bp sequence.

### Example 6

### Expression of Cloned Polynucleotides in Host Cells

[0322] To study the protein products of CA genes, restriction fragments from CA DNA are cloned into the expression vector pMT2 (Sambrook, et al., Molecular Cloning: A Laboratory Manual, Cold Spring Harbor Laboratory Press pp 16.17-16.22 (1989)) and transfected into COS cells grown in DMEM supplemented with 10% FCS. Transfections are performed employing calcium phosphate techniques (Sambrook, et al (1989) pp. 16.32-16.40, supra) and cell lysates are prepared forty-eight hours after transfection from both transfected and untransfected COS cells. Lysates are subjected to analysis by immunoblotting using anti-peptide antibody.

[0323] In immunoblotting experiments, preparation of cell lysates and electrophoresis are performed according to standard procedures. Protein concentration is determined using BioRad protein assay solutions. After semi-dry electrophoretic transfer to nitrocellulose, the membranes are blocked in 500 mM NaCl, 20 mM Tris, pH 7.5, 0.05% Tween-20 (TTBS) with 5% dry milk After washing in TTBS and incubation with secondary antibodies (Amersham), enhanced chemiluminescence (ECL) protocols (Amersham) are performed as described by the manufacturer to facilitate detection

### Example 7

### Generation of Antibodies Against Polypeptides

[0324] Polypeptides, unique to CA genes are synthesized or isolated from bacterial or other (e.g., yeast, baculovirus) expression systems and conjugated to rabbit serum albumin (RSA) with m-maleimido benzoic acid N-hydroxysuccinimide ester (MBS) (Pierce, Rockford, Ill.). Immunization protocols with these peptides are performed according to standard methods. Initially, a pre-bleed of the rabbits is performed prior to immunization. The first immunization includes Freund's complete adjuvant and 500 μg conjugated peptide or 100 μg purified peptide. All subsequent immunizations, performed four weeks after the previous injection, include Freund's incomplete adjuvant with the same amount of protein. Bleeds are conducted seven to ten days after the immunizations.

[0325] For affinity purification of the antibodies, the corresponding CA polypeptide is conjugated to RSA with MBS, and coupled to CNBr-activated Sepharose (Pharmacia, Uppsala, Sweden). Antiserum is diluted 10-fold in 10 mM Tris-HCl, pH 7.5, and incubated overnight with the affinity matrix. After washing, bound antibodies are eluted from the resin with 100 mM glycine, pH 2.5.

### Example 8

### Generation of Monoclonal Antibodies Against a CA Polypeptide

[0326] A non-denaturing adjuvant (Ribi, R730, Corixa, Hamilton Mich.) is rehydrated to 4 ml in phosphate buffered saline. 100 μL of this rehydrated adjuvant is then diluted with 400 μl of Hank's Balanced Salt Solution and this is then gently mixed with the cell pellet used for immunization. Approximately 500 μg conjugated peptide or 100 μg purified peptide and Freund's complete are injected into Balb/c mice via foot-pad, once a week. After 6 weeks of weekly injection, a drop of blood is drawn from the tail of each immunized animal to test the titer of antibodies against CA polypeptides using FACS analysis. When the titer reaches at least 1:2000, the mice are sacrificed in a CO₂ chamber followed by cervical dislocation. Lymph nodes are harvested for hybridoma preparation. Lymphocytes from mice with the highest titer are fused with the mouse myeloma line X63-Ag8.653 using 35% polyethylene glycol 4000. On day 10 following the fusion, the hybridoma supernatants are screened for the presence of CAP-specific monoclonal antibodies by fluorescence activated cell sorting (FACS). Conditioned medium from each hybridoma is incubated for 30 minutes with a combined aliquot of PC3, Colo-205, LnCap, or Panc-1 cells. After incubation, the cell samples are washed, resuspended in 0.1 ml diluent and incubated with 1 μg/ml of FITC conjugated F(ab′)2 fragment of goat anti-mouse IgG for 30 min at 4° C. The cells are washed, resuspended in 0.5 ml FACS diluent and analyzed using a FACScan cell analyzer (Becton Dickinson; San Jose, Calif.). Hybridoma clones are selected for further expansion, cloning, and characterization based on their binding to the surface of one or more of cell lines which express the CA polypeptide as assessed by FACS. A hybridoma making a monoclonal antibody designated mAbCA which binds an antigen designated Ag-CA.x and an epitope on that antigen designated Ag-CA.x.1 is selected.

### Example 9

### ELISA Assay for Detecting CA Related Antigens

[0327] To test blood samples for antibodies that bind specifically to recombinantly produced CA antigens, the following procedure is employed. After a recombinant CA related protein is purified, the recombinant protein is diluted in PBS to a concentration of 5 μg/ml (500 ng/100 μl). 100 microliters of the diluted antigen solution is added to each well of a 96-well Immulon 1 plate (Dynatech Laboratories, Chantilly, Va.), and the plate is then incubated for 1 hour at room temperature, or overnight at 4° C., and washed 3 times with 0.05% Tween 20 in PBS. Blocking to reduce nonspecific binding of antibodies is accomplished by adding to each well 200 μl of a 1% solution of bovine serum albumin in PBS/Tween 20 and incubation for 1 hour. After aspiration of the blocking solution, 100 μl of the primary antibody solution (anticoagulated whole blood, plasma, or serum), diluted in the range of 1/16 to 1/2048 in blocking solution, is added and incubated for 1 hour at room temperature or overnight at 4° C. The wells are then washed 3 times, and 100 μl of goat anti-human IgG antibody conjugated to horseradish peroxidase (Organon Teknika, Durham, N.C.), diluted 1/500 or 1/1000 in PBS/Tween 20, 100 μl of o-phenylenediamine dihydrochloride (OPD, Sigma) solution is added to each well and incubated for 5-15 minutes. The OPD solution is prepared by dissolving a 5 mg OPD tablet in 50 ml 1% methanol in H₂O and adding 50 μl 30% H₂O₂ immediately before use. The reaction is stopped by adding 25 l of 4M H₂SO₄. Absorbances are read at 490 nm in a microplate reader (Bio-Rad).

### Example 10

### Identification and Characterization of CA Antigen on Cancer Cell Surface

[0328] A cell pellet of proximately 25 μl packed cell volume of a cancer cell preparation is lysed by first diluting the cells to 0.5 ml in water followed by freezing and thawing three times. The solution is centrifuged at 14,000 rpm. The resulting pellet, containing the cell membrane fragments, is resuspended in 50 μl of SDS sample buffer (Invitrogen, Carlsbad, Calif.). The sample is heated at 80° C. for 5 minutes and then centrifuged for 2 minutes at 14,000 rpm to remove any insoluble materials.

[0329] The samples are analyzed by Western blot using a 4 to 20% polyacrylamide gradient gel in Tris-Glycine SDS (Invitrogen; Carlsbad Calif.) following the manufacturer's directions. Ten microliters of membrane sample are applied to one lane on the polyacrylamide gel. A separate 10 μL sample is reduced first by the addition of 2 μL of dithiothreitol (100 mM) with heating at 80° C. for 2 minutes and then loaded into another lane. Pre-stained molecular weight markers SeeBlue Plus2 (nitrogen; Carlsbad, Calif.) are used to assess molecular weight on the gel. The gel proteins are transferred to a nitrocellulose membrane using a transfer buffer of 14.4 g/l glycine, 3 g/l of Tris Base, 10% methanol, and 0.05% SDS. The membranes are blocked, probed with a CAP-specific monoclonal antibody (at a concentration of 0.5 ug/ml), and developed using the Invitrogen WesternBreeze Chromogenic Kit-AntiMouse according to the manufacturer's directions. In the reduced sample of the tumor cell membrane samples, a prominent band is observed migrating at a molecular weight within about 10% of the predicted molecular weight of the corresponding CA protein.

### Example 11

### Preparation of Vaccines

[0330] The present invention also relates to a method of stimulating an immune response against cells that express CA polypeptides in a patient using CA polypeptides of the invention that act as an antigen produced by or associated with a malignant cell. This aspect of the invention provides a method of stimulating an immune response in a human against cancer cells or cells that express CA polynucleotides and polypeptides. The method comprises the step of administering to a human an immunogenic amount of a polypeptide comprising: (a) the amino acid sequence of a huma CA protein or (b) a mutein or variant of a polypeptide comprising the amino acid sequence of a human endogenous retrovirus CA protein.

### Example 12

### Generation of Transgenic Animals Expressing Polypeptides as a Means for Testing Therapeutics

[0331] CA nucleic acids are used to generate genetically modified non-human animals, or site specific gene modifications thereof, in cell lines, for the study of function or regulation of prostate tumor-related genes, or to create animal models of diseases, including prostate cancer. The term “transgenic” is intended to encompass genetically modified animals having an exogenous CA gene(s) that is stably transmitted in the host cells where the gene(s) may be altered in sequence to produce a modified protein, or having an exogenous CA LTR promoter operably linked to a reporter gene. Transgenic animals may be made through a nucleic acid construct randomly integrated into the genome. Vectors for stable integration include plasmids, retroviruses and other animal viruses, YACs, and the like. Of interest are transgenic mammals, e.g. cows, pigs, goats, horses, etc., and particularly rodents, e.g. rats, mice, etc.

[0332] The modified cells or animals are useful in the study of CA gene function and regulation. For example, a series of small deletions and/or substitutions may be made in the CA genes to determine the role of different genes in tumorigenesis. Specific constructs of interest include, but are not limited to, antisense constructs to block CA gene expression, expression of dominant negative CA gene mutations, and over-expression of a CA gene. Expression of a CA gene or variants thereof in cells or tissues where it is not normally expressed or at abnormal times of development is provided. In addition, by providing expression of proteins derived from CA in cells in which it is otherwise not normally produced, changes in cellular behavior can be induced.

[0333] DNA constructs for random integration need not include regions of homology to mediate recombination. Conveniently, markers for positive and negative selection are included. For various techniques for transfecting mammalian cells, see Keown et al., Methods in Enzymology 185:527-537 (1990).

[0334] For embryonic stem (ES) cells, an ES cell line is employed, or embryonic cells are obtained freshly from a host, e.g. mouse, rat, guinea pig, etc. Such cells are grown on an appropriate fibroblast-feeder layer or grown in the presence of appropriate growth factors, such as leukemia inhibiting factor (LIF). When ES cells are transformed, they may be used to produce transgenic animals. After transformation, the cells are plated onto a feeder layer in an appropriate medium. Cells containing the construct may be detected by employing a selective medium. After sufficient time for colonies to grow, they are picked and analyzed for the occurrence of integration of the construct. Those colonies that are positive may then be used for embryo manipulation and blastocyst injection. Blastocysts are obtained from 4 to 6 week old superovulated females. The ES cells are trypsinized, and the modified cells are injected into the blastocoel of the blastocyst. After injection, the blastocysts are returned to each uterine horn of pseudopregnant females. Females are then allowed to go to term and the resulting chimeric animals screened for cells bearing the construct. By providing for a different phenotype of the blastocyst and the ES cells, chimeric progeny can be readily detected.

[0335] The chimeric animals are screened for the presence of the modified gene and males and females having the modification are mated to produce homozygous progeny. If the gene alterations cause lethality at some point in development, tissues or organs are maintained as allogeneic or congenic grafts or transplants, or in in vitro culture. The transgenic animals may be any non-human mammal, such as laboratory animals, domestic animals, etc. The transgenic animals are used in functional studies, drug screening, etc., e.g. to determine the effect of a candidate drug on prostate cancer, to test potential therapeutics or treatment regimens, etc.

### Example 13

### Diagnostic Imaging Using CA Specific Antibodies

[0336] The present invention encompasses the use of antibodies to CA polypeptides to accurately stage cancer patients at initial presentation and for early detection of metastatic spread of cancer. Radioimmunoscintigraphy using monoclonal antibodies specific for CA polypeptides can provide an additional cancer-specific diagnostic test. The monoclonal antibodies of the instant invention are used for histopathological diagnosis of carcinomas.

[0337] Subcutaneous human xenografts of cancer cells in nude mice is used to test whether a technetium-99m (^{99m}Tc)-labeled monoclonal antibody of the invention can successfully image the xenografted cancer by external gamma scintography as described for seminoma cells by Marks, et al., Brit. J. Urol. 75:225 (1995). Each monoclonal antibody specific for a CA polypeptide is purified from ascitic fluid of BALB/c mice bearing hybridoma tumors by affinity chromatography on protein A-Sepharose. Purified antibodies, including control monoclonal antibodies such as an avidin-specific monoclonal antibody (Skea, et al., J. Immunol. 151:3557 (1993)) are labeled with ^{99m}Tc following reduction, using the methods of Mather, et al., J. Nucl. Med. 31:692 (1990) and Zhang et al., Nucl. Med. Biol. 19:607 (1992). Nude mice bearing human cancer cells are injected intraperitoneally with 200-500 μCi of ⁹⁹mTc-labeled antibody. Twenty-four hours after injection, images of the mice are obtained using a Siemens ZLC3700 gamma camera equipped with a 6 mm pinhole collimator set approximately 8 cm from the animal. To determine monoclonal antibody biodistribution following imaging, the normal organs and tumors are removed, weighed, and the radioactivity of the tissues and a sample of the injectate are measured. Additionally, CA-specific antibodies conjugated to antitumor compounds are used for cancer-specific chemotherapy.

### Example 14

### Immunohistochemical Methods

[0338] Frozen tissue samples from cancer patients are embedded in an optimum cutting temperature (OCT) compound and quick-frozen in isopentane with dry ice. Cryosections are cut with a Leica 3050 CM mictrotome at thickness of 5 μm and thaw-mounted on vectabound-coated slides. The sections are fixed with ethanol at −20° C. and allowed to air dry overnight at room temperature. The fixed sections are stored at −80° C. until use. For immunohistochemistry, the tissue sections are retrieved and first incubated in blocking buffer (PBS, 5% normal goat serum, 0.1% Tween 20) for 30 minutes at room temperature, and then incubated with the CA protein-specific monoclonal antibody and control monoclonal antibodies diluted in blocking buffer (1 μg/ml) for 120 minutes. The sections are then washed three times with the blocking buffer. The bound monoclonal antibodies are detected with a goat anti-mouse IgG+IgM (H+L) F(ab′)²-peroxidase conjugates and the peroxidase substrate diaminobenzidine (1 mg/ml, Sigma Catalog No. D 5637) in 0.1 M sodium acetate buffer pH 5.05 and 0.003% hydrogen peroxide (Sigma cat. No. H1009). The stained slides are counter-stained with hematoxylin and examined under Nikon microscope.

[0339] Monoclonal antibody against a CA protein (antigen) is used to test reactivity with various cell lines from different types of tissues. Cells from different established cell lines are removed from the growth surface without using proteases, packed and embedded in OCT compound. The cells are frozen and sectioned, then stained using a standard IHC protocol. The CellArray™ technology is described in WO 01/43869. Normal tissue (human) obtained by surgical resection are frozen and mounted. Cryosections are cut with a Leica 3050 CM mictrotome at thickness of 5 μm and, thaw-mounted on vectabound-coated slides. The sections are fixed with ethanol at −20° C. and allowed to air dry overnight at room temperature. PolyMICA™ Detection kit is used to determine binding of a CA-specific monoclonal antibody to normal tissue. Primary monoclonal antibody is used at a final concentration of 1 μg/ml.

[0340] All publications and patent applications cited in this specification are herein incorporated by reference as if each individual publication or patent application were specifically and individually indicated to be incorporated by reference.

[0341] Although the foregoing invention has been described in some detail by way of illustration and example for purposes of clarity of understanding, it will be readily apparent to those of ordinary skill in the art in light of the teachings of this invention that certain changes and modifications may be made thereto without departing from the spirit or scope of the appended claims.

What is claimed is:

1. An isolated nucleic acid comprising at least 10 contiguous nucleotides of a sequence selected from the group consisting of the polynucleotide sequences hR07-001 through hR07-128 shown in Tables 1-128, or its complement.

2. A host cell comprising a recombinant nucleic acid of claim 1.

3. An expression vector comprising the isolated nucleic acid according to claim 1.

4. A host cell comprising the expression vector of claim 3.

5. The polynucleotide according to claim 1, wherein said polynucleotide, or its complement or a fragment thereof, further comprises a detectable label.

6. The polynucleotide according to claim 1, wherein said polynucleotide, or its complement or a fragment thereof, is attached to a solid support.

7. The polynucleotide according to claim 1, wherein said polynucleotide, or its complement or a fragment thereof, is prepared at least in part by chemical synthesis.

8. The polynucleotide according to claim 1, wherein said polynucleotide, or its complement or a fragment thereof, is an antisense fragment.

9. The polynucleotide according to claim 1, wherein said polynucleotide, or its complement or a fragment thereof, is single stranded.

10. The polynucleotide according to claim 1, wherein said polynucleotide, or its complement or a fragment thereof is double stranded.

11. The polynucleotide according to claim 1, comprising at least 15 contiguous nucleotides.

12. The polynucleotide according to claim 1, comprising at least 20 contiguous nucleotides.

13. A microarray for detecting a cancer associated (CA) nucleic acid comprising:
at least one probe comprising at least 10 contiguous nucleotides of a sequence selected from the group consisting of the polynucleotide sequences hR07-001 through hR07-128 shown in Tables 1-128, or its complement.

14. The microarray according to claim 13, comprising at least 15 contiguous nucleotides.

15. The microarray according to claim 13, comprising at least 20 contiguous nucleotides.

16. An isolated polypeptide, encoded within an open reading frame of a CA sequence selected from the group consisting of the polynucleotide sequences hD07-001 through hD07-128 shown in Tables 1-128, or its complement.

17. The polypeptide of claim 16, wherein said polypeptide comprises the amino acid sequence encoded by a polynucleotide selected from the group consisting of hR07-001 through hR07-128 shown in Tables 1-128.

18. The polypeptide of claim 16, wherein said polypeptide comprises the amino acid sequence encoded by a polypeptide selected from the group consisting of hP07-001 through hP07-128 shown in Tables 1-128.

19. The polypeptide of claim 16, wherein said polypeptide comprises the amino acid sequence of an epitope of the amino acid sequence of a CA polypeptide selected from the group consisting of hP07-001 through hP07-128 shown in Tables 1-128.

20. The polypeptide of claim 16, wherein said polypeptide or fragment thereof is attached to a solid support.

21. An isolated antibody or antigen binding fragment thereof, that binds to a polypeptide according to anyone of claims 16-20.

22. The isolated antibody or antigen binding fragment thereof according the claim 21, wherein said antibody or fragment thereof is attached to a solid support.

23. The isolated antibody or antigen binding fragment thereof according the claim 21, wherein said antibody is a monoclonal antibody.

24. The isolated antibody or antigen binding fragment thereof according the claim 21, wherein said antibody is a polyclonal antibody.

25. The isolated antibody or antigen binding fragment thereof according the claim 21, wherein said antibody or fragment thereof further comprises a detectable label.

26. An isolated antibody that binds to a polypeptide, or antigen binding fragment thereof, according to any of claims 16-20, prepared by a method comprising the following steps of: (i) immunizing a host animal with a composition comprising said polypeptide, or antigen binding fragment thereof, and ii) collecting cells from said host expressing antibodies against the antigen or antigen binding fragment thereof.

27. A kit for diagnosing the presence of cancer in a test sample, said kit comprising at least one polynucleotide that selectively hybridizes to a CA polynucleotide sequence selected from the group consisting of the polynucleotide sequences hD07-001 through hD07-128 shown in Tables 1-128, a fragment thereof, or their complement.

28. A kit for diagnosing the presence of cancer in a test sample, said kit comprising at least one polynucleotide that selectively hybridizes to the sequence of a polynucleotide sequence selected from the group consisting of the polynucleotide sequences hR07-001 through hR07-128 shown in Tables 1-128, a fragment thereof, or their complement.

29. An electronic library comprising a polynucleotide, or fragment thereof, comprising a CA polynucleotide sequence selected from the group consisting of the polynucleotide sequences hD07-001 through hD07-128 shown in Tables 1-128.

30. An electronic library comprising a polynucleotide, or fragment thereof, comprising a CA polynucleotide sequence selected from the group consisting of the polynucleotide sequences hR07-001 through hR07-128 shown in Tables 1-128.

31. An electronic library comprising a polypeptide, or fragment thereof comprising a CA polypeptide sequence selected from the group consisting of the polynucleotide sequences hP07-001 through hP07-128 shown in Tables 1-128.

32. A method for screening for anticancer activity in a potential drug, the method comprising:
(a) providing a cell that expresses a cancer associated (CA) gene encoded by a nucleic acid sequence selected from the group consisting of the sequences hD07-001 through hD07-128 shown in Tables 1-128 or fragment thereof;
(b) contacting a tissue sample derived from a cancer cell with an anticancer drug candidate; and
(c) monitoring an effect of the anticancer drug candidate on an expression of the CA gene in the tissue sample.

33. The method of screening for anticancer activity according to claim 32, wherein the CA gene comprises at least one nucleic acid sequence selected from the group consisting of the sequences hR07-001 through hR07-128.

34. The method of screening for anticancer activity according to claim 32, further comprising:
(d) comparing the level of expression of the in the absence of said drug candidate to the level of expression in the presence of the drug candidate.

35. The method of screening for anticancer activity according to claim 33, wherein the drug candidate is an inhibitor of transcription and further wherein the nucleic acid sequence is selected from the group consisting of hR07-021, hR07-041, hR07-045, hR07-046, hR07-047, hR07-048, hR07-053, hR07-054, hR07-054.1, hR07-054.2, hR07-062, hR07-062.1, hR07-062.2, hR07-063, hR07-080, hR07-088, hR07-089, hR07-095, hR07-095.1, hR07-097, hR07-098, hR07-108, hR07-108.1, and hR07-123.

36. The method of screening for anticancer activity according to claim 33, wherein the drug candidate is a G-protein coupled receptor antagonist and further wherein the nucleic acid sequence is selected from the group consisting of hR07-012, hR07-025, hR07-050, hR07-050.1, hR07-050.2, and hR07-050.3.

37. The method of screening for anticancer activity according to claim 33, wherein the drug candidate is a growth factor antagonist and further wherein the nucleic acid sequence is selected from the group consisting of hR07-083, hR07-092, hR07-093, and hR07-106.

38. The method of screening for anticancer activity according to claim 33, wherein the drug candidate is a serine-threonine kinase antagonist and further wherein the nucleic acid sequence is selected from the group consisting of hR07-060, hR07-061, hR07-067, hR07-115, and hR07-127.

39. The method of screening for anticancer activity according to claim 33, wherein the drug candidate is a tyrosine kinase antagonist and further wherein the nucleic acid sequence is selected from the group consisting of hR07-004, hR07-006, hR07-008, hR07-055, and hR07-055.1.

40. A method for detecting cancer associated with expression of a polypeptide in a test cell sample, comprising the steps of:
(i) detecting a level of expression of at least one polypeptide selected from the group consisting of hP07-001 through hP07-128 according to Tables 1-128, or a fragment thereof, and
(ii) comparing the level of expression of the polypeptide in the test sample with a level of expression of polypeptide in a normal cell sample, wherein an altered level of expression of the polypeptide in the test cell sample relative to the level of polypeptide expression in the normal cell sample is indicative of the presence of cancer in the test cell sample.

41. A method for detecting cancer associated with expression of a polypeptide in a test cell sample, comprising the steps of:
(i) detecting a level of activity of at least one polypeptide selected from the group consisting of hP07-001 through hP07-128 according to Tables 1-128, or a fragment thereof, wherein said activity corresponds to at least one activity for the polypeptide listed in Table 129; and
(ii) comparing the level of activity of the polypeptide in the test sample with a level of activity of polypeptide in a normal cell sample, wherein an altered level of activity of the polypeptide in the test cell sample relative to the level of polypeptide activity in the normal cell sample is indicative of the presence of cancer in the test cell sample.

42. A method for detecting cancer associated with the presence of an antibody in a test serum sample, comprising the steps of:
(i) detecting a level of an antibody against an antigenic polypeptide selected from the group consisting of hP07-001 through 07-128 according to Tables 1-128, or antigenic fragment thereof; and
(ii) comparing said level of said antibody in the test sample with a level of said antibody in the control sample, wherein an altered level of antibody in said test sample relative to the level of antibody in the control sample is indicative of the presence of cancer in the test serum sample.

43. A method for screening for a bioactive agent capable of modulating the activity of a CA protein (CAP), wherein said CAP is encoded by a nucleic acid comprising a nucleic acid sequence selected from the group consisting of the polynucleotide sequences hR07-001 through hR07-128 shown in Tables 1-128, said method comprising:
a) combining said CAP and a candidate bioactive agent; and
b) determining the effect of the candidate agent on the bioactivity of said CAP.

44. The method of screening for the bioactive agent according to claim 43, wherein the bioactive agent affects the expression of the CA protein (CAP).

45. The method of screening for the bioactive agent according to claim 43, wherein the bioactive agent affects the activity of the CA protein (CAP), wherein such activity is selected from the activities listed in Table 129.

46. The method of screening for the bioactive agent according to claim 43, wherein the bioactive agent is an inhibitor of transcription and further wherein the nucleic acid sequence is selected from the group consisting of hR07-021, hR07-041, hR07-045, hR07-046, hR07-047, hR07-048, hR07-053, hR07-054, hR07-054.1, hR07-054.2, hR07-062, hR07-062.1, hR07-062.2, hR07-063, hR07-080, hR07-088, hR07-089, hR07-095, hR07-095.1, hR07-097, hR07-098, hR07-108, hR07-108.1, and hR07-123

47. The method of screening for the bioactive agent according to claim 43, wherein the bioactive agent is a G-protein coupled receptor antagonist and further wherein the nucleic acid sequence is selected from the group consisting of hR07-012, hR07-025, hR07-050, hR07-050.1, hR07-050.2, and hR07-050.3.

48. The method of screening for the bioactive agent according to claim 43, wherein the bioactive agent is a growth factor antagonist and further wherein the nucleic acid sequence is selected from the group consisting of hR07-083, hR07-092, hR07-093, and hR07-106.

49. The method of screening for the bioactive agent according to claim 43, wherein the bioactive agent is a serine-threonine kinase antagonist and further wherein the nucleic acid sequence is selected from the group consisting of hR07-060, hR07-061, hR07-067, hR07-115, and hR07-127.

50. The method of screening for the bioactive agent according to claim 43, wherein the bioactive agent is a tyrosine kinase antagonist and further wherein the nucleic acid sequence is selected from the group consisting of hR07-004, hR07-006, hR07-008, hR07-055, and hR07-055.1.

51. A method for diagnosing cancer comprising:
a) determining the expression of one or more genes comprising a nucleic acid sequence selected from the group consisting of the sequences outlined in Tables 1-128, in a first tissue type of a first individual; and
b) comparing said expression of said gene(s) from a second normal tissue type from said first individual or a second unaffected individual;
wherein a difference in said expression indicates that the first individual has cancer.

52. A method for treating cancers comprising administering to a patient an inhibitor of a CA protein (CAP), wherein said CAP is encoded by a nucleic acid comprising a nucleic acid sequence selected from the group consisting of the sequences outlined in Tables 1-128.

53. The method for treating cancers according to claim 52, wherein the inhibitor of a CA protein (CAP) binds to the CA protein.

54. The method for treating cancers according to claim 52, wherein the inhibitor of a CA protein (CAP) is an inhibitor of transcription and further wherein the CAP sequence is encoded by a nucleic acid comprising a nucleic acid sequence selected from the group consisting of hR07-021, hR07-041, hR07-045, hR07-046, hR07-047, hR07-048, hR07-053, hR07-054, hR07-054.1, hR07-054.2, hR07-062, hR07-062.1, hR07-062.2, hR07-063, hR07-080, hR07-088, hR07-089, hR07-095, hR07-095.1, hR07-097, hR07-098, hR07-108, hR07-108.1, and hR07-123.

55. The method for treating cancers according to claim 52, wherein the inhibitor of a CA protein (CAP) is a G-protein coupled receptor antagonist and further wherein the CAP sequence is encoded by a nucleic acid comprising a nucleic acid sequence selected from the group consisting of hR07-012, hR07-025, hR07-050, hR07-050.1, hR07-050.2, and hR07-050.3.

56. The method for treating cancers according to claim 52, wherein the inhibitor of a CA protein (CAP) is a growth factor antagonist and further wherein the CAP sequence is encoded by a nucleic acid comprising a nucleic acid sequence selected from the group consisting of hR07-083, hR07-092, hR07-093, and hR07-106.

57. The method for treating cancers according to claim 52, wherein the inhibitor of a CA protein (CAP) is a serine-threonine kinase antagonist and further wherein the CAP sequence is encoded by a nucleic acid comprising a nucleic acid sequence selected from the group consisting of hR07-060, hR07-061, hR07-067, hR07-115, and hR07-127.

58. The method for treating cancers according to claim 52, wherein the inhibitor of a CA protein (CAP) is a tyrosine kinase antagonist and further wherein the CAP sequence is encoded by a nucleic acid comprising a nucleic acid sequence selected from the group consisting of hR07-004, hR07-006, hR07-008, hR07-055, and hR07-055.1.

59. An antibody that preferentially binds to a CA protein (CAP) that is expressed on a cell surface, wherein the CA protein selected from the group consisting of hP07-003, hP07-014, hP07-035, hP07-042, hP07-044, hP07-051, hP07-064, hP07-067, hP07-071, hP07-075, hP07-078, hP07-081, hP07-083, hP07-092, hP07-093, hP07-102, hP07-106, hP07-112, hP07-120, and hP07-128.

60. The antibody according to claim 59, wherein the antibody is a monoclonal antibody.

61. The monoclonal antibody according to claim 60, wherein the monoclonal antibody binds to the extracellular domain of the CA protein.

62. The monoclonal antibody according to claim 60, wherein the monoclonal antibody binds to at least one human cancer cell line.

63. The monoclonal antibody according to claim 60, wherein the monoclonal antibody is prepared by a process comprising:
(a) providing a hybridoma capable of producing the monoclonal antibody; and
(b) culturing the hybridoma under conditions that provide for the production of the monoclonal antibody by the hybridoma.

64. A hybridoma that produces the monoclonal antibody according to claim 60.

65. The antibody according to claim 59, wherein the antibody is a humanized antibody.

66. The antibody according to claim 59, wherein the CAP is expressed on a cancer cell surface but not on a normal cell surface.

67. The antibody according to claim 59, wherein the CAP is differentially expressed on a cancer cell surface relative to a normal cell surface.

68. The antibody according to claim 59, wherein the antibody is linked to a therapeutic agent.

69. The antibody according to claim 60, wherein the antibody is linked to a therapeutic agent.

70. A pharmaceutical composition comprising the antibody according to claim 59 and a pharmaceutically acceptable excipient.

71. A pharmaceutical composition comprising the antibody according to claim 68 and a pharmaceutically acceptable excipient.

72. A pharmaceutical composition comprising the antibody according to claim 69 and a pharmaceutically acceptable excipient.

73. A kit for detecting cancer cells comprising the antibody according to claim 59.

74. A kit for detecting cancer cells comprising the monoclonal antibody according to claim 60.

75. A method for detecting a presence or an absence of cancer cells in an individual, the method comprising:
contacting cells from the individual with the antibody according to any of claims 59 or 60;
and detecting a complex of a CAP from the cancer cells and the antibody,
wherein detection of the complex correlates with the presence of cancer cells in the individual.

76. A method for inhibiting growth of cancer cells in an individual, the method comprising: administering to the individual an effective amount of a pharmaceutical composition according to any of claims 70, 71, or 72.

77. A method for delivering a therapeutic agent to cancer cells in an individual, the method comprising: administering to the individual an effective amount of a pharmaceutical composition according to any of claims 70, 71, or 72.

The application's sequence listing, which the Patent Office published only in electronic form, follows.

SEQUENCE LISTING (866 sequences)

SEQ ID NO: 1 - DNA, 24883 bp, Mus musculus
  misc_feature (1)...(24883): n = A,T,C or G
ttgtctacccacaggcacacggaaataaatgaaagccatctaggatagtaacaaatgtaacatttcgcccgattgaacaaagcaaggtgcaggctttaaaaacacctgaattcctaccctcaggaagtcctttaggaatgcaggaaaaggccacacagacattaagcagcaaaatcctgggtgggaatgcccatgaaaacctcacaataaatttccacatcctgctgacctagtcagtggaacgcctggcggtgtacagaacccgcttttgtttgttgtttgtgcaactaaaaggcccctttttgttctgttttgcagggtcatggatcatccttcagcagtgtacgccctagaccagcgctctagcgctgagccagtataccctacccacagctaagcgtctctttcctaatctatgctcatctgcgtttctgacatagcatgcttatgccactttgctcattagatatgcatatatgtatagtgcatatattatgggctggttaagtagctcagtacacaaagtcttttaccaccaagcctgggaaccagagcttcatttcccggacatgaatggagtaggaaagagagagccaattcctgaaagctgtggtctgacctccacatgtgcatcaaagccagtgagtacgcatgtgcatacacacacaaataaataaatgtgaattatagtaaatgtataatacataagggagataagaaagggtaattgggggtgaataggatcaaaacatatgcacatgtgtgagattgtcacagaatcaatttaaaaactttagttgtgtgtatagatatgtatgctagacttcacatttatatgcatgtacatgcatgtgtacacatgcatacatgatgtaaataatgctgtttcttgtggaaagaaaggtttgagaggctggagatcgagctcagtcagtaaaacgtgtgctctgcaagtacgaggacctgagttcagatccccagatcccatatgacagacaatgttggccatggcagtgcccgtcagtaatttcagtgcctggaagacactgacaggaggactcctggggctcactggttagtcaaatgagattgcttcaagttcagtgagagaacttgtctcaaaaatataggatggagaactgaagtcaactcaagccttctcctcgtatatgcacataaacaggcatgcacacatgtgcacacacaagcatcatatacatgtgtacttgtaagtacatacaagcatacatacatgcaaaggttcgggcactttccataagctgggaatggatgatgctgacacagatgcttctcctgtttggttgaaactcagtatagaagggagtcctgcatctcttcagcaggtctctgagcccaagccagcagacataaagagcttggcgctgtcacaatgttgctgtaaagggcaagcgaagagtaggcatttagtgggatctttgccttgctctgagatcccctgaggaaagaatgtctgctttgggtttctcaagctctgaactccggtcgtctctacccacagtctgagaggccagggcagaaatgacacccaggctggctgtcctctgctcaagaaaatgctgggcaggcacatccacctgtcctgcactgtgtctcacagctgtggtataagcagagcctttgtcctcccccctccaccacacacctcccggcaatctcctgccgagatatttacatatatgtaaataaagaacccaggaagaaaatacaaatcagaggtaagccaccagtaggctaacaagagaactccagctcgagcacctgaattttagccatggctgattagcattttttctttgcttccagacaaaaccctctttgctctggtgcctcagttgccagcttcataaaagcaatggccaggattggtcacagccattgaggacaataccttgctctgataataagacagaggatagatggagacagaggagacacaatcaaagcagtggaaatctgcctccctgtgaggtgcaagacaacagtccacgtgtgtgtagttcccaggcatgcttcaaaaccaacttcctggcgtcggaatttgctggaagggctgggaggcttgccagcaagtccatcaaagttcacttcgatttgcattttcaccatgtgtgacatgctttttagtaaacaggctctcctaggctgtctctctaggggagggtacttcaccgttctctccggcagtgtctgcttgctgagttcaggactgggagagctacccctgcaggctttctctctccgtgtgtgaacttcagctggattctgatgtccatgctttgtgtggcttgcacttttcttgagagcatgcaaggagaggtgactgttcattagtcactgaagttaaagaagtaaaaaattactcttttaatttttctttctttggcatggagttctctgtactttctctttttgtttttgttttgttttgtttgtttttgtttttcaagacaggtttctctgcatagctctggctatcctggagcttgctctgcagtccaatctcgaactcagaagtttgcctgcctctgccacctgagtgctgggattaaagatatgcgccatcacttcctggtgtctctggacctttttttttttttttttttttttttttcgagacagggtttctctgtatagccttggctgtcctggaactcactctgtagatcaggctggcctcgaactcagaaatccgcctgtccctgcctcccagggcgtgtgccaccactttaaaactgactattgtccttcttctccaacaaggactggagaaatgattgtactgtttgtttttctgcactttgatatgggagatgccatttaaatatatgtcctacatatttgtgtgtatgtatgtatatatatgtatatatgtacatatatgtgtgtattatatatgtatttatattgttcatatgaatgtaggtgtgtgtgtgaatgtgtgtgcacatgaaagccacaagttaacctctaatgttgtttctcaggcatcatctccctcggtgttgtcttttttttccccccagacagggtctctcactggcctggagcttgccaattacaataggcttcctggccacagagcctcagggctccctgtctctctctatggtgctggggttgcagagtgctgcttaccaactgagctgtctctctagccccaaaatggttgtttttaaaaagcatcctgctagggttttttgtttgtttgtttgtttttgttttggctaaggacataaggtaaacaagtcagcagaactcccttaatatagcccagacgctgctgcaaatgggcattcatttgcaaaaatacattttttttttaatcttgccaagctaaaagtcagtctagattattctatcggctagcttctatctcaagagaagtcccgacgattgcaaggaaagcttatttgtatgagttgtcatcaaggtagatcccacaacaccttcctaaccaggaacttccaggtggtctcgcatatttcctctttctgtaactggtagcccactgtcccagtgcccaggggccagcactgggatctcacagagagagcagataacttagtgagctttctctctgcattggaagaaacgtgtcaccagacttggagagtaactttccggcttggtgaatgcgataaacattttaccacctaaataacccagaatctttcatcctaatggcaatagcaatttttttgtctaaggcagataaaaggccaggacatggtcagacaaccagatctagagttgaagcaactgctatttgtccaccatcttcatttgttgtgaatgtaatttttcttggtttgagggttttgtgaattgtactggaatctccccttttcataatacagatacaagcagtactcattttctctctctctctttctttctttctctttcttccttccttccttccttccttccttccttccttccttccttcctttctttctttctttttttttcttttttgattgtgatgctctaggtagtttgaggatagtctcaaacgcatgatcctcctgcctcagcctcctgtattctggatttatagcatatacccccacacctggcttctatttttgcttatatttagaaatgtgaaccctcttttgtaacggccccaaaactgtggaaaaaaaaaaaacaacaaaaaacaaaagcatgttccagactgtaaaactttattggcagctgtaatttttttttcgtattttggtttgtttgttttgagacaggaatacacagcccaatggcttgaatttgcaaccctcctttgctttcctttctgtgataggctcttactatgtagaccaggctggtcacaaactcacgagtttcccctatatctgcctccaagtgctgggattaaaggattgctctaccaagcctgggctgcaaaacatatgctatttctttagttgttatataagcacatgggtattgtgtatgtgggcacacacatgccatagtgcatgtgtggaagttagaggaccactgtggtgagtcagatgtctccttctaccttgtggctctggggaatcaaactccaagtctgcaggctccataacaaagcacccttccccactgaggcgtcgccgtgtcagccgagtcagcccacaggacagaacgtgtgcttgaaatatcttcctagaatgtctctatgacagatgcaagaaatatcacgtcatcacttactatctgtggccttcagtggcgtttggttatctcagttccctttgtaggactgaatgtggctgtggcaaacgttcatctttttttttttaagccggaaagctaatgagaggatactgggcttttaatacattcaaacgttgtccacccgtcttcctacggcttatctttcaaaggactccagccagtgtgttaactatacacaaaaaccatagccagctaagaacactccttccagttccctttctaaaagccagtagaggggggccctggctccaaggctactgaatctcttccaggtctcctgaatttttccttgcagatagaataagggtatggcctcagtctctcctttatctgctttccctacacacacacacacacacacacacacacacacacacacacatacacacacaaccactttttgcttgaatcttgaaattccaacatgcctctagttaacatacatccagaccccagttttgctctagatggggacctgtatggatagagacacatgctgatggcagcagctcagcttctaaaacctccgtgctctgatctggcctggttcttagatgctccacactcaactgctttcctaatactaaaaatccccgtggacaatggagggtagcttcgaggaggttcatcagaggggaagcacttgaaaaatctgtgagatcacccccaacaaatgtcattgtttagaagaaaggcccttgaacccgttctagaaggttcgtctctgttgtcgtagttacagtttgtggaaatgtattcatattaacaagcttgtctggttttatatgccctctccccccaatccccgcctccccattgctcactttcttgccagtcagcaaggtgggcagtgccacccacagaaatgcaaatgacatgtgaggaattattttctccttcatggaagctgaggtcagaggtgagaagaccttactatggcttttttttttaaacatcattttcgttagacagagagagacagacagagagacagagagagagagacgagagacagacagagagagacagacagacagacagacagagagaatgcaaacttgagtgcaggcacattttaggaggtaagagtcaaacctcagttatccacccttgccttccatcttgtttgagatggggtcttttgtcctttcttgtttagtacctcaggtagctggtccttgcgcgtctggggagttctatctctgaacactgaaattatggccacacagtagttggcttacatggattctggtgattctagttcaacccctcaggcttgtggagcaagtgcttagccactgtgcctgttcccctcgtcctcaggatgactgtcacttaaggctgccccgtacggagggggagccattaatccatggagttcacaaatttaggatgccatggtataaagcatccataattccgctggggtcctgaaggcagaactccacatgggtgatcttgtagcaccctatcctatagtctgtgggcacagggcttcctgcatgcctggggctcacctccgctgcagtgaggcctggggaggagagtcacagatctgatgttcatgtccaatgttgtggttatagactgagatctgttttggcccacagacttaagcattagaatcccttcccatccccctacacagatttgtatttaaaaggagagatctttggaattaaagtcaggaaaactgttgctcgtctagtctccacagaccccctccctgtagagtatttccttcagttcttaagacaaatcacaagtttcccgtgtcctgaataagcgccagcctcaacccacagcatctgcctgcctgtccactaaggaatgcacacacagatgctgcagccaatcctgtaaccttgactcttggacagccaagctcatcctcactctcttctgggaggacccggagccttaagcaagagggcagtctacgtgactaaaacataccaacttcctctttcataagtcgtcacatggtgagctacaattacaattcctgccttgtctgtgcgaattgcagacgcattgcctcaccctagaaaccccgctcctgtgtgtggaggaggcaggctgtaactccagcagcagccgctttggacaggatccagctccagtctgcagcgggagggagggtagtgggtggaagacagaaacaaagctatgtttacttagcatacatcgattaaaaaaaaaaaaaaaaaaaaaaaaaaaaacggctccggagttacatgaaaggccaggcatcatgaaaggctgttgatacagtataagggtttgctgccctggatccaggacctaccttaaccccctggagccgggttgctttttatgaaggacagcccaaatctaaaatagcctttccattttccagcaggnnnnnnnnnnnnnnnnnnnnnnnnnnnnnnnnnnnnnnnnnnnnnnnnnnnnnnnnnnnnnnnnnnnnnnnnnnnnnnnnnnnnnnnnnnnnnnnnnnnnnnnnnnnnnncccctgcgcacagctttaacagctcagtttcaacatgaagccagtgtgaaatacaaaggaaatgccggtcttttggagaagctccacttcgcatttctcaaggcagacattgtatgtacctcggcaattctattttgggttgtagtggcggctttccctggagagggcattgtgggctgctggcaggtggaccgagtacaatcaggccaggctttcaagggaggttctgctttgttttaatgtttctgtgtctgcctagtgggccatctctcagggcactgagatgactctgcagtcagggcagcttcatctcctccactcaggttctgcacggtcaaaatcacgtgctcagatgagtgacacagggtcttggaagagagtgaccagactgacaggtcctggagcaggtgcccaaaccagctggcaccagctgcttctgggaatggatccgggtaggccccattccaggcttggagagggtgaggcaggcttgtgactggaaggggagctggggaggcccttgacacagatgtaccttctctggaaagccccgagagagacgttcaaggttagcctgtggacgcccttggcatctggcgctaagctttctgtgccacctccaacaggtttattcttgtgctctaaacagctctctgggctgcttctctgtggggcgtgtttcctcttgtggctattctttgaagcaacctggcatttttcaatagcagccaccggagaaaaaaaggtcagcagatttttcccccctccctttccaccttccaatccagttgtaggaaagctaatgtacttagtaccctgctcttcccacacttaaccagcccattccaatcttggggagagaggtggacctgcgttgttcaccacaaaagcaaaagcggctcttactcagagtagtaggtctcaaatcagagcctgactgaccgaccactgacagcacacaccagtccctgctccctaccaaagtgtacaattcggtgttccgtccactctgggcagccctcactgcccagcgtggaagggaacaacgaagcgatgctgccaggcgcgtctgtgcccactgggctaagccggatggtacaacagacagccaagtccacccgccagcgcacgccctaggcgcaaaggggacagcgcgcgcccagagttggccactcgaagttcggccccgcggaggcggtggggcagggcctactagccagagaccgggggcgggtcctgagccgtgacgcggtgcgctgcagagcccagatccctggaatgtgcactagctcggcgcggccccagggcccgcggcgctgggcacgtcttatgtggagtttgcgcagtggcagcgtcccttgcccacgtcacgcgctcgctgcacagacctacataagacgctgggcggcggcgcctgaggagcctcgggcctgtgcgtcctcctttcagtgcacgcgcaaaagaggccgggcctgcctgagcactaagtttttgtaaaacttaaaggggcagcggcagtgtgtagttgcttcctcgaccaaaacagggcagagtgttgatagcgtgcgcgcgcccagctgaagccaagtgagacgctaacaaggaaaagtccaaagtgcgcctcgctatgctccaaattccatgctcaggaggctgccagtaaccaagtgataaagtggcattgcatgtaaaataaaacagtttgcacgatttaatcgaaagaacagggccatgggttggagcatcctggctgggtaggcggggtgacacgggactcttggggacgcgagctgcacacctgcggcgctagggccgcgtgaactggtgctgcgcctcagtacccggcgcgcacgcgatcgagaaacggannnnnnnnnnnnnnnnnnnnnnnnnnnnnnnnnnnnnnnnnnnnnnnnnnnnnnnnnnnnnnnnnnnnnnnnnnnnnnnnnnnnnnnnnnnnnnnnnnnnnnnnnnnnnnnnnnnnnnnnnnnnnnnnnnnnnnnnnnnnnnnnnnnnnnnnnnnnnnnnnnnnnnnnnnnnnnnnnnnnnnnnnnnnnnnnnnnnnnnnnnnnnnnnnnnnnnnnnnnnnnnnnnnnnnnnnnnnnnnnnnnnnnnnnnnnnnnnnnnnnnnnnnnnnnnnnnnnnnnnnnnnnnnnnnnnnnnnnnnnnnnnnnnnnnnnnnnnnnnnnnnnnnnnnnnnnnnnnnnnnnnnnnnnnnnnnnnnnnnnnnnnnnnnnnnnnnnnnnnnnnnnnnnnnnnnnnnnnnnnnnnnnnnnnnnnnnnnnnnnnnnnnnnnnnnnnnnnnnnnnnnnnnnnnnnnnnnnnnnnnnnnnnnnnnnnnnnnnnnnnnnnnnnnnnnnnnnnnnnnnnnnnnnnnnnnnnnnnnnnnnnnnnnnnnnnnnnnnnnnnnnnnnnnnnnnnnnnnnnnnnnnnnnnnnnnnnnnnnnnnnnnnnnnnnnnnnnnnnnnnnnnnnnnnnnnnnnnnnnnnnnnnnnnnnnnnnnnnnnnnnnnnnnnnnnnnnnnnnnnnnnnnnnnnnnnnnnnnnnnnnnnnnnnnnnnnnnnnnnnnnnnnnnnnnnnnnnnnnnnnnnnnnnnnnnnnnnnnnnnnnnnnnnnnnnnnnnnnnnnnnnnnnnnnnnnnnnnnnnnnnnnnnnnnnnnnnnnnnnnnnnnnnnnnnnnnnnnnnnnnnnnnnnnnnnnnnnnnnnnnnnnnnnnnnnnnnnnnnnnnnnnnnnaccgccactgtcggccaagggacctactgctgcagccgccgccgcagctgggccacgcgggcgccgaggccgcgcgcgctcaggctatggagcgctacccgctggcgccggatcgtgccccgcgcctggcctccgacttcagcacgcgtgcgggtgcaggcctcccacagtcggccgcgcagcagtccgcgccggcgaacggcatcctggtgcccaacgggttctccaaactggaggagccgccggagctgaatcgccagagcccgaaccctcggcgtgcacacgccgttccgcccactctggtgcctctggtcaacggttctgccgcgctggggttgagcggccgtgctgcggccacactggccgcggtgagcggaacaccgggcctgggagctcagcccgccgagttgggcacccacaaacgcccggcgtctgtgtcgagcgcggcggcggagcacgaggcgcgcgagccgagcaaggagaaggcgcagcccgcgcaccggagtccggccgacagcttatccagcgcggccggggccagcgagctgagcgccgagggtgcaggcaaaggccgcgcgcccggggagcaggactgggccagcaggcctaagacggtgcgggacacgctcctggcgctgcaccagcacggccactcggggcccttcgagagcaagttcaagaaggagccggctctgactgcagcaggcaggttgttgggtttcgaggccaacggggccaacgggtctaaagcaggtaggggcgactgcggggcgaggggagaagggatggagggcgtggggttagaggcagcgtttgagcgcccgcccacccgtgtgtgtgtgtgtgtgtgtgcgcgcgcgcgcgtgtgtgcgcgtgggtgggtgggtgggtgggtgggtggtagggatccattcttccatgcacagttttgccttaatccagaaacaacaaacagccaacttcctggtcggcccggggctgaaccagagcttagtggcaacgtggtccctctgctgaaccagcacaacagggatgagtcagaacgggttgataggcagcgacacggggttttcctttcccagcacattcttggatggaagcgtgagggcagcagtcaccctttaacctgtctgctaaatgcagtcacatgagctggtctggggttggagcctttcaggcaggatcccatgacttggcttaccttggaggtggtgtgcaggctcagagccctttattaggggaaatgtttgaagctgcgtgcagaactatgtgtgtttttgaagatgagagctgtctctttgggggtacgttaaagttaatcttccttttcttccatacctgtctctttccagttgcaaggacagcaaggaaaaggaagccttccccagaaccggaaggggaagtcgggccccctaagatcaatggtgagacacagccttggctgtccacttccacagaagggctcaagatccccatcacccctacatcctcttttgtgtctccaccaccccctactgcctctcctcattccaaccggaccacaccgcctgaagcggcccagaatggccagtccccaatggcagccctgattttagtagcagacaatgccgggggcagtcacgcctcaaaagatgccacccaggttcactccaccaccaggaggaacagcagcagcccgccctctccctcctctatgaaccaaagaaggcttggccccagagaggtggggggccaggccaccggcagcaccggaggactggagccggtgcaccctgccagcctcccagactcctctctggcagccagcgcccccctgtgctgcaccctctgccacgagcggctggaggatactcactttgtgcagtgcccgtctgtcccttcgcacaagttctgtttcccttgctccagacaaagcattaaacagcagggcgctagcggagaggtctattgcccaagtggagagaagtgtcctctggtgggctccaatgtcccctgggccttcatgcaaggagagattgctaccatcctcgccggagatgtgaaagtgaagaaggagagagactcgtgactttctgcgttcagaaaagcccatggttacccttaactcaaacttgttgaactgtatatagatctccatacatatatatatatatataaatataaatatatatatccaagacaagggaaatgtagacttcataacatggctgtataattttgattttttttgaatacattgtgtttctatattttttttgacgacaaaaggtatgtactttaaggcattttcttcttttgttaacgttgttaggctgtctgtgtttgactctttgggtgacagttgctgttctttgtaggctgcgacttggctgcttttgtttttttttgttttattttgttttttgttttttttttgtttgtttgtttttaaagagcacttggcaaacaaatgcttctagctgtatttgtatgcacttattttaaaaaagaaaaaaagccaaatacatttttttctgacattgtaagattgccttactgtctgtcatttctcctcgctggcctctctcaggctggaggccagttggtggaggagaaaggaagtgagtggaagggggacacctgtcacaagggcattccccgtcccccaggaaatgtcacccacctttccgagggagggaaaatggggtttgaatcttgtcaacggttcagctcttgcaatactggtcgtcagaggtgctgctgaaaggttatttgcaacattgtgtgttcagggtttgttttgttttgttttttaatggaaggcaagctagctgatgtttgctctgcccacgtgaccggttgtaagctttcagtgctgcgtgctcctcctcctcggtggccccaccggtggttccagctgtagaagtagttgtcagggtggtgtggaaatcaggtggctttcctgctgaccagcctggctctgaggtgctccttaagtgttgcaggccccgggtgaacttgtgggattcgtgttttcttctgttctggtgtgtttggtctacgtgttcagttcttgcctgcgtgctgtcccccttgtgacgagtgcttactgcagtgtgcacgttgatagtcacagccttggatgctgccaggaggacctgtgggcactgtcagtggtgggcccagtgtgggtagaggaagcctgcagtttttccttaggtgtgtctgaaatactaagagaataatactgttctgaaaaaaaaatgagagagaacctagtgagaatacttacatgaagggtttttacataagcaagccccacctctaactatttttagaagcctcttgtaaactaatttcttttggtcactattttgccttagtgaagtgattgtttttaatgtaaacaacatcaggtcattagctaccagtagtggtgcccttagtgatgctggttttgtgggttttttttttttcttcttctttgtgcttttttttggtttaatgtcaacaggaacactaccctctcaaccctgacttgaggtgtttgtaacttggccttgtcggctcaatcatggcttctaagtctactatggtttgtgtgttgttcacagcctggcttctattttaatttgaaaatagagattatcaccagcttgacatcatttctagttacttagttcttggttttgttttttgttttgtttttagtttttgtttttaaccttttttttttttctttagtagtcaagttactaacacttgacactgaagcaaatacagtatttcttgtctggtttttcttgagtgcacctcggcctctgttatcttgttaccagttgtggtgttacagccgggcttgcatgattagaccagttgatcctaactgtgactcaggtccgacaggtctctctctgaggcagatgtacacacacacacacacacacacacacacacaaagcagagtcagtttcacctgcccataaagacatttgtgaagggctcaactattatggtctgtactataaatgtgtttctaagcactttattataaactggaatttggcctcatagatgttacaactagattagtcatttgacctaatttgctgtggctgtctgtaatctcagcacagataaggtctccaaaaaaaccaagaataaagaaccatcctgctgaacagaagtctgtccagcagcagaaacggccacctgtggtttttctctctctactagtagcaaggccagatctgacctgtttaaaaggggccgtagtttgagattaagggtggacttcagaaggcttgaagctaaagtgttgtcctggagtggggcggggcagggtcgggggagtctttctctggcctactctgaaaccggtcacacggggccctcggttgatcttttcttgtccttgatgacactgtggatgtagtccacagctgggtagagatgtcaggttcccaacactgcttctgctgtgactttgatatgctcagaatagtggggggggatggggtggtcggtcaggtttttgtttttttttcttttaacagtttatagaatttaacagatagagttagtgtctttcatgtggcctcactctggagttaatgagaacatacacgtggtttacagcttttctatatacctttccctggccaccaggtgttttgaaagtgtgccacctttcaaactttgctttattttttttttaagtcgaaggtgataatttttctatatctgatgaaactcaatgtctactgaaataagtgtaatctgagctatcaacggtatattttaaacccacgctatggagatatcacctgcattctgtcatttgtcagatttacagtactttttttttcttttagcattaaataaaaataaaattgggagcactgaatgttttccaagaccttttttttaaaaaaaaattttttttaaaaaatcaaactcagggcggctgttgtggcgatcgctagactgaagggtgtatgtatggggttggggttttcaggacaagtgagataggagacttgtagtcaaggggggaagggcagatggggaggggcacagataggatcagagcagaggtcatctgggaagtacttgtttgctttgcaagctggtagcagagccactctgcaagaattgggttggaaagagcagatggccgccgggacactgaggtgcctgtcctgtcctgaatctgctctttgaaaagttttgtgatagtcgacatcttgggccatagacaagtactctcttggtgggagtggggtctacatttgggaaagctgtggagtgaggtgtagtagagccaccggagggggcttacttaggtgtgaatccccactgtctaactggcagttgtcaccacatagcaggggattcctgcagggtacacttttttcttgatctcttggcctgtggtagggaaggctcctgggatagtgagctgtgaaattttggaagagttcaaggctagaaatatacagtatgtattaagatgacatcaacagcatctttgggaggaggggtggtcctgtgacttgtatggggaggctatcccatatatatttagttttttcatcagcaataaatgactttttcatttaataacaagaaataggctaaacttagctttgggtttcttggaaatgctagatttatttatttatttatttaattttggtgacacaataactcttccagaagtcgctttaaaaaaaaatctttaagtgccttgcaaagataaagttaagtagactaggttcttgttgtggggaggaaagggttaaaaaaattggggaatcctagttttgagacaagtcttccactgctccacgtgacttatagatcatcttgtttgatgagtgaaatgcccaccttcctgattacgtatggaatcttctagcagaatgtttgggcaggctaccattggtctggggtcaccctcatctgcctgccttctgttcataggaggctagaagacatgtttctctttggtcacagacagtgaatgcaatcatacttatttcatctcctagggttctagatgcagcctgagttttaactccttgagggcttctgcttagacccgtactaccagaattaagtaggctgtagacacagaaatgcaaagttcccagactatcagtcatgctggtccctccttcctgttttctgggggcagcctgcgtcttcaccagaatgcccttctggtgaaggcacacacacacacacaacacacaactgtgtagcttatagattatgtaagaagagactggaagttggagatgattgggtgtatggattagcgctggatatgtctgagttcccagctaagtactgaccaggggtatcacactacccctggtgatcattattacgactgcacagtagtacatccgaggcggaatgcttgcctaacatgcatgaggccttgggttcagttcccaggactgaaacacctcagccggtctaactcagcagtgtcacctgcccccatgccaggtgtatttgacaccacttacctttgatttatttcaaaagtattacagctctttttaaaaaattacaaaattgtgtttgtagggtttgtatgtctggtgtgtttaaatcacaacatggtaccctcttggttggacttcaatataaaacattccatgcaacgagaaaggtattttagggggaaagtaccatagagacgtaactttttaattatttggacatggtatcataacgactatttgggtttttttgttgtttgtttgtgagacagtctcattgcacatagcctggaacctgctttgtagaccaggctggcctcaactcagaagtggtctgctgcctccagcttcctgaattctgggactaaaggcacttgataccacacctggtttaaaaaaaaaaaaaaaaaaaaaaagtgaccttttatttttaatgaaaaagccagtagaatgactgttggcatggtgtaagttttttctatgacaacaccttaaatgtgtctgggggaaagtaagaggctggccctctataatgtacactggctcaaaaatcaaaaaacatcctttgatttacccccaaaacattagaaactcctctaagataggttagatccagagaccaagatgacaggattcccagtgagaattcagagagcatcaggtactggctggcctttgaatggggctgtagaactgggctggtaaaatacgcagtgcaccctgcacggtgagctaacacatcctgtgtagggtgacaccaccacatttgaatatttctaaatatagtgtacattttgtgcagaataacttgttacataatctggagatcttaaccactcttacttagcaattagtgattctaaggaagtcatcagtatcattagcagttcagatgctcaccaggggaacggggacggggcacagatgagtcaagctttgctggatgagcgtggaggcaagacagatatttaggtcactgcagatttctctgccacttagtaaacatctttcctgccgcagcacagcgtcttccgaactgtgtgtgtgtgtgtgtgtgtgtggtggcggtgtctccaggaaaacaaaacagaaacagcattttcagcacagctaagggcctccatttattttaatgttggttggttttgttttctgtagcccttgctgccctggaactctattgtaggaaagactgtcctcgaactcctggagatccagcctgtgcctcccacgtgctgggattaaaggtgtgcacgaccacctcccagcttttgttgtttcttttttaaatgagacacaagttatgttctcttataatttttaagtatgctatcaagagatctgcagaacacaggaagggctattgggatccacctgagttataaccttatagccatccatcttggattgagttgctactgggaaaaggttgctgggagttgctgggggttgagggagcgttccacccaggctgttaccccattttgttatttgtgctgccaacagcaattcaattagccgttttgggcgataaaagataaagatttattgtacctcatatacaactgaaatcagaatttcacaggcaggtcacagtcgttagggactgttctaataagcaccatatgggtgtctgtaccattcttttaacaaccccaagcaggcacctcaagctacagccacttgtgaggttagggtcaaagccactgggtagaacccttttcttggccaagggcacagtggacaggttggtccacagaggctcccctacctaccatgagtgtgggaaataagagtagaggctaactccacacacgagagaatggagtgtcctagaatttataaaccgagccacagcagccttctgacccaggaactcaagacgggcatgcgcacaatgcatgcattgtgcagcgcacacaagggccatgctttggctgagcatcaaagcggctgcgtcctgttgcatctgcgcacaatcgcggagcccgggttgcatcgggcggggtcaggctggggctcttccttttccccttttaactttgcgtggcagtttgggagcaaggagtgttttaaaaagaagcctccggtccagccaaccccagtcgcttttacagaaagaagtgagtcaggcccacgaggaacacatggaactgaactcgcctcgtggagggggcttccactccctctcatacatgaccgcagataggcacgtggaggctccggtgtgcccactgcgcgcgcgccctaccctgtcctactctgttcctgctccacgagcctccaccacgtcccacgcgctctcagctccactctgtacccccacgccccgccccactccgcggtcctcgccccaatccacggaccgcttccccactaggcagtcccccctccgtcccgtgcgtcccgccccactgcacgggcggcgccccgcgccagctgcggcgctaaaattagcgtcccgcgcgtgagttggcgcccgcaggaatgcgcgcgcaggctggagctgcgcgtgctgcaccaaataaagtcaaaggcttgtctggcgaggggggggcgctggcgcctggggccccgagggtcacacgcggctgctttagtcgccagcgtgtgctgggggagggggggnnnnnnnnnnnnnnnnnnnnnnnnnnnnnnnnnnnnnnnnnnnnnnnnnnnnnnnnnnnnnnnnnnnnnnnnnnnnnnnnnnnnnnnnnnnnnnnnnnnnnnnnnnnnnnnnnnnnnnnnnnnnnnnnngtggggggcgaggggggttagggctgtagctataataagccaaatgtttcatgctgatgctgtaaacatacgtgtcaaaaggacgtccgtgtgagcagagagcatacccatgctggaccatgttcaaagtgcaattgggaagcaatcctcaggacacagtccacgcgggagctcccaagtctgatcaggcgctcgatcagctggctgtccagtcgggcataaataatgtagaaacaatttaaggccagagagcgcgtttaaggtgctacccagttaacttcacatttttctgaattattcagtttaacgctctgcagtactggggtgggggttggggggagagagaaacaaaaataagctccgtgttattttatttatttatttttttttaattctctgtcgagtgtggtggctaatgcctggaatcccagcactgtggaggcagaagggtcttaagttcaagaccaacctgccctacatagcgcattcctgtctcagaaggaatacagtgtgtgtgtgtgtgtgtgtttgtgtgtgtgtgtgtgtgtgtgtgtgtgtgtgtgtgtgtgtgtgtgatgacatttctctctcagcagtcttggagcagattgtgcctatcctggggagatagggacctccctcattcaggccttagtgacagcttgccattgcttcaacagcgattgcagcacatggatgggacactgaagaggtttgtgtgtctagaatcctactcacaacctgcctggagacttggctcgcaccttgagaggcaattgtgatggaaatcaaaggcacactgagcacacaaggcttcctggttcaaacttctgagagaaagttcctgttctttccctgtggctgtgtgtctacagccagaggctgttctcatggagacacaagagagttctgtgctgagacctgaagttttaagttccattaggaacgcacctctctgcctatgcttcacacagcagttgccacacacagggctggggaatcttcctagactatgagcatctcatggcatcatgtacacttagttgtcttaatgattaaaacaacaaaacaacgagtattcaccccatagaggagctaagaatcaggcagtctctgtgacagggttctgatctgaaaaggcactaggtgtgtggcaacagggtgcttgctgggttacaccaaataaatattttccgttattatgtgaacgtgggtaacaaggagtccctctgaaacactggagagcagggcgccccctgctgtgctcactcctggagagcagggttctacagggcacctcctgctggggaccaaaggctgattttcattgggtatcaatactctaccctgtgcaggctttcttatttcatcagtgaccttagagaataaatggcgccattggaaataaaataaaaatacgatctgcaaatagaagaggtgaatactttctaaaaataatccgttcagaggtattcatggacagtctcttgagcatatcattaggcccacaaagcagcttgacattgacccacctgtgactttggaagcaaggactgcatttgtgtggttgtggggggtggaggattttaaatatattttctaaaagcattaacaaaaaaaaaaataaatggagggggcaggaattaaagaactccttcattaggttaacttcaatggagatgttctatgtgtaaaatttcattttattttctgatgaaccatatatctgtgccctagagccagtggatccaaaaaaataaaaataaataaataataaataaaaagtaaaagccatggaagccatgaagagttggtcaaccacaactttgtagcttgagaaggaacttagtcaaggggtgagcagcaaaccaagccatccagttagccccagggggtttctcttgtggtgtctgctgaggttgtggaccattggggtgaggttgggactctccaaggcccagaggaatcccagacattgcagtaggaaagagatggcacgtgtaagaatggtgactggagagaaagcttccaccagacccctacctgcccactgtgattcgtgtcttcactgattggtttccctgggtttccctgtatgcatgtgcctcctggtaaggaacggggactgggaggcatgactcagttgttaaagtgtttgccgtgaaagtatgaagacccaggtttggatctcaagagtgcccatgcaaagagctgggtacgcagtgtaacctctgcaaaaaggcttgaaactctgtactgagaggcaggctcattggccaaccatcctagctaatcattgcacttcatgttcggggagagatcttgactcaaaagtaatgtggagagcaatagagggcacagaacattgaccttttgattccacacacatagacagggacaagtgaactttcgtatacatatgcacacatatacctatgcacacatatgcacacatatacatacgcacacacatatacttatgcacacatatacctatacacacatatacatatacacacatatacatatgcacacatatatgcgtacccatgttttacacacacacacacacacacacaaagaatatgggctagggtctgatggcttaaacttaaatggtacctccctctctaaacttttgtgtttagtcttctgagaaaccggttagggatgggatggcttacctcttggtcttatagagggattaacagacaaagttaagtagtacacattccatgatgcttaacgcttagtgacttgagatatgtcccttatgactagatcaggtaggtgcaaagagaaagtgtcttcggtttgtttgcagaaatgactgctaccctgctacctatctggctgccttcccatcctggtttcactcctttctgcccacatttctctctggttgtttcatccagtatcaagtgttcgaaccatatttgcatacagacttcctacaaaacatctctagattcaacttcccctttaggtaccagccaggctgtgccaagcggcttgctcaccaaattcagtgagctgtccagttggtttttttaaacccattgtgctagatagatccaaaatcaagctcctgttctcatgcctgtctcattacctctgttttcccaatcttcatgcaagtcgaggtcaccttcccattgcttgggccataagcctggaagtgacctgatcagggttttatcataattatccaatcagtcagcacatccttgttcgggagggacacatattcaacaactaggcatggtggcacgcacctgtaatcctggttcttgggaggatcagaagttcaaggtcaccctcagcaatatggctagttccagaccagcctgggctacatgagaccctgtctcaaataagtaggaagaagacaacatgttggagacttacctggtggagccactaccgtgcctcgtgtagaatatctcagatgcttcagggtccttcttccaggttctgcccatgtcctctgaagcttagtctcaaacttggcagatggatgaccctctaaagtgtgggtctggggaatggagtgaaggcacaacagcaaagaggctgccctttcagaagactagggtttgattttcagtgcccaactcggggctcacaaccacctgtaactccagttcctgggtgctctggtgccctcttctgatctctatgggcattgcacacaggtgatacacagacatccaagcaaaacacccacacatttaaaaaaaaaaaacaacaaaaccagatagagctgtctcttgtgagactatgctggggcctagcaaacacagaagtggatgctcacagtcagctattggatggatcacagggccctcaatggaggagctagagaaagtacccaaggagctatagggggaacaacaatatgaactaaccagtacccccctggagctcgtgtctctagctgcatatgaatcagaaaatggcctagtcggccatcagtggaaagagaggcccattggtcgtgcaaactttatatgcctcagtacaggggaatgacagggccaagaagtgggagtgggtgggtgggggagtgggtgggggagcgtgtgggggacttttgggatagcattggaaatgtaaatgaaataaatacccaattttaaaaaaaagaaaaaaacaacaaaaagcctttaattttctcttaacataagtctgctctctgatcttctttctcccttactaaaatccctctggtgtccttttaaaaaagcaaaaaacaaaaaacaaaactcctttagtgtcaaatgcaaaggtttgcaaggttctgctacgtcccaggcacagttggtgtccttgctcattctattttggcaacgtggcttccttgttcctcagatttccaagcatgctcctacctcaggatctctgtgtgtgatctctcctcggaatacttgtttctgtttagttcatagttgttttttaaattagtttgagataggctctcacatattccaggctggccctgagctccctatgtagccaaggatgaccttaaactttgatcctcctgtcttctcttcccgtgctgggatgagaaacatgtaccaccacacccagattatggagtaccgagggtggaacccagagcctcacacatcatagacagcattctgtcaaccaagaaacacctggttctgaagggatgaaaagccaagacgggcagcctcgccagtttggcctctttgtgcctcaggtatagagggactagtgatggcagcccagtatagcagcaatcgtgaacatgaaccgtgagccacaaagtaaggaaaacacgctattttattgttatttaacttggtgttacccttccaggctttgtttcagggattaaattgggactcctcattatatgtaagttataacacagagaccagtatcaggacgacatccttgagtagttctcctctgacctgatggtgcttccaaacgctaatgggacccagaagacacagagttttctgggatctggtcctcatggttcagctcatggaagtcattgggtcctgtgtctttagcaccctgcaggatctctgccatgagatccacagcaggagccaggagctcaaaggtcaaaggagaggctgcagaagacctgccacagtgacctagtgtccttcactcttgggcctatgggaagtccaagcacaacaaagtaatgagaaggaagagaaggcctggcagtgaatagtggtgccctaattcagctgtgctcggggctttcacagggctctccagctgctgtgtggtcccttataaatatctttgtcagatgtcatagagacactagggagatggtctaccccccatcaggagagaacatgaaaggcatgagtagctagaggaggacacactaaactctctccgccctatggaggctcccactcatcggtccccagaccagtccaggcatgaaaaaggactcgtgctgccggacacccagggtcaccctgtgccactgagttcccctgtgacttaagtctccctctctacccaggaaggatcattgctcttgaaaagtttctagaaggctctctggtagcctgttgcaagacaacaggctctgcctcagcttgccagaatcccatccggtttccccg

SEQ ID NO: 2 - DNA, 4284 bp, Mus musculus
ccgccactgtcggccaagggacctactgctgcagccgccgccgcagctgggccacgcgggcgccgaggccgcgcgcgctcaggctatggagcgctacccgctggcgccggatcgtgccccgcgcctggcctccgacttcagcacgcgtgcgggtgcaggcctcccacagtcggccgcgcagcagtccgcgccggcgaacggcatcctggtgcccaacgggttctccaaactggaggagccgccggagctgaatcgccagagcccgaaccctcggcgtgcacacgccgttccgcccactctggtgcctctggtcaacggttctgccgcgctggggttgagcggccgtgctgcggccacactggccgcggtgagcggaacaccgggcctgggagctcagcccgccgagttgggcacccacaaacgcccggcgtctgtgtcgagcgcggcggcggagcacgaggcgcgcgagccgagcaaggagaaggcgcagcccgcgcaccggagtccggccgacagcttatccagcgcggccggggccagcgagctgagcgccgagggtgcaggcaaaggccgcgcgcccggggagcaggactgggccagcaggcctaagacggtgcgggacacgctcctggcgctgcaccagcacggccactcggggcccttcgagagcaagttcaagaaggagccggctctgactgcagcaggcaggttgttgggtttcgaggccaacggggccaacgggtctaaagcagttgcaaggacagcaaggaaaaggaagccttccccagaaccggaaggggaagtcgggccccctaagatcaatggtgagacacagccttggctgtccacttccacagaagggctcaagatccccatcacccctacatcctcttttgtgtctccaccaccccctactgcctctcctcattccaaccggaccacaccgcctgaagcggcccagaatggccagtccccaatggcagccctgattttagtagcagacaatgccgggggcagtcacgcctcaaaagatgccacccaggttcactccaccaccaggaggaacagcagcagcccgccctctccctcctctatgaaccaaagaaggcttggccccagagaggtggggggccaggccaccggcagcaccggaggactggagccggtgcaccctgccagcctcccagactcctctctggcagccagcgcccccctgtgctgcaccctctgccacgagcggctggaggatactcactttgtgcagtgcccgtctgtcccttcgcacaagttctgtttcccttgctccagacaaagcattaaacagcagggcgctagcggagaggtctattgcccaagtggagagaagtgtcctctggtgggctccaatgtcccctgggccttcatgcaaggagagattgctaccatcctcgccggagatgtgaaagtgaagaaggagagagactcgtgactttctgcgttcagaaaagcccatggttacccttaactcaaacttgttgaactgtatatagatctccatacatatatatatatatataaatataaatatatatatccaagacaagggaaatgtagacttcataacatggctgtataattttgattttttttgaatacattgtgtttctatattttttttgacgacaaaaggtatgtactttaaggcattttcttcttttgttaacgttgttaggctgtctgtgtttgactctttgggtgacagttgctgttctttgtaggctgcgacttggctgcttttgtttttttttgttttattttgttttttgttttttttttgtttgtttgtttttaaagagcacttggcaaacaaatgcttctagctgtatttgtatgcacttattttaaaaaagaaaaaaagccaaatacatttttttctgacattgtaagattgccttactgtctgtcatttctcctcgctggcctctctcaggctggaggccagttggtggaggagaaaggaagtgagtggaagggggacacctgtcacaagggcattccccgtcccccaggaaatgtcacccacctttccgagggagggaaaatggggtttgaatcttgtcaacggttcagctcttgcaatactggtcgtcagaggtgctgctgaaaggttatttgcaacattgtgtgttcagggtttgttttgttttgttttttaatggaaggcaagctagctgatgtttgctctgcccacgtgaccggttgtaagctttcagtgctgcgtgctcctcctcctcggtggccccaccggtggttccagctgtagaagtagttgtcagggtggtgtggaaatcaggtggctttcctgctgaccagcctggctctgaggtgctccttaagtgttgcaggccccgggtgaacttgtgggattcgtgttttcttctgttctggtgtgtttggtctacgtgttcagttcttgcctgcgtgctgtcccccttgtgacgagtgcttactgcagtgtgcacgttgatagtcacagccttggatgctgccaggaggacctgtgggcactgtcagtggtgggcccagtgtgggtagaggaagcctgcagtttttccttaggtgtgtctgaaatactaagagaataatactgttctgaaaaaaaaatgagagagaacctagtgagaatacttacatgaagggtttttacataagcaagccccacctctaactatttttagaagcctcttgtaaactaatttcttttggtcactattttgccttagtgaagtgattgtttttaatgtaaacaacatcaggtcattagctaccagtagtggtgcccttagtgatgctggttttgtgggttttttttttttcttcttctttgtgcttttttttggtttaatgtcaacaggaacactaccctctcaaccctgacttgaggtgtttgtaacttggccttgtcggctcaatcatggcttctaagtctactatggtttgtgtgttgttcacagcctggcttctattttaatttgaaaatagagattatcaccagcttgacatcatttctagttacttagttcttggttttgttttttgttttgtttttagtttttgtttttaaccttttttttttttctttagtagtcaagttactaacacttgacactgaagcaaatacagtatttcttgtctggtttttcttgagtgcacctcggcctctgttatcttgttaccagttgtggtgttacagccgggcttgcatgattagaccagttgatcctaactgtgactcaggtccgacaggtctctctctgaggcagatgtacacacacacacacacacacacacacacacaaagcagagtcagtttcacctgcccataaagacatttgtgaagggctcaactattatggtctgtactataaatgtgtttctaagcactttattataaactggaatttggcctcatagatgttacaactagattagtcatttgacctaatttgctgtggctgtctgtaatctcagcacagataaggtctccaaaaaaaccaagaataaagaaccatcctgctgaacagaagtctgtccagcagcagaaacggccacctgtggtttttctctctctactagtagcaaggccagatctgacctgtttaaaaggggccgtagtttgagattaagggtggacttcagaaggcttgaagctaaagtgttgtcctggagtggggcggggcagggtcgggggagtctttctctggcctactctgaaaccggtcacacggggccctcggttgatcttttcttgtccttgatgacactgtggatgtagtccacagctgggtagagatgtcaggttcccaacactgcttctgctgtgactttgatatgctcagaatagtggggggggatggggtggtcggtcaggtttttgtttttttttcttttaacagtttatagaatttaacagatagagttagtgtctttcatgtggcctcactctggagttaatgagaacatacacgtggtttacagcttttctatatacctttccctggccaccaggtgttttgaaagtgtgccacctttcaaactttgctttattttttttttaagtcgaaggtgataatttttctatatctgatgaaactcaatgtctactgaaataagtgtaatctgagctatcaacggtatattttaaacccacgctatggagatatcacctgcattctgtcatttgtcagatttacagtactttttttttcttttagcattaaataaaaataaaattgggagcactga

SEQ ID NO: 3 - protein, 486 aa, Mus musculus
RHCRPRDLLLQPPPQLGHAGAEAARAQAMERYPLAPDRAPRLASDFSTRAGAGLPQSAAQQSAPANGILVPNGFSKLEEPPELNRQSPNPRRAHAVPPTLVPLVNGSAALGLSGRAAATLAAVSGTPGLGAQPAELGTHKRPASVSSAAAEHEAREPSKEKAQPAHRSPADSLSSAAGASELSAEGAGKGRAPGEQDWASRPKTVRDTLLALHQHGHSGPFESKFKKEPALTAAGRLLGFEANGANGSKAVARTARKRKPSPEPEGEVGPPKINGETQPWLSTSTEGLKIPITPTSSFVSPPPPTDHSNRTTPPEAAQNGQSPMAALILVADNAGGSHASKDATQVHSTTRRNSSSPPSPSSMNQRRLGPREVGGQATGSTGGLEPVHPASLPDSSLAASAPLCCTLCHERLEDTHFVQCPSVPSHKFCFPCSRQSIKQQGASGEVYCPSGEKCPLVGSNVPWAFMQGEIATILAGDVKVKKERDS

SEQ ID NO: 4 - DNA, 24529 bp, Homo sapiens
  misc_feature (1)...(24529): n = A,T,C or G
aaaatattacaacatctactaacacatggtctataataaggcaaatgtagacagggtttgaagtcagctacctttgtttgggtctcacagacagtggcgcctgttaaatgaactctccgtggtcagagtgaggtgggtggcagggggcagagcatttatgtttaatttaaccaggcccatgctgtacagtatactaatttagttcaattctccaatccatgaatcagaacttcctaaaaacagaagggctctatgtagtgggagaactggcttgcatggaagttgtatctcctgcgtgaggggaaatagcacctttctgagtcaggaggagggaactccactcatttattcattcatttatttgttccttaaaccattgccagccttcatccaaaaagaagcaaaggtgaatgaaattgctgtttaattttaccagggaaatgacagctccctaatggtgataagtttttcacaggagcgatacttctgagaatcaagaatgagcactgcagaataaagcattccaggtcaatgtgtgtctgattttgaagcctctgacttcggctataaactgtgacgaggctcacagaattgaccgtgatacacccagcactcgcataattcctaactttatgctaaaatatggacacttcagagtggtttgtttttatgtgtgtgtgtgtgtgtgtgtttttaaatcacttggaaccaaaaaggttggcctgaatactcaccacatgaaaataatcaagaggtcatttgccaacagaaaacaacttcaaaagtacggaatgtggaattctgagcctaaaccgtttgacagtatcccaaaaaggcatgtcctgacatgttttcagtctaagagggtttcagcattccaggcttttaaaagaatgtctcctattacaggagctgcctatccttttccacactctcaattcaaggaatctggaagtctaattctggaacacccattttaaaatatattgagtaatctttatatgaaaagtaaagtatacggtgactccttttctggtgtttgaagaatagttgaaacaaattcttcacataagaaaaacacagaatttttgaaaaacatagagttttttacaactttattaagttatcccataatcagacccgtataaacaaaagccataatgtaacacgaatgtaacatttcaccatagttaaccaagtcacaacaaatttcaaaacatcagaattctttgaatttactctcataacatcctttatgaattcagtatatagcctgcaaagaagccacacagccattaagtagtagaattctaggtgagaatccaaaaacacctcaaagcaagtttccatatcctgccgacctactcagccaaatgcctgcctgtgtatgaaaccgttttgtttgtctgtttgcttcttcaactgagagcctcttgaacaatctgaatagcctgtggatagtatattaagtctttgcccgtatatatatatgtatgcatatatgtatatatgtatatatacacgtatacacgtatatgtatgtgtatacgtgtatatatacgtatatttacacatatacgtgtatatatacatacacacatatacatataaaattatatataaacacacatacacacacatacatatatgaaataaggcagtctcttgaggaaagaaaaatgcaaatattttccataagccctgagacattgaagttgggcttatattaatgctgatacagatgttttgccctggctaatttaaactaagtatagaccgtggtttagagtctcctaatctgggattgagcccaaaccaagcagacacgatgttctcgatgatgtgatgctctggtagccatttaacctcctgactttatttggatggcacaatgcccccaaataatgggcaggcatttactggtagtttttccgcattgttttgtaatcccatgtgggtcagaagaatgttgggcttgggtttgtcaaattcctgtgtattcccatcacccccacccaccacgagaggtcagaacagaaatgacatcaaggccagcaccgtctcctccactcaagaaaaactggcctagggtgtccagctgacctgcctcaggtcacatgccaggtgaatgaagagaagctacggtccctcagtgatctcctgcatagatatttacatgtatgcaaaaaagaacctatgaagaaaatataaataggaggtagcccaccagtgggctaaagaaagaactgcagtttgggaaacctgaattctaactgtcgtttaaccacacattttctttgttttaagacagattccttattatcttggtgtctcagttcataaagtgaacagacactgatgttcttaactattgttaagaataatgaattggtctgataatgcaaagatagatagatggataggtagataggtagataattgagaggtaggtagacagaataaaagcagcctgacaaatgtttaaaatccagctacctgttaagtgctaaagagaagaggcctcaggaagttcacatgtgtgcagttcccaggcatgtttcagaaccagcttcctcactcaggaatttgctcgaagggctgggagtcttgccacgaagtacatcaaagttcatttgtatttgcattttagctgtctgtgacaagctttgtagtaaacacactacatttaggcagtcactttggggaatccatcagtagtctcttgctagggctcacatctaggctgcctactgcatgtctgtttccttctcccctgtatgaacttcagttctgggtgtgattcttaattttcccagtggttttgcactctgcctcacaaagaggcattaccatgtgggcacagaaatggatgtgccaatgcataccggaattcactccaactaataaagtacagtcctcagtcagtctgctcaactttccttccttgtgtagggagctctctgtgtctcctttacctacaaaaatgaccactactcctcccatgccaaaaaacaggtgttggagaaagaattttattgttaaatgtgtagacctctgagagatatcattggaatctgcagtatatacatacaataattgtttcaaataacaagcttactttattttttgctgagcccattagactaaagtaagtcagtcaccagaatagattagtgaaactccattggtaaggccaaattatcctgctgaatggcattgttttgcaaaatatattttcatcttgtcaagagaaagcctaattcatattggctaatttctatttcataagaaatacaaaacatggccgggtgcagtggctcacgcctgtaatcccagcactttgggaagccgaggtgggaggatcatccaaggtcaggagtttgagaccagcctggtcaacatggcaaaacccagtctctactaaaaaatataaaaattagccgggtgtggtggcatgtgcctgttgtcccagctactcaggaagctgaggcaggagagtcgcttgaacccgggaggtggaggttgcagtgagctgagatcgcaccactgcactccagcctgggcgacagagaaagactctgtttcaaataataataataataacaatgaaagttcattggcatactttatgaacaacttgtacccttgcaactgtgatattctatacaatgttgtttcacacttttttcttttcggtaccctgtagcccattgtatttatttgtctgagtgcaaagtagtcaggattggactcctacaattggaattaaattatttcatgagtttttcctctttttaagaaaatagatcacaaagagttggaggtgcagtattccaacctggtaagtgccaaaaccatttcatcacccaactgactcccacaattgaatcttttatcctaacaccaacatcagtttttatccaaggttcataaagactagcataaaaatggtgtgccatttaaagagtcccacactcgacatggtgttatagcaactgtgccctacctctgtcagctccttttgtctgtggtgaatgtttacttctctttggattgattgttctatgaactatattaaaattttcctttttcctataaatataggtatagatagcaaatcttaacacctttcctgttaacactcagatgttaacactcctttgctgggctctatgctgtgcttacatgatttttaacaatgcaaaatgcaaatagaatattctcgactacatcctcaggcaacaggactcacacctagatatcagttctgacacttttttttttttttttgagatggagtcttgctctgtcgccgaggctggagtgcagtgacacaatcttggctcactgcaacctccgcctcccgggttcaagcaattctcctgcctcagcctcctaagtagctgggattacagacacatgccaccacgtccggctaatttttgtatttttagtagagatggggtttcaccatgctggccaggctggtctcgaactcctgacctcctgatccacccactgtggcctcccaaagtgctgggattacaggcgtgagccaccgcgtctggcctctgacactcacttttcatgttactttaggtaagtcaggtttttagtttctgaaaaggatgacaagagaatagaatttatccttgaaatatctttttaaaatgttcatgtgaaagatacagcaaataccatgccatcgtactgttctttaacgttttagaattattacattatttgactttttcagttcttatgctatggaatgtgtatgtaggaaatgtacattttttaatagaaaagctaagaagggaaaatttaccatttttatattttcaaacattatctgtgaagttaattcattattttgtcaacatcttcctactgatatctttcaaagggcttcagtgagtgttttaaatattctaagttaaacccacatccagatattccagaaaagtgcatttcatcctgctttttccaaaaagtcaataggaggtttactggcatcaaatggctgttgaatcccttccagttctacaaatttccttgcagactgagcaagtgtgtgacctcaatctctcctttgtctattttgtctgtttctcacttagctctttaaattctgacacagtgagtatttaaccttcatcaagatcccaaattttgctctaaatagggacctatacatacgttgacatataggctgccgactaacagcttctgtgtacaatatgtggatgattaagagctcctgtgattttatctggcttgattcttagaccctccacagagagtttatctcctccacatgcaaaagtctctttaatatctgtatgctctgtgcacaggggaggtaggctatagagagaggtcaaacagagggaaagtatttctaaaaaagaatatttgcaatttgaaaaacagtaagattgtctcataaaatgctgttactaagaaggaagactctcatatcaattacagaaggttcatttatgtcatggtgctccatagtatgtgtagatatattcatataaacaaatgtgttcaaatatatataacttatttaaaaaattggaaaagccctgaatatcacgtgtgctcttcaaaccttacgacacttttgccaaagctgaagaaacccgcaatgatgtccacagaaatccagatgaaatgtggctgcattttttctcttcttcaaatacgccaagatcagagtttaagaagctttagcatggttgcaacatcatgctatttaaggaaactgcactctaaagaatgaaggctgtgattccacctctggatagagggtgaaagccacgaactcagcagttcctaggaataccatctatctcctggacagcacccacaagctgctgggggaatggggttgcacccctcttgcagctgcataacctgggggcaaagttccaataaggtactcttgtaggaaccgtttctttacactgctctatagactgtcagttcagggcttccgtgtgttaatagctgcttgactggagtaagctctggaaaccagattcagattttagatgtttaacgttcacgcagtagaagcccgtttcaatctcagtgtcggaaggtcacattagttctacccattgagctatcgcttacaactgctctcttaggtttgccttccaagccacttccttattcctgcttttctgatagtgtcatactgaatggctttccttttactcctacactgtgatttttatttaaaaaaaaaaacaactctcagaaattagagctggaaaggactgttggtttgtctagtctcagcaggagtgttctccatagaatatttcctttagtccttaagacaaattgcaacattttagtgttctggtgaaaagccagcctcatcccgctgcgtcgccgacacttggcccagcatctgcctgcctgtccgtatatgaatgtgcaggagcacactgcagccaacccggtaaccttgactctgggtggcaaagatgatcataattctcttttgagaggacctggtgcctcaagcaagagggcagagtctacgtgactaaaacataccaacttcctctttcataagtcatcacatgatgaactacaattacaattcctgccttgtctctgcgaattgcagacgcattgcctcaccctagaaaccctgctcctgtgtgtggaggaggcggctgtaactgctgcagcagccgctttggatgggatccaactccagtctgtgccgggagggagcggtgggtggaagacaaaaacaaagctatgtttacttagcatacatcgataaagctgcttcagagctacatgaaaggccaggctgcatgaaagacttctgatacaatataaggaattgctgccctgaatccagccttaacccccttgattccggatcgagcccagaactaaaatagcccttccattttccatcgggcatttcattagggaagttacaacaactcagtttcgacatgaaactggcagtgtaaaataagaaggaaatgctcttcctttggagaagaaaagctccgttttgcaaagatcttagtatcgtggcagaatttctatctctaattctattttaggatggagtggcaggctctccccttgaggccattacagtaccagcttgcagagaaatgagtataattaggccacaactctaatggtgagttgtgttttcttttagtatgtttcagtcaatgcttagtggggccgtctcttgggggcgatgagttggttcatttctctgcagcacaaggactggacttcatcccctttgggcagtgacgcagtgggtgaaggcatgtactggaatgagtgtcacagggtctctgaggagggtgaccaaagggacaggtcttgaaagcggtgtgcaacagcagggcctgggagtgaccaaacccgctggcaccagctactcccgggaaggatctggacaggccccattctcccagcttggagagggtgaggcaggattgcaattgcagggcaagatccaggaacagatgcagagacctttaaaacaggcgcaccttctatggaaatccccaaaagacattcaaggttagcctgtaaaaacatttaggtctgacattacgttttctgtgccattttcgaacaggttttttcatgtgttttaagcagctccctccactgtttctctaagggtgtttttcctcttccttgtggttaatcctttgaagcaacctggtattttcaatagcaacgactagagagaaacgtcagcatgattttttttttctctccacctaccaatccagttgtaggaaagataatataattagtaccctgttcttcccacacttaaccagctcattccagtctcaagggagagttgtgggcctgtgttcccaacaaaagcagctccagaggccgcccttaaagagcttaagtgtaaaagtcccaattgaagagcgactaagcctacgtgtattagggagactaacgaccagcccaaagtgatttaccataacacacactagctcctcctcccgataaaagtgcgaaactcaaacattcaattcagtctgggctgagtctgaggctgccaacggtggcagacctgcaggccgggctcatcccggcctgggtggcatatagggcaaaagtccgcctccgtcggcggcccgccctgcgggacggcgggccagccagccagccggtcgcccccacggccctcgggaacctcgcggaggcgagcaggaccccccccccccccactcgcgccctcgcctcccgccacctcgagtccaagttcgggcccgggggcggcgcctcgacgcccagactcgccgaagggggtggagcctgcgctgtgacgcggccgcgctggccgtagaccccggatccctggaatgtgcattcgttccacgaggccctagtgccagcggcgccgaggcacgtctgcgcggagcgtgcgcactcgcggcggcggccgcccacggccccgcgcccacgtcacgcgcccgccgcgcatacctacataaggcagccggggcgactggcgcggcgaggcccccgatgaacagggcgggctggacggggctaagagcggcacttggtgttcgggagaggctagtccgaaccgcgctccctcccctccagagggctccgtggaaaacgcgcgagccagctggcggcgtgtgcacgtggtgctgggcttgggaatattcacagtctccctagttagtaaaagggacaggcggggcgtatgtcctttccaagacaaatgcaaagcaccagtgacggatttcatgctatgtgtccgacattgagctttcaagtataactcctaaaaaaccagaactgtgaaccacgctagacctaaattccccattctcaggagactgacggaaaccaagtgacaaagtgtccttgcataaaagaaaaaaaatgatttttagcacgatttggcccagaggcacaccagaggaaaacatcctgagggtggtcgggacagccgggtggggcgcgaagtgagggaaagtggaggaaaagcactcgatcactttgcgcggtgttccgaagggaacaccggcgctgcgctgctgcgctgccccgcgggcgggcgggcgccgcgtagccggctctcccggcagcgctccttcggcgcgcggggggagggggagcgcgcgcgcgggagggccgtcacacgcacgaggggagggggcccnnnnnnnnnnnnnnnnnnnnnnnnnnnnnnnnnnnnnnnnnnnnnnnnnnnnnnnnnnnnnnnnnnnnnnnnnnnnnnnnnnnnnnnnnnnnnnnnnnnnnnnnnnnnnnnnnnnnnnnnnnnnnnnnnnnnnnnnnnnnnnnnnnnnnnnnnnnnnnnnnnnnnnnnnnnnnnnnnnnnnnnnnnnnnnnnnnnnnnnnnnnnnnnnnnnnnnnnnnnnnnnnnnnnnnnnnnnnnnnnnnnnnnnnnnnnnnnnnnnnnnnnnnnnnnnnnnnnnnnnnnnnnnnnnnnnnnnnnnnnnnnnnnnnnnnnnnnnnnnnnnnnnnnnnnnnnnnnnnnnnnnnnnnnnnnnnnnnnnnnnnnnnnnnnnnnnnnnnnnnnnnnnnnnnnnnnnnnnnnnnnnnnnnnnnnnnnnnnnnnnnnnnnnnnnnnnnnnnnnnnnnnnnnnnnnnnnnnnnnnnnnnnnnnnnnnnnnnnnnnnnnnnnnnnnnnnnnnnnnnnnnnnnnnnnnnnnnnnnnnnnnnnnnnnnnnnnnnnnnnnnnnnnnnnnnnnnnnnnnnnnnnnnnnnnnnnnnnnnnnnnnnnnnnnnnnnnnnnnnnnnnnnnnnnnnnnnnnnnnnnnnnnnnnnnnnnnnnnnnnnnnnnnnnnnnnnnnnnnnnnnnnnnnnnnnnnnnnnnnnnnnnnnnnnnnnnnnnnnnnnnnnnnnnnnnnnnnnnnnnnnnnnnnnnnnnnnnnnnnnnnnnnnnnnctctctcggcgtcgcgggctcctcggacagcgggggtggcggtggcggcgcgtccggcggcagtcgtgctacctgtgtgacctgccccgcatgccctgggccatgatctgggacttcaccgaacccgtctgccgcggctgcgtcaactacgagggcgccgaccgcgtcgagttcgtcatcgagacggcgcggcagctcaagcgggcgcacggctgcttcccggagggtcgctccccacccggcgccgcggcctcggccgccgccaagccgccgccgctctccgccaaggacatccttttgcagcagcagcagcagcttggccacggcggccccgaggcggccccgcgcgcgccgcaggccttggagcgctacccgttggcggccgcggccgagaggcccccgcgcctcggctctgacttcggcagcagccgcccggcagcgagcctggcccagccgccgacgccgcagccgccgcccgtgaacggcatcctggtgcccaacggcttctccaagctagaggagccgcccgagctgaatcgccagagcccgaacccgcggcgcggccacgcggtgccgcccaccctggtgccgctcatgaacggctcggccacgccgctgcccaccgcgctcggcctcggcggccgcgctgccgcctccttagccgcggtgtccggaaccgcggccgccagcctgggctccgcgcagcccaccgatctgggcgcccacaagcggccggcatccgtgtcgagcagcgctgccgtggagcacgagcagcgtgaggcggcagccaaggagaaacaaccgccgccgcctgcgcaccggggcccggccgacagcctgtccaccgcggccggggccgccgagctgagcgcggaaggtgcgggcaagagccgcgggtctggagagcaggactgggtcaacaggcccaagaccgtgcgcgacacgctgctggcgctgcaccagcacggccactcggggcccttcgagagcaagtttaagaaggagccggccctgactgcaggcaggttgttgggtttcgaggccaacggggccaacgggtctaaagcaggtaggggcggctgtgaagtgagggggtctaggggagaaaaggggacggagagcagaggaagggtggttctttggattcaccattttaccccagcccagaaacaacaaacaccccacttcctgatctgcctgaggcggaaccagtgcttggtggcaacgtgttcatgtgctgaagcagcataacagagatgagtcagactgggctgatacgctctgacacggggttttcctttcccagcacattcttggatgggagcatgagggcaccagtcaccttttaacctattgggggacattagcagtcacatgttgagtgcaaacgagggtacttttgtgcatgtgtacaaacaggcagttacaagcgtgtcattttcagtggctccattttaaatcagtctgctgcctcagaatcccgtacgcctgaaggttttaagttgcatgtgcacctgaaactcgtatatgagtattttctgtctgtgcttttagagaggaggaattctgtaacgacttttgtttcgggttaggaagagaatgatctctttcagtgcaccgccacttatgttacctttttccttttatttctttgtgtttccagttgcaagaacagcaaggaaaaggaagccctctccagaaccagaaggtgaagtcgggccccctaagatcaacggagaggcccagccgtggctgtccacatccacagaggggctcaagatccccatgactcctacatcctcttttgtgtctccgccaccacccactgcctcacctcattccaaccggaccacaccgcctgaagcggcccagaatggccagtcccccatggcagccctgatcttagtagcagacaatgcagggggcagtcatgcctcaaaagatgccaaccaggttcactccactaccaggaggaatagcaacagtccgccctctccgtcctctatgaaccaaagaaggctgggccccagagaggtggggggccagggagcaggcaacacaggaggactggagccagtgcaccctgccagcctcccggactcctctctggcaaccagtgccccgctgtgctgcaccctctgccacgagcggctggaggacacccattttgtgcagtgcccgtccgtcccttcgcacaagttctgcttcccttgctccagacaaagcatcaaacagcagggagctagtggagaggtctattgtcccagtggggaaaaatgccctcttgtgggctccaatgtcccctgggcctttatgcaaggggaaattgcaaccatccttgctggagatgtgaaagtgaaaaaagagagagactcgtgacttttccggtttcagaaaaacccaatgattacccttaattaaaactgcttgaattgtatatatatctccatatatatatatatccaagacaagggaaatgtagacttcataaacatggctgtataattttgattttttttgaatacattgtgtttctatattttttttgacgacaaaaggtatgtacttataaagacatttttttcttttgttaacgttattagcatatctttgtgctttattatcctggtgacagttaccgttctatgtaggctgtgacttgcgctgcttttttagagcacttggcaaatcagaaatgcttctagctgtatttgtatgcacttattttaaaaagaaaaaaaaagccaaatacattttctgacattgtaagattgccttactgtctgtcattccttattgctggcccctttctcaggccggaggccaagtggtggagaaggaaaggaaatgatcgaacgggcatgttgtcaagtgggcatgccactgggaaataccaccagtttaccctgaaacattgtcctcagaggagtaggaaagtggattttgaatctctattttgctcaaaagttcagttcctgagatactgatgactgagagtgctgctgggaaattttcaggattgtgtggtcttttggggttttttgtttttttttttttaagacaaagttgaccgctgttcactgtccacgtgatcagttgtaagattacaatgctgcatgctagttggttacataagatacaattccagtgatggaaggcggttataatggatggtggtgtgtacaagatggcactgccatctttgagcagagcccagctctgcagcgccacttcatctttttaaacaccctagaggtctgtttgttgttgctgttgtcctttattttgaaagagttgcaagagaagttacagtccaggtgaacttggagattgtgggattggttttgtttctgttttgttttgtttatcatttacctgtagtgctattgctgttgatactatcacctataccctgtttctagtgagtgctgaatacagtatggtacaatgacagtaacagccgcgtggtgctgccaggactgcccttgggcatatcagtgacagcccaaatgtgggtggaggaaacctgtaatttccttcttaacatgtgtttgaaataccaagtgaataatactgttctggaaaaaaatgataaactagtggaaattaaagaaattaagggttttatataatagacaggccccacctctcaaaatatttttagaagtctttttgtaaactaatttcttttgatcactattttgcatcagtaaaatgatttttttaaaaccaataaatcatcaattattagaaatagttgtctcacagtgatactggtttttcttttgtgctgttatgatttaacattgacaggaacactattttaaatccttacgttcaggtgtttgtaacttggccttataattaggctgaattatggcttcaaggtctacaatttatgtgtatggttcacagcctagcttctatttacatttgaaaatacagatttttaccaactttggattcttttttagttatatgtttgtctttcctttttaaattgttcaaaactattttttaatggtcaagttactaacacttgaaaatcagatactgcaccaaatacagtgtttttccgtagtgtttttaatgagtgcacctattactactgtgcgagaattcatgttttaccagtcattgttatattacaaacagacttgcatgattaaccagttgttacacttactttttcaagttggagtatatatgactcagtgcagactggtctctcttatgtgaatgcacacatgcagaaatgcagagtcaattttacatgcccataaagacatttgtaaagaattcagctcttatggtctgttgtataaatgtgtatctaggcactttattataactggaatttgacctcacagatgttacaacttgatcagtcgtttgacctaatttgtggtagctatctgtatgttttgcaatcttaatacagacatgctttccaaaaagattaatacagaaccatcctgccgttttggataagtctatccagctgtggaaagggcaacctgtggtttctctgtactggtgtttaatgggggaagaatatgaacagctttaaagagctgtgtattgtggttactactattaaaaaataagatctgcacgagtctgactggcctttgggtggcctttgtggacggctcgtagctggaaagtgttgatctgggttttctggcattcttttaagttaaaaagttaacatcgggacatgggtttgatcttttgttgtacctgatgacagtgcagagattctccacagctggataaaaatgtcacaaagctacttactgtacatgggcagtatcagatttcaaatcctaatatttcagctgtgcttttaatactcaaaatattaggggatggggtgttgaagctttcccttttttgcttttaacaatttatagaatttaacagatgtactgtctttcatgtggcctcacatttaaagttatgagaacatacacatggtttacaacttttactatatacctttccttggccaccaagtattttaaaagtgtgccaccttttaacctttactttttttaagttgaaggtgatactttttctatatatgatgaaactcatgtcaactgaagtgagtgtaatctcagatatcaacattattatattttaaaatcacgctatggaaatatcacctgaattctgtcatttgtcagatttacagtacctttttttctttaacttttagcattaaataaaaataaaattgggagcactgaacattttctgaggccttttttaattttctaaagcaagcttagaatggctattgttttaatcactaatggcaatgtgactaaaggatgtgtgggtttggggttggggtttgcctgaacttcaggagataaaagacatggaacaaaaaggcaactgatggtataaaatagaagtgccagggactgcggaaagggcaactggataggggacacagataaaagagctgaacaaagtacggctagaaagcatttgtttatttttcaactagcagcagaaccagccattctgcaatggtagattggaaagagaagatagtgacgacactggaaagactctcaagacctggagctgctctttgaaaagctttggaataaaacagctacgttgggccataggaaatgcgctaaagacaaaagggatttaaaaaaaaaaaaagccttatactttggaaagcttaggaatgaaaaaagccaaagccatgtatgagctttattgatatcctgaaacttaaatttataaatagagataaaaggtagaaagcactgagacacattttactggctactctcatataataagaaatttcctagatgttgcagcttttactctttttattgattaatggcttggcagacttctctatgaaaggaagttgtgaaactcataaagagttggaggctaggatatacatagagttactatatgttttaaattaaacagcaacagtgaatgtgtacttgaatatatttacactagggtggtctggtaactaggaggggcccatcactatatatattttaatagtttttcattattagtccatttaaggttttcaagaaaccatattcttagcaagttacagatgataaacaatttttcatgtaataactaggttaaaagaaataggatgaactatgtttttgtaacaaaaatgctaaattttatttttagtgaaattgaaaatagtgcagcttgtagaagtaattctcaacatttcaaaacctcttcccaaagatatactttaatgactgcatttcgttttcagttaagaaaacaaaccagactcttgatgtggcagatgtctttgtttattccccaaaggggagttgggggagagttaaaaggaaactatggaaatccttttttaattcctagacttttaagtccctctttactcaaaagttgttttgcatatgatttatagatggttttatttggttagtgaagagtaaaatgtttctcttcctgattcctaagtgtatacgtggaatcattcagaaaaatgttcagttgtgtgtaggccatgagaagtcctgagtcaccctcatttgcttgccttttgttcatagggaacagtatgagaagacacgcctttcctctgtcacagaccaaggtcagatgcaccaatgaatggaatacatatttacccaatttatcgtggggttctagaaatcgggagtgggggtggggactgttttaactccttcagtgccactggttaggcctctgacagcaatggtactacaatcaaataaaaattacgggtgtgactttccagattacaaactctatagatcccttgttgctgtttctcttgacagcctgcattttccttaatatgtctgaacccctcactgtaacttaaaaagcacacaaatagacaatttataaattactcgttaagcggttagaagatagaaaatgggtagatttatggattatctgtggattcctccattaatcctcagataaatccataatttgtcagggatacccacactacccctagttattacattaatttatacctaatttaacagtgaacattgttttaactcattaggtgtgtcatctgctccctccccatgtcaatacaacttaacttaaaatgcttgatttgaaacagctctctgattgtttgatttgaagtgtaacttgtctctttaaaagattatagaatatgaagtctgtatttgcactggttttaatcagaaaattatgcacatctgcctggcacaacataaaacaatccatacaacccacagaaaaggtattttaggacaaaaagtaactataccatagacagatcattattgagaatcatttagacattgtatcttaaaagctgttcttttatttttaatccaaaacccaactgagtaaaatttccttattaaacaaccctattagaatggtataaacagtttcttctgtaagacaaacatttatttggaaaatatatagaatggcactgtataacactaactcaaaacatggaataataaatcttcagtgcaagtaaaacatcacaaaatcagccatgaaaagcctctaggagatgatttctgcctaggtcagataagtctagagactagactacaggattcctagtttaaattgagagcttcaaggcaccggttctcatcctttgaatgggctgtcagaagttagattgcgtaatctaaagagcctcctccagcagctctacagacgcccttgatgctgagataagacatcctgtatagggtaataatgtcacatttgaatatttctaaatatagtttacattttgggggaaatgaactacattacataatctgtagatcacatcacttaccacttttacttagcaattagtatttctatatcatcaccatcaggtagcattcagatgcccatcgtgcacaaaaaatgagttcggttttgttgtggaggcactcagcaactttagcagataaatatttaagtcattgcaaatttatctgcaatatctatagaaaacatctttcctatactagttcaaatagagtactttgaattgcgtatgtggctatttatgcctccggggtgggggggcggtgggaattaaaaacccggaaacaacatttcgccagagctcagggcctcaatttattttaatgcatggaaagagtttattaaaagtgaacctcaaattactgaggttttgccttcttttattgtatgatttttaaagtatttgccatactagtaagagttctgcagagaagtgacatgtgggagtagagattgtctgggtcagactaaatcagcatttctttggcacaggcttggcttgggccgtctgcctgagccgactgtatgtgtgagctgcaaaacagaaaaaagctgttgagagtcttagcccaggctaagagcccattacccccattttgttatttctgcctgcaaacagcagttcaattagcttttctggtgataaaagataaagatttattgtaccccatatacaattgaaatcagaatttcacaggagggtcacagtcattagagaagttttggaatactattctcctaataagcaccatatgggttgttgctgttataatttaacacctactaagcaggcatctcattctaggctttgaacagctgagaggctagctcctaccttttgtgcagcttaaagtcaaagccacaggtaggaaatgtcactttgcttggttcaagacacgtattgacaagagttaaccacgagtttgtttccttccagtttatcttacaaaccacagtaaaattctgacataggaacacagtccgaagtccaaagtgctttcgcacaataagttcattatgcccagcgtgcaattcatgcatcaagggggccgccggaccccattatctttatacaaatcaagaggccagttggaacaaggaggctggtcagaatggtcaaattgtagtttttccctttcttttttaaaaaatttattttttcactttgtatcgttgttcagaatggcactttttaaaaggaagaaagcctccagccctgccaagctctgtttactccacgggaaggaaaggggaggaggctccctcactctccaacagcctggagcccacaaggagcccttgctgcggtttccaaggcggccccctgacttgcgccgcgcctctattctagaacttttcccgggctggagcagcgcagtctccgcgcgcccggctctgcgcacgtggagccgcgcgaccccgggcggggcggggcggggcggggcggaacggaannnnnnnnnnnnnnnnnnnnnnnnnnnnnnnnnnnnnnnnnnnnnnnnnnnnnnnnnnnnnnnnnnnnnnnnnnnnnnnnnnnnnnnnnnnnnnnnnnnnnnnnnnnnnnnnnnnnnnnnnnnnnnnnnnnnnnnnnnnnnnnnnnnnnnnnnnnnnnnnnnnnnnnnnnnnnnnnnnnnnnnnnnnnnnnnnnnnnnnnnnnnnnnnnnnnnnnnnnnnnnnnnnnnnnnnnnnggcccggaaacgggaaacggcccggtgcgccccgcccctccgctccgccgcccagtcctggccccgagcgccaggccaagccagcgcgccagctgccgggctataattagagggaccgcagcccgggcccggccacctcctcgcgccccccgcccgcgttcccggggaagaatgtgcgagtgcgcgcgagggcccgagtgcgccgccgccggcgcgctctctggagcagagaccgcgtggtgaaccaaataaagtaaaaggtctggctcctgctgggcgaggccgagcgaggaacgtgcgcgccagagcaggggtgtggcgagccctcggtggcccagaaaagatcaaacgcgcgtcagcagcagccgtggctgccgcctgcaagggtccctgacgcgggccgggctgtacagggtggattttctaagttggagatggcgcatgacaagagctgccccaaatcaaatgtcactccctttttggaaatcatgatgctgctttttttttttttttttggctgcagctataataagccaaatgttccgtgctggtgaagtaaacacgcgtgtttaagaagcatctgtgttagcactaatggatggtgcatgctaataaaaatgtatttattaagcaaacctcaggacatgcccctatgggaactgcccagagtactgttaacaactgactgcctgaaaatgagtttactttctatcaagaaacttttatttaaatttgaagaaaaaagtttttctttgatcatagcattgttgtgcacctgaggttctacccaattagttaactgctaatttttattaattattccctttaatactctgcagtattttctcaaaaaatgaacagcatgacccctgtcactttaaaaaactgacattaaactatttctccatcaccagccttggagttgggggggcagggtgctggctaccagaagtagcaactagattgtggaataagtattgtataatagttttagtgattgtttaaaagtgaatgaaccggtgaatggataggaggctagaaaaaaaaaaaaaagccttgcttcaggcttgtgaattcctagacacaaccctacccaaagacttccttcaccaacatatttttctttctagataataggcacaaaaaccatttagaagtttgagatggaaatcatgcaatgcactctgctctttatatatgttactgaggaatctggaagcttttccgggttgaaatgcaattcctaggaaattattcttgctcttttcctgtggctgtttttgacacagcagcaatgcaatttcagtggctctgctccttcacaaagacctttgagagggaactatgctgagagatgcaaattcaaggttttctgaaaacacctcagaattgtccagttctgcccccagataaaaccactagaataaaggtcaggaaatctccagatgttcttgggacttgcgcagtcatctcaggtaattcaattagcttttgtgtctgttttgcaattattaaaaaaaaatataggccaggcacagtggctcacgcctgtaatcccaggactttgggaggccgaggcgggtggatcacctgaggtcaggagtttgagatcagcctggccaacatggtgaaaccctgtctctactatatatacaaaaattagctgggcgccgtggtgcatgcctgtaatcccagctacttgggaggctgaggcaggagaatcacttgaacctgggaagcgaaggttgcaatgagccgagatcgccacactgcactccatcctgggcgacaaagtgagactctgtcttaaaaaaaaaaaaaaaaaaaaaaaatatatatatatatatatatatatgatgtacttgcctcagagggggctaaaatatcaaattaggtaatttctatgacagatttctggtttttcatttatcaaccagacatgagaaggtgctgtcatacagggcatcattaggtgattgggcacagtgagtgcctaccacccaaaatagagactttcagttattatattaaacagaataatagcaaatcgctttgaaacactggagagaaggggctccccctgctgtcatcacagaaaatgcattgtctcaggccagtgtcttgtagctagagtactcactgggtttcaatcacagtaccagaagattctcgaagttatcatcaccttggaggatgtatagtttcattggaactaaaaatatcacaaaaaaagaatatgcatatttttcttgaaacaccctatgctcagattcatttactcaaggctcagcctgcctatgaaccaccaaaatggtctacctcactccatttatgactttaaaagcaaggatggtatatgtgtggctggtagcagctggaggtgagtgggttgaaaatatgtttgaacatatttcatttttgttaaggtttgtttaaataaggaatcaataaaaatgatgtataatgggaaataagagcatcttcattggattttggccttggtaaaaacgttgtgtttgtaaaaaaatcatttaattttcttgtaaatcatatttctttacacaggagccactggattcatgaataagtcttcagaggtcatgaagagttgggtttgtcagcctcaaaatttgtagcactggaaagaaatgattcaaggtctcagtaacaaatactggctgagctgagtctcaaggaatgaccagaccaagccagagatccttcatctaggccatgtttgctgaggggttgaggacatggatggaattaggttgaaactcttcgtgaacaagatgaattgtaagcagttaagaaggaaaagatgctggatgtggtggttcacacctgtaaccttagcactttgggaggccgaggtgggaggatcacttgagaccagcctgggcaacatagtgagacaccatgtctacaaacactttaaaataaataacaatatttattgttaaataaacaaatatgaaaggaaaagagatggcatgtgcaagagttgagagattggagaggaaaaattacatgaaggaaccaacatctggccatagccattcattcattcacttatttgttcattggttcacttgctctttcactccccacatatatctcatgataaataacatggcctctggggtcagacggcttactcttaacttccagctccacctctttctaaccttaaatataaaggtattaagaaacagtatcttcagtttgcttccagagaccactttcttcattctgcaacctcactggctgttctttcactgattcctcatcgtctcacttgttggagtgcccctaagcttagtcctcagatggtttttttttttcctctctctctgtctacacttactccctgcaatctcatccagaaatatggttttaaaataacattatatgcttactctcagatttatttctctagcctagacctccgtccttgagtgccagcctggtatatccagctacctactcagttgttcgcttgaatatctaattgacgtctcacatttatatgtctgaagttgaacttctgatctccctcccaccctcgcccaacaccaccgcaccacagtcccctttcagtctttcccattttacaaaatggcagttccatcttctagttgtttgagccatagaccttagagtggtctttcacttggattttttctcagccattctccatccagtctatcagcaaatcctcttggttctaccttcaaaatatattcagaatctgaccacatctcactacctactagacaccgccatcatttcttgtctagggtgttgcagagtcttccagactgttcctcccgtttctgcccttgtcctctgcaacttattctcagttcatcggccagaataaaccctaaaaatattcatctgatcttgtttctcctttgctcaaatccttttcttgcctttctatcttcttcagagtcaaatccaaagtctttacaatggccatcaaggcaatgctatttcccagacatggctcctatccttgttcatgctagccacgccagcttcctggcattccttgaccttgctaagcatgctcccacctcatggctcttctctgcttggaatgctcttccctcagatgtatgcatagctcattccctcatttccttcaggtctctatgccaaggtcccctgatgagtgatcttccctgatcagtcccctgatcttccctgaccaccctctattagcatcctcttgctcctataacaacgtcccacaaacagtgaattaaaagtacaccaaatgattatcttacagttctggatgccatgatctaaaattaagatgtcggcagggctggtttcctcgggaggcttcaggggagatgccacttccttgccttttcagcttctagaggccacctgcattcctgggcttgtggtcccttccttgaatcactccagttcctgcttccatcatcactgctcttcctgcctccttacgaggatccttgtaattatatggggcccagctaagcagttctaggatgatctcatttcaaaatggttgatttaatcacatctgcaaaatcccttttaccatgtgacttcatatattcacaggttcagaagattaggacagagacatcttggggggccactattcagctatcataatatatttgatacactatataaaattatccatgctaagctactccacattctatagtctctgttcctcttttatttttcttcctagtactttgtctcatcagatgttatatattatttactaatttgtaagtttttgtctccccagaccctaggccctgcattcggtagagcagggatccccaacccccagcctgcagccccatatgggtccatggcctgttaggaaccaggccatacagcaggaggtgagcggcaggtgagcggcgggtgagcggcaggtgagcgagcattacctcctgagctccatctcctgtcagatcagccacggcattagattcttatagaagcatgaaccctattgtgaact

SEQ ID NO: 5 - DNA, 3935 bp, Homo sapiens
ggtggcggtggcggcgcgtccggcggcagtcgtgctacctgtgtgacctgccccgcatgccctgggccatgatctgggacttcaccgaacccgtctgccgcggctgcgtcaactacgagggcgccgaccgcgtcgagttcgtcatcgagacggcgcggcagctcaagcgggcgcacggctgcttcccggagggtcgctccccacccggcgccgcggcctcggccgccgccaagccgccgccgctctccgccaaggacatccttttgcagcagcagcagcagcttggccacggcggccccgaggcggccccgcgcgcgccgcaggccttggagcgctacccgttggcggccgcggccgagaggcccccgcgcctcggctctgacttcggcagcagccgcccggcagcgagcctggcccagccgccgacgccgcagccgccgcccgtgaacggcatcctggtgcccaacggcttctccaagctagaggagccgcccgagctgaatcgccagagcccgaacccgcggcgcggccacgcggtgccgcccaccctggtgccgctcatgaacggctcggccacgccgctgcccaccgcgctcggcctcggcggccgcgctgccgcctccttagccgcggtgtccggaaccgcggccgccagcctgggctccgcgcagcccaccgatctgggcgcccacaagcggccggcatccgtgtcgagcagcgctgccgtggagcacgagcagcgtgaggcggcagccaaggagaaacaaccgccgccgcctgcgcaccggggcccggccgacagcctgtccaccgcggccggggccgccgagctgagcgcggaaggtgcgggcaagagccgcgggtctggagagcaggactgggtcaacaggcccaagaccgtgcgcgacacgctgctggcgctgcaccagcacggccactcggggcccttcgagagcaagtttaagaaggagccggccctgactgcaggcaggttgttgggtttcgaggccaacggggccaacgggtctaaagcagttgcaagaacagcaaggaaaaggaagccctctccagaaccagaaggtgaagtcgggccccctaagatcaacggagaggcccagccgtggctgtccacatccacagaggggctcaagatccccatgactcctacatcctcttttgtgtctccgccaccacccactgcctcacctcattccaaccggaccacaccgcctgaagcggcccagaatggccagtcccccatggcagccctgatcttagtagcagacaatgcagggggcagtcatgcctcaaaagatgccaaccaggttcactccactaccaggaggaatagcaacagtccgccctctccgtcctctatgaaccaaagaaggctgggccccagagaggtggggggccagggagcaggcaacacaggaggactggagccagtgcaccctgccagcctcccggactcctctctggcaaccagtgccccgctgtgctgcaccctctgccacgagcggctggaggacacccattttgtgcagtgcccgtccgtcccttcgcacaagttctgcttcccttgctccagacaaagcatcaaacagcagggagctagtggagaggtctattgtcccagtggggaaaaatgccctcttgtgggctccaatgtcccctgggcctttatgcaaggggaaattgcaaccatccttgctggagatgtgaaagtgaaaaaagagagagactcgtgacttttccggtttcagaaaaacccaatgattacccttaattaaaactgcttgaattgtatatatatctccatatatatatatatccaagacaagggaaatgtagacttcataaacatggctgtataattttgattttttttgaatacattgtgtttctatattttttttgacgacaaaaggtatgtacttataaagacatttttttcttttgttaacgttattagcatatctttgtgctttattatcctggtgacagttaccgttctatgtaggctgtgacttgcgctgcttttttagagcacttggcaaatcagaaatgcttctagctgtatttgtatgcacttattttaaaaagaaaaaaaaagccaaatacattttctgacattgtaagattgccttactgtctgtcattccttattgctggcccctttctcaggccggaggccaagtggtggagaaggaaaggaaatgatcgaacgggcatgttgtcaagtgggcatgccactgggaaataccaccagtttaccctgaaacattgtcctcagaggagtaggaaagtggattttgaatctctattttgctcaaaagttcagttcctgagatactgatgactgagagtgctgctgggaaattttcaggattgtgtggtcttttggggttttttgtttttttttttttaagacaaagttgaccgctgttcactgtccacgtgatcagttgtaagattacaatgctgcatgctagttggttacataagatacaattccagtgatggaaggcggttataatggatggtggtgtgtacaagatggcactgccatctttgagcagagcccagctctgcagcgccacttcatctttttaaacaccctagaggtctgtttgttgttgctgttgtcctttattttgaaagagttgcaagagaagttacagtccaggtgaacttggagattgtgggattggttttgtttctgttttgttttgtttatcatttacctgtagtgctattgctgttgatactatcacctataccctgtttctagtgagtgctgaatacagtatggtacaatgacagtaacagccgcgtggtgctgccaggactgcccttgggcatatcagtgacagcccaaatgtgggtggaggaaacctgtaatttccttcttaacatgtgtttgaaataccaagtgaataatactgttctggaaaaaaatgataaactagtggaaattaaagaaattaagggttttatataatagacaggccccacctctcaaaatatttttagaagtctttttgtaaactaatttcttttgatcactattttgcatcagtaaaatgatttttttaaaaccaataaatcatcaattattagaaatagttgtctcacagtgatactggtttttcttttgtgctgttatgatttaacattgacaggaacactattttaaatccttacgttcaggtgtttgtaacttggccttataattaggctgaattatggcttcaaggtctacaatttatgtgtatggttcacagcctagcttctatttacatttgaaaatacagatttttaccaactttggattcttttttagttatatgtttgtctttcctttttaaattgttcaaaactattttttaatggtcaagttactaacacttgaaaatcagatactgcaccaaatacagtgtttttccgtagtgtttttaatgagtgcacctattactactgtgcgagaattcatgttttaccagtcattgttatattacaaacagacttgcatgattaaccagttgttacacttactttttcaagttggagtatatatgactcagtgcagactggtctctcttatgtgaatgcacacatgcagaaatgcagagtcaattttacatgcccataaagacatttgtaaagaattcagctcttatggtctgttgtataaatgtgtatctaggcactttattataactggaatttgacctcacagatgttacaacttgatcagtcgtttgacctaatttgtggtagctatctgtatgttttgcaatcttaatacagacatgctttccaaaaagattaatacagaaccatcctgccgttttggataagtctatccagctgtggaaagggcaacctgtggtttctctgtactggtgtttaatgggggaagaatatgaaca

SEQ ID NO: 6 - protein, 580 aa, Homo sapiens
WRWRRVRRQSCYLCDLPRMPWAMIWDFTEPVCRGCVNYEGADRVEFVIETARQLKRAHGCFPEGRSPPGAAASAAAKPPPLSAKDILLQQQQQLGHGGPEAAPRAPQALERYPLAAAAERPPRLGSDFGSSRPAASLAQPPTPQPPPVNGILVPNGFSKLEEPPELNRQSPNPRRGHAVPPTLVPLMNGSATPLPTALGLGGRAAASLAAVSGTAAASLGSAQPTDLGAHKRPASVSSSAAVEHEQREAAAKEKQPPPPAHRGPADSLSTAAGAAELSAEGAGKSRGSGEQDWVNRPKTVRDTLLALHQHGHSGPFESKFKKEPALTAGRLLGFEANGANGSKAVARTARKRKPSPEPEGEVGPPKINGEAQPWLSTSTEGLKIPMTPTSSFVSPPPPTDHSNRTTPPEAAQNGQSPMAALILVADNAGGSHASKDANQVHSTTRRNSNSPPSPSSMNQRRLGPREVGGQGAGNTGGLEPVHPASLPDSSLATSAPLCCTLCHERLEDTHFVQCPSVPSHKFCFPCSRQSIKQQGASGEVYCPSGEKCPLVGSNVPWAFMQGEIATILAGDVKVKKERDS

SEQ ID NO: 7 - DNA, 80462 bp, Mus musculus
  misc_feature (1)...(80462): n = A,T,C or G
gggcgcgtcagatctcattacggatggttgggagccatcatgtggttgctggaatttgaactcaggaccttcagaacagcagtcagtgctcttaactgctgagccatctctccagcccctgcatcttctaatatccttcctaattccatactttcatgtctaggatctaaagtatctctaactgaaatccaaagactaaaatcatctatggggattttttttcagggccatgtgttctttctcccatgtctgtaaacttaccataccttcctcagagaaccaaggacaaatttcttctattaaaagccagaaactgggtaagctgtttttgacttatcttggctcctctagattttagcatatctttaagcagatgtataaaaagcattctgccattaccttgccccattcttacagggtttactcactgctagccccaattttcttattttcctttgcgcacgcttccttttcccaatgtgtccttcactgtaccccgtgtgcttgagccctccatgttgagataccatctcaccaagccagctcagtcagtcaacggggtctcaagggagggaaggagggattgaaaggaaaaagacaattagacaacactataacatgactccactggggaccacacaaacagcagctttctgtggtcacgaaggatgtacattcaagaaggaagatgtcctgggtgggtttttaatgtccgcttgacacactccagagtcaccaagaagaagagacctacctctctggtctctgctgcccctttcctgggatcccagccctgcagtacaggagaaaagtctgattaggacaaaagtctaggaaggtgactcagcagctgggctgggtggatgtagcaagggaggttaaaacaggatgcagccctgaggtccactgagtgcagctgaggagacctgggataagccacaaaagttgctagggcgtggagaaatgaataacttaggttattgtgtcccaagccctcctgtaatcaatcatccctcgatgtcataggcagcagcccccatcagtgtctggatcgacatggtcagctgctcccagcactgaccccccccccccaccccactggctacctgcctcggtttgccctgtggtgtcagagctgggcaccactgtctggaatctgtctttggttgctttccaattaatgtgttggnnnnnnnnnnnnnnnnnnnncaaggcaggaaagagtgacgcgcctcttgatcctagagataagattgacatagaccccccccccccccaccccactggctacctgcctcggtttgccctgtggtgtcagagctggtcaccagtgtctggaatctgtctttggtttctttccaattaatgtgttggttgagaactccaatgcgtacacaggcttcatttcctgtccgcagctcacgatcagggtctacactgagctcccaaccagtcagggctgcatagtgacatattgacaccttgttttagagcaaagtgaaaacagaggcaggtaaggtctttaaaaatgtgattttcaagagagatcatttgtttattgtatgtgtgggtgtggctatggtacacttgtagtctgactcgtggggaaccatgtgggtttgggggattcaactcaggttgtcaggcttggtggggtgccctttctcactgagccatgtctccagcctgtggtgttgtcctgggtaagcctttatttaaatctctcccaaggtctgcctgtcagaaagcatctgcaggagggaacatcttggcagcatggttcccgtttcttttttcatacccgcatttcctctctttaaaaaaaaatcaaagttctttcactcactccaagggataagccacaaaagttgctagggcgtggagaaatgaataacttaggttattgtgtcccaagccctcctgtaatcaaggcaccgtaaatcccctgtctatcctcccagctttgcctcaacaagaagccactcctagtcagggtggaaccgggtcacaacaagtgtaactaccatgcccctccacttatcaaataagaagaaaagggtctcagctgtttgtaacatgtactgttgttacaggagacctgcgttcatttcccagaacccttgtttggttgctcacaacagcctgtaactacaatggtatccagcaacctcttctggagtctgaaggcacccacagggccatacacagaggcacacacttcacatacaattatttggcgaggcatgatactgcatgcccttaagcatcagtcctcagaagccaggagcaagattgtatctgtgagcttcgaggcagccttgtttattgtattgagttccacatcagctgggctacataatgagaccctattttaaaaataaatcttaaaaatttttaattgcaaagttattttagaagaaaaagaggaaaagggaaaagcagccccctagcaaatctttgaggggtaacttgagccattaagatgataaacatgtctaccatggcgactcaactgtggttctgagaagcctacagcatgctcttgggtggatcttcttggcgagtcttagtctcagtttctgtctgtctgtctgtctgtctgtctctaaatgtgtatagtattttgtttgcatgtttgcatgtgtaccatgtgcatgtctgatgctgtgggggtcagagaagggtgttggattccctagaactacccatgattgtgagctgtctcatggctactaggaactgaaactgtgcctcagcaagagcagccagtgctgagccacctttccagcctcttaattttattattattaccatttaagattgttagtgctggagtttgaacccagggccttgcgcatgccaggcaagcatgttatcttcctagctttctttcttcctcttaactcttaaaaaatgtctttgcctgaactccagttctgctctctctccctcaaaaaccagggatccagttttacctgagattcaaggtctctacagggcaaacagagttcctctggatgctgtgattgacagttccctgcccaaactgacaatggcacttaaggttataaagagctcaccaggaccaggcacacccttggcactgtcaacttgatgggcatgctcagcctgctggtgtttgctgtgggcttaatgacttcccaaggagtggtgggtgcctgactacgtcattttttgatggacacagcagtctgtcgaatgcccccagtcttgtgaaccagtgaggttattggagggagtctatgtggcgttatgagaacatgggtgaggggtgtccttgtggctttctcctcagaaccacgcacagtttggagtagagactaccttgctcaggcagggaacaacacagtggcagctaggtctgtgtgtagtggtaatggtacattgacacttccagtttggtcacaggacccttccttgggagtctagctattacttcctccctgctggagcaggaaggcaacagagaggcaggcctctgggatgcagccgctgtgaatcagccatctgtgatgggtgggacttggtgtgtgatgcagctgtttggggtcattcatgctcctgtatccattgtcaccgaattgacttttctgggctctgaaccttggtctgtcattgcttggtacgctgtagggggtgaagagcttgctcacagcttcccagaaaaagttgatacagcatgggatgactttcaggaacacgggtgagtcaggcaactactgtctgaaccctgcctgggtgacaattcttcatccctcagtgagctacctcctccaatagactccagtgcctctcttgaccatgtgcatatggggcgggagggaatgggtgctggaactctcagatgtgtctgtgtcgtcatgctccaaggacagagttccacaaccagtgacacctcacacataacttactgcatacaaatattaatttaagtaaaaaatggagacagtctcatatagtccagactgagtccaaatgattctcttgtttgaggcagggtctcactaagtagccctgactgtcctggacccatggagactttctgactcacagagatcaccctgcctctgcctcccaagtgctgggataaaaagacttgtgtcatcacacccagctgaccttgaactccattctacttactgcccgtgtgtcccaggtgctgtgatgacaggtgtgggttcccgtgcattccaagtgtgattccctgcatttccatgttttgttgaatgtgtagcactcttatgagagaaaaaacaaacaaacaaacaaaaaaaaaaccaaaaaaaaaaaaaaaaaaaaaaaaacctttggttagcagttccctgcagactggtgattcaaaaattcccatttctctatttgctgggactcttggatctttgctggccatcagctgcaccccccaccagacacgccctccacctttgcctgtgctgatcacttcctgcaaatatgcactgcacctgcttcctagaactgggcagacaggtgtggactacatatgtgctgtgttctgccgtgtctgtgggctctgtgcttgttaaccagggcacaccagggagcatagcaggcttgctgtggtcacatgtgtatcctcctctgtccccatttnnnnnnnnnnnnnnnnnnnnnnnnnnnnnnnnnnnnnnnnnnnnnnnnnnnnnnnnnnnnnnnnnnnnnnnnnnnnnnnnnnnnnnnnnnnnnnnnnnnnnnnnnnnnnnnnnnnnnnnnnnnnnnnnnnnnnnnnnnnnnnnnntacaaaattacttagagagtaaaaggcttctttgtggcattttcataatacttttgctttatgcttcccccttctgccatgcccttcctctcttacattactttctgttaggtatttcctcacactaaccaggaagtaactaatatgtccagaattaactttgtatccaatatcacaggtctcctgggaataatgtaaattatgagaggagaaagaataggattggtatgcgtggcttaggctgtgaatacatccacacatgtcaggcagggatctgcaaccccagcagcaggaaatcttacactcactgtcctggttagatttttgtcaatttgacacagactagagtcatctggaggaaggacgctcaggtgagaaaatgcctccgtgcagactgtcctgtaggtgtggtcttggttgttgattgctgtgggtgggcccggtataccttgggcattgccacccctgggaaggtggtcctgccctgaatcccctcaatgatggactctgatcccaatatgtgagccaaataaaccctaactccggagctgcctttgctcatggtgtttttacagcaacagaaagcacaaagatacacttttcccatggacacaggatgactgcaaagctggagatactgaagaccactaaaggggcttgaggctggagacaggcagaggttgctgggctgggcaatcagggcttgctggcaggggcagttcctccagttaaatcaggaccagatttgagcagcacctttatctttatgtggtcatcatgacgggcttacgggatgctccccttctgtctgcgtacggcgttatgcacgtgagtgcagtgcctgtggagatgggaaggaggagttggaactcccggaggactggagttacaagtggttgtaaagaaagtctcctgtgtgagtggcaggaaccagattccagtcctctgcatgagcagcgagtgctctaaccattgggctagctgcccctccagctctataacttgaattttaagagcaaaataccatctagtgccagggtgcgggtactcaggaggcagaagcaggcagatctctgtgagtttgaagccaaccaggactccggagtgagacaaaagtgtaaaataaaatgtcctctaaagtcttgaaggaaatacctgttttgtttttagcctctttaattaggtttaatgtctcccactcagaacttgaaatgtgaatctatttttgtaaaatacaaaacttcgagcctaagtgtttccaaacaaacactgaaatctctaatctctacttagactctgcatcttggtccatctgtcactcctgtgacagagcttcaagatggctggaggctttcaggctaaggcagagataatgagcagcccataggagagtgggggagtaaggggtaggcttggctttctggcctgagaggagcctggggtgtcagaagcatttagcacattcattttccgtgtgacactggactgccttgtaatctgtccgtatatggccaccctgtgacacattttgtacggcagttggagggaagaggagactcccattaccaggtcatccgtggacctgtctctcagcaggcttgccctgtgcagattatagaagcaggggtaaggagatttaaagattaggtcatggagtgttaattgattgttcttgcaaaagggacaattggatttaagatttgtgaagaaaatgcaaacacacacaaggcaggcagacagacagacacaacacacacacacactcacacacacacacacacacacacacacacacacacacacacacacacacacacacggtgaaagaatacattcagaaaaaagaaaataccagcactgtaaaagcaagttacgcctttttaggcagagcagcaaattgatttgcagttccatctcaagtgctccctgtccacgttgtgagataacaaagattcaggcactggggaggtcgcctggtttgagcttagcacacagtataacctggtcgtggagtaatactctagcaattccagcacttgggaggtgattgagggaggagtcaaagttcatgctgtgggatacttagtgactttgaagccagcattggttaagtgagacattgtctcaaaaatgaacagacttggtcacagtggcaggtagtgaaccacagcacagatttttctctttattactgttgcttcagtcaccatctatagccaagtccagttgtggatctgcagcaatcccatctactgcctggctcttttgatgcagccgagtgatactctgcccaataggcatggcaatatgtcattaggagtcattcattgctatgtttctttagcagaataatagtaggttttcctttagtcccatgacttatccagtctcagtttggccacttcagcagtgcaatgtatgggttccatctcacagagtgggccttaaatctaatagaaaagtagccagttactcccataactgtaagagagggtagaaaggaaagcttatttgaggagtcaaaatgctgtgctgtcttggcaggggagtgtgtgtgtggacagagcaggaagcctttaggcgtcaggaaaggagaggtcaaggccagaaaagtgtaggtgttagtgcagggttagttaggaactagatgcccttgccagaggtcaggtccgcaaggggtacagtggcttccttggtaacacaatcctgcaataggagattgctatcagatgctgataattccccccccccttttttccctttccttttgtaacaatccttctgtttacctgatcaagtcagagtccttctgtttaggacacaattacctgcattgccatttgagggccattttgtatccaacaataacatttatgtaactttgtatccaacagtaacatttgtaccactatctccccatgacatcttgcagtcaggtctccgttgtggatctcatggttcatagatgggtaatattggtgattacttttctcctctggtggtatgtgatgaagtacctcccagtgccatgtgtgctggtctggaggggtagagcttcagttaggctgatattctccatgtttgatgacatatgcaaattatgtcttcagcaaacagggctttaccattagcttatggagagtaaacaatagccttggctatagactgtgatgtttgggagagtccatgggacccctttggaaacaagtctcagaggtgaacaatagggagaatggaggccctgttattatttagctcattaaaatcagtagtgaaggcagaaatgaaggagttagcttctgccacctgagtgcgaggactcaaggtcagctggtggtccttggagctggtagtggttgtggattctaacccctaggttggtttgtttgcttgcttgcttgggaggctgggtctcactgtatgtagcacaggtcgtcggaaactcttagcaatcatctttcatcagcccttcaagggcgggggttaaaagcgacagacaccaccccgcactaacaggacggctgttttgcctgaaccataggccgtatggtggttgcatcggaggctactggcagggaacagcgaggcagagtcctcacgtttcgaggtcagcaactgtaggactgttgcaggcgagagagccgaagcacaaatgcaggtccctgctgcaaatccagatcggagagagggcccttgtgatgctaatgtgtctctgagatgtccagagccctgcccttcagagttccttagtaaagtgcgggtgctcctgagccctctatgcgcgtgcccagccatgcgtgactgcacgcacccgcaacgcggagatgctgcatcggctgcgctcgcccctgcgccgggtgcttgctggtggctctcccatcgtacctctttcacccgccacgccaaactgcagtcccgggctgtcgggatccgcggtgcgccacgagtcgccgctgtgccacgtattcccacgctcccgcagcttcgtcatggcctgcttgcccagagcaactgcaaccctggcccgccaggtacctgcgtggcgaaaggcgaggggcgccaggaccagcatcccgcggggactcactcggggggcgggggttactgcggtagggcgccactaggctcttgggtattaccgcaaggcaacactggtcgcgaggggatgcggggaggggggcggggctggggggttacggcgagggacttggaggtgcgggggaactcggaggtcgccactaggggactcaaggatggagataattcatgggtgctcgtggtcgccactggggactccggagctaagagtgtctccactggggaattctggggtcatcctggggattttcacggaggacactactggggactgagggatcactgtggggatttaggggtcgtcgcaagagttgctggggtcacagactagcacggagagaaaacgtgctagacgagggtcgccacaggatcttgggcacgttagggatgatgtgatggctggggatcaccagggatgctggagtctaggctaggaaaactggaggattaaagggaagattttgccaccaaaacatccagaccgctgcctttgcagtcttggatcccttcgttccctctttcccagttatttagcaaactggcttccagcttttgaatgcctgcccctttccctagttaattcggaaccacggtatcatttatttatttaattgctggcagtatcaagagatcttgtttttcaagtgcaatgttttggccgccgccaaagcatgggggaccctgtgggtggagaaaatggttccagccagtccgcatcccctcacgcttaaagcagcctgcctattgtgcgcccttgattgacaagaccacgaggctgagcgcgctcgggagattttttttttccccacccctttataaatggcttaaaccctcgttctagacggcttactggacatttgggagacaattgccttcttgttctttgctggagaaccccggctcctggctgacccggaatttaaggagctcctccctaagctgcgggaagatataagtcagacctgggaccgggtgggaagcctaggacaggctctggctggagctggccttgcctgttggacagtacaggcttggcttttctgtcttctgtgatggtaagtcccttgaccaggtcccgcactgactcacctggctttacttaatggaggtttaattatttttatttttaaggactgcagtaatggatgctccgcgccgtttgctggagaaagaggatcagaagaagtggcggagacttttagggtaaggcatttgctggggtggttaagtgactgagttagttaatgcatttcaggttgagattagggtttggggaatttaaagtgagtgagttcttgaattttaaattacagccaggggaaaagccatttgagattaataccagtcagcaaagcaaaatttgcctaacagcaagctgcttgttttgtcttatgaattagacattttatcggaaaagagcgaattaatgaataggaactggaggttgctttttaaattgcatcagcttaacccttcgctctgcttgcccaagaaaagggctctgtactttttctccttaaaaattaccgagcacgtttacagtcccagactgcgatttctttcccttgcattgtttggtttatgtatgggcacagtctctgcttcccagcggagttattggagggacagagatcttattaaagcacttgacagccctccatccttccccaccagcccccagcctgaagggttttgcagatcttcgtgggtgcttggctctgccactttcctggctctgatactcactgtcaattgtcacccatagtacagaatgtccctgtgacctcacatcctggcagggttcagagagggactggaacttgagtcgtctgttttgaaccacaggggacactcagtgttcagggacagtgctaggagcacgaagcggaatggtgaattcaggataagccctctgctcacaaagcgatttgttttaaaccaaaatatagtaagatatactacagtgaggtgctgtggattctgtctgtgtgatttctggtgtgttaacgcaattttcctgtagcacttccgagaggcccacattggtcacgtgtgagtcacgtgaccagtcagtggagcgggggctcagttctttaagcacctccaggactcagctctaataaacgaaacatttcgggtcacattggctgacctagaactatacaggctggccttgaactcttgctaccttttaaagacaataattcaataaatcaatatctcaaaaaattattgtatgcatttcaactgaaatgactttatggttttatgcaaagcattcagtgcaagatagagctcatagtgaaaaatagtgtatctgttaattgaaatttgtacacgtcctctgcgtagcaatagtaaagcgtgacctactctccttgcgttttaggtgtggactgagagtatcgataatctggggactagaaatgacaggttttattgcttggctttgcatggtgctgattgttgaacccagcctttgcacacactaagagcctctattactgagtcacacacttagccgtgatccctgcttcttacagttttctatctgctaaggaactgctgctttcctggtctctcctccgtcctcttcttattattctgttctcaatcctcacatattaaaaaagtgagggtgctagctgggcccagaaagcagttctctctctctctctctctctctctctccctccccccttttaaatctaattcttcaaaataaaaaaaatctattgtcattttaaaatttttgtatatttgttattgtaagagggcaccactggtgcatgtgtggtatcaggggtaagttggaggggttgtctctctcctttcccaccaagacttgagcgttctggaaggagaactgtcaggctgtcagtcaggcttgtacagcgtgctttactctctttgtgggccaattttctctctctctctttttttctctcaacaatttgtttttaagtgtgcctctctgtcctctctgtcccctctctctctctgtttgtgcgtgcgtgcatgcgtgtgtgcacatgaatgagttcccttggagaccagatgccctgggtcctctggcactgtagttacagatggcggtgagccacttgacactcactgttcagggaattgaacctggtcctctggaagagctgcctgcactcttccggcgagccggctctcctgatcctttcaccgcctttgtttaagaagctgtatttactactttagacttttcctatggacctcagagacgagctctcttcattctagtttcctctgattggcctcaaagctgtagaattttcttcttcagacctcattaggttctcagagaaagcacggactagatgagagcagtctctctcagtggagcagaagcgtgcaggagctccctgggaagccccgtgcttccagtgctgatgcaccgcaccgcgggcttagactaagcgagtttagtgagtttcctttcgtttccagtgcagagaagaaccgaagtgctcaggtgcttcctcatcatggtgtcaaagcagaaaactgttccccccttttaaattaaaatatgtttgcacgtgctggcttacttcctttgtgtatgtgtgtaggtacctgcatgtgcaagtcagaacagcttttaggggttagttctgcccttctactgtgtgggatccacgtagtgatcttaggtcgtcaggcttggaggcaagcatcactgagccgtatagctggcccaggaacttgttcttaatatgccctgtgtcatttctcagttactaggctgccctgttttcttccaatgatcatgatagaaagcatcgctgtacaaaggctggttagttagatttccccttccccactttgtttctgacaggggtctcattgtgtagccctggctgacctagaactcaccaggtagacaaggctggccggctagtcttgaactcaggaatctacctgccttagccttttaaatgctgggattagagatgtgtaccatgccatctgactttttaaagatttattttactttatgggtgcttccctccacatggactatgcatatttggtgtccacatgggcctgacagggtatcgatgccctcggaccagagttacagatcactgtgagctgccatgggtgctggaattgaaccaaggtcttctgaaagagcagctggtgctcttagcttctgagctatgtcttcaggcctcacatccaccttcctttgacttcaggccttgcctttaatcccagcactcagtagacagaggttgctggatctctgagctcaaggctatctggggctatatagtaagaccctgtctcaaaaaaacaaaaacaaaaacaaacaaacaaacaaaaaacaaaaccctaacttttaatctctagaattatggaaattgtctcaaataaaggaatttagagtttcttggtgaaattataaaggccacaagatcttgtgttactttgaaaaaactggatataggagggaaatctttatgttcaaatctggattagagggaaatggtcaggggagataaccgtgattcccacaaacagagggaatgcctggaaattttatcatttagagtttcgactagtattcaaaggttagaattagagcgccgatttcacttgttttttgacctacttatgagtttgtacagatgttgccgtgagtgcagtggcttcagaggccagaagaggtgctggaaggccctggagctgaagttatgcttgtctctgagctgcttgatggtgctgggagtgaacccagcttgcctgtgaaacagcctctgagctgtctctttggctctagaagaaaagcactaagttgaatataaatgtgctctgtgtctcagcttggcccttaagcagctctggtgcttcggtctagcctggggtaactgtgggtgggccccgtttttctgcttcttgcactgctgggcattgtgcccaggacttatacactgtaggccctgcccctgcagcttaggctctgggaagcattttaggcaaagggttcagagttttggtctagccttgggtaactgtgggtgggccccactttcgtttttctgcttgttgcactgctgggtgttgtgcccgggacttacacactgtaggccctgcccctgcagcttcagctctggaagcattttaggtgaactgttcagagtatacaatcatattagtgacaccttgattatcttaacccgtggatttgaactcggggccccttgctttcacggcaagtactctttctcactgagctctctccctactgtgggaagatttaaaatctataagctagatcacatgtcaatgggcccaggacctccaaggggccagaggctgagacattttgctcaaagttttgaaagtgatttttaccttggcagacagagttcgaacggagaactgtcttgcagttgatctcagaggcttggggcctgggcctggaaaatcactggtatggaggtggggaagcctggtgaagctggataaagctcagcattgctcagattctcttaattatatcttctcaccacagctggcttgcttgttcaactactaaactgccaggaaatccaggacagtctcacctctgcaggccaggcatccctgctccctccccgcaggcaggtgcctgcaaagagcaataaagaggcttcctgagtttatggcctactacttcctgggaaggagatggcaaaggctgtggtctcagcaaaatagccagaggccttagagagttagtatataggggcatagccggctatcctggtccataacttgcctagctttcccaactgcaatagctgtagacctctgacctttcacccctgctctctccttcctcttcttcctgcagcaggggtctttgctatgtcctactttgtccatctgcctgaaatacattactcctaggtctgtagacatcctgcttgctccctgcgttcaggtgtgctcagacacacgaggcaggcctctgcaaagccaagaccaaagtccccttccctgcctcttcttccgagttcctttaattcttcagagcattaatcaccttgatctagtttcctcgttatttctttatctcccctttgcttgcagagcaaggatgggtgtttctaatgatccatggcattaaagatacagagtagctcaaaaatactaggtgggaggtttggataatccattgtggataacccatgccaacttgggtaactgtccttggctggcagtcacagtccaggaagcaaggcagtctctgtatattctgtacactctctgagcctcagtgcctctgtgattaaagcttaaataaaattaaaaatgctaagaataattacaaaagaatgctgatattgagtaacgaggaaaagcgggcaccctcaatattgatgagacagagcccgagttcactttcaaattatcctaattcagatggcgagtgaagagtaacaacaaggctcaggtgtttgtttttgtttttaagcttgaagacagttatattaaagttcaagagagaagtagtagggtgggcaagctgtaaattttggcagctgcctggaggagagagaggggtaaggagaggagagaagaaagccctgctgtttactgtctgtctgtccattccatgtcaggaagtagtagtgcagagcctgggaatgcagtgaagtgagggtggtgtgcagtcagccagagtgagtgaagctggggctggatgagaaatttcgccagatcttttgaagagccatgcacattattgatgatgttgtttagaaagaaaatcagggccatggatgacctaatgggtaaaagtgattgccgtgtaaacctgatgacacgcgcatctttgatccctggtgcctgtggtggaaggaaagaaccaaatcccagaagttgtcctctgagctccccagggctgcggactatgcccgcattcatgcgtaccatgtgtatgtacatacaacaataaatgaaagtctagaaagccgatgtctgctggcttctccgtgtttaagatatgtctagaattcagtctcaccgttcagctcacactgaccatctaacagacacacctgttctgcgtcttcctaaacgttgctaattatcttattgtcgggaactgtgggtgggggctggggatgtagcacagctgacagagtgcttggctagtgtgcgccactcagagacttagtattggagagttttaagccagcctgagtgacaagagactctgccggactccccctgtccccaataccaccaaaagctttcttcttcacagtttctttttaatattgtactttacttattgttgttgttgttctctagctgttcccaagttaaggatcagaaccgaggtgacttgggtttgtgacaacggccgagctggctttgtggagaacagctgagtgcagttgtttcctatcttcctgtttttgtgcggctgaataggagggcttttgtttactgtctgtctcctcctaggacagggtttgcatctgcggctctattctctctctgcctgtctgtcttcaaagaggagagcacttctttgctgtctgtgcccatctgtgagcctccgtatctggaggagcttgggacatgtgattggaatgctctggggaggtggaggcggccatagcgggcagtggctgggtccttaaagatcctccctgcttctgtgagcactgctgtgtgccctgaaggatgctccctgctactgtgagcaatgctgtgtgtcttctgggagtgcttctctggggtctggtgagaatcgggaatcatttcaccacatctcccacacccctaaagtttgcttctcatggcactacaaccgaagccattgcagggatttgtttgtgacttagccttgctgtgtagccttggctggcctggcactcactttgttgcctaggctggcctcacatttgtgtctcttcttctacttcagcctcctgagtgccaggatgacgggcgtataccaccgtattattgcaggaattattgagttttataaaaaaaaaatgtatttctaaattcgtttgattttctgaaataaaagtgtgtttttgtctttacgtatgtgtgtgcatacatcatgtgcgtgcttggtgcatgtggaggtcagaaagacagcatccgatccccacgaactttgtatttaagaatggttatgaaccaccatggggaagctgggaattgaacttgggtcctccgtgagagcaacaaatgctcttttccactgagccgtctctccggctctaaggttattattattattattttgcattgttaatggcagttatttattgtttgtggggcgctggggagggaggtgcatgtacggtgcttgggtatagctcagaggacaacttgtggggtcttggttttccccttttaccatgtaggtcctaggatcaagctcaggtttgctggtttggtggcaagtgtctttacttgcttcgtcaccttaggccctattgcagagattttgaacaattgactgaactctgagcacaggtttggtctatttggttctcagtgttaacggtatgatattggggttgttatttgagacttgattgggtcagtttttttagacaaggttggaacttctgaatctcctgcctccacagtctttcagtggtcaaacccggggcttctgcaagcaccccaccaactgcagcgagtcctcagaccccccagtgttaaattctgtgctgggtgtggtcgtgtcatcaccaaggaatggtgttcacattggacctttggaccatctagcccatgcagtgtgggctccaggcactttccctttctcctctacaggccaaagatctcatcatcacaccagccactgtcttaaaagagaagccggacccggattcgctggtctttggagctacgtttactgaccacatgctgacggtggagtggtcctctgcgtctggatgggagaaacctcacattaagccttttggaaacttgcccatacatcccgctgcctctgttttgcactacgctgtggaagtaagtgcttgggagcacccgtgggccgtgattctctggccttgcaagcttctttagggtcggggacaggccctgctgtcttaactggaggttgtcataaacatcttcaaacttctcctgcagccaagtggattgccgataagtctcagagctagttttgcaggttggcttggcttatctgtgatattagtaaaatgtgatatgtgtgtgtgtgtgtgtgtgtgtgtgtgtgtgtgtgtgtgtgtgtgaaaatctcagcacttggtaacctaagactggatgggccgaaagttcaaggctaaccgagactatgcctttctttctggacagcctaggccacagaatcccaaagaaccccaaagcaatgagtattactaatttattaggtgctctctacttctcagacctttgagtgattgtgaagggtcggtcacaggatgaggcgctgtgctaactgctttcttataaccagcctgtgggatggcattgagcacgctccttcaccgtggagtgtttggagactccacatcttggtcctctgttgatacacactgaaacagatatgcagaatattgtcccatccccttggccctatatttcagtttattctggtttcttcacgggtaatggctttccccagaacactgaaggcacagagataaattctgacctaccaagagactgaaaatggccataggaaacaggatcaaatattcatttctgaatattggttcccaagattgtgcctttgagagatcttatactttatagagatcattttcatttcactacttgtgtttacagttcaaatttcccaccagaacaccccggaatccacccatttaatgatctgaagtgagaagcattcaaattcacattcagggccggagcattggctcggggattaagagcacctgctgatctggcagagaactgtagcaaagttctcagtacccacatggtggctgagacccaaaggttgtgagagccaccgctgtagagccatgcctggtacggagggagagagcagacaacggctgcggtgagctatgctgcacagtccatagaccaggctgtgtgctctcttggatgggtgacaggtattctgaaagcacaaagcaaaggaatagcaaaatgtcctcaggttcacagggagagacaacccaggcagccccactgagagaggaagatgaagtcacatcattaaaggggtgctcacaacacccagtaggaagggacttggggtgtctgtggttagaccaccctgattgctccagatcgaatctgatctggggagatcagcaggacagggcccggatagtacttgcatgggagacacggtcttggggagcaaacagacctgttggaagcagactgatctgcccttgaaccagttcctggcttcagacttccaccacaggcattttaaacatgggataaacagtggtaatgtctgcagaaatgttttgcctcccagtggagattcaaggacacagtgtttttgctgtttttttttgtttttttgtttttttttttcccctctctgtgacagagtgggagtgccagcctgctctaggtttggaggacacttggggtaaacatttgggtctgatgtgggaggggccagccctgcctctggagtctctctttaccaacacagtgtgcattgtatgaccccagacccagtggtggcccctattctagaagatgatcaaataacttcttagtaccttggttttgttttttaaagataggctggcttccagtccgtggtatagctgaagctggccttgaactctagatactggggtcacaggtacacattgccacaccagtctgaacttaaagattcttagcttcattcccagatcactgctagtcacacggcctgctgcattatatttatggcaagctctttgcatcaaatgacaggtgaacggaccattccccttcagagaaggctgtggtaacctcagcgcctctaggtcccttgattctcagacttaggactcagaattaccatggggttcacttttgaagctatgtcacccaactgcacaggtgccacagtgtgagacctgctggcctctataggaggtgagctaggaagaattaaaaaatgttgggttttggagtatatcaactgaaatttcagtttgactttttcatatattattattattattattattgttattggtggcaggctggcttcaaaatcatagcagtcctcctggctcagcctttcaaatgccataatcacagttttaaagaaattaaacggggatgtagcttagtgctgaacacttgccttgtgtgagtaatactctgtgttccacacgcaaaaccaaaaatagccctcaaattacagtcattctgccgtaaagccacaaccttctccatattattagtgatctaataaaatacagtgcttcttcataaggtttgattagctagaccgagttaccagaaatatcttcagtaagaatcaggttgggctgcttgggtgaccaagaacctgagaccgacagtctagggacctaaggtaaagtcaaatactactgtttgtttgtttgtttgtttttaaatgcagcaataaaatgctgtactcatagatcagagccagccatcgtcagaagcttcctcctgcagcttcctcctgaagcagatgggaacacatgcagagacctacagccagacacagggtagaaattcagagaactaagaacactctgccttaaatagaatgtctccatctaattcctccaagggctcagggaaccatcctccccgcccctcccccagaaagtgtgagagcagaggagacagaggacacctgaagaacaagaccctctatatcaatcgaacaaagctcctacgaaccccagagcccgaggcagcatgcacagaacctgcacgggtctgccccaggacttgcacagggcctgcacgggtctgccccaggtcccctgcatctatcgtctggcttccggtttagcgtttgtatgtgattcttgagtgtgcaaaccagtgggtctgattctcttgccttctctcgggctctttcatatttattttgcccaagtcccatgtgttagcttttgttttatcttgtgatttcttatgttattgcttaggcacctgtttattttctaatgagagacggaaagggaggtgaggtcagagggaattgggaggagtacaagagagaaactgtaatcagtatatgtcatgtgagaagaaagaatctattttcaattagagggaaaaagagaactggattggggacgaggaaacagctcagttcgtagcatgcgcctccatcacacacggagctgtggggtccagctctgcactcttgtccatcaatagccacacttcctgcgtgaggtgggccctggccagcgcttggttggaaagagagtgaaggggctaccgaggcagagtggcacagcgctgcttgggcggggcatgttgggaaagtacatattgggaatttaatccagaaaagaaggtgtatgtcccttgtctctttgcctgcttgcccagggaaaagatcctagctgtggagtgtggttactggggtctaaggggagcgagtgttcctctgtgagtctcggaggcggtagttttccattgtgtgtccttgtccaggctgttttgtgagcctttttctcctgggtactttcttgctcatagaggcaggggtgtggtgtaaaagaaacatagctcttgtccagagggagtaagaagcgtgtgatactgagccagagaatggccttggtgtgggcacgtgggatcacgtggccccgaatgacacagcctactgtggaagtggttactagtcaacgcatttatggaatgtgctgggacattgggtaacagggtagccaagtagaaagtcctgctgtctgatgacgtcctttcagcttctggctcagaacaatgtgaggttaggagcacaggtgggtaattaatggcgatggagattaaagataattcagggttctggatccgcaacattcctgttctccaccgttacggagagctctggtatctctagcctagttgttccttcatcagagaactttagctcagaaatctgtccttctcaactcctcccccccaacacacacacacacacacacacagagagagagagagagagagagcaagcttgccgtttaaggaccatccaccttgttctcattggtttgggatcgagtaggcaggccatccagcaagctctggggatctgtctgtcttggcagttgggattacaagtatgtactaccatgcctggctttcatttatgtcgattctaggattgaactcaggtcccatgtttgcatgcatctatgtgatcattnnnnnnnnnnnnnnnnnnnnnnnnnnnnnnnnnnnnnnnnnnnnnnnnnnnnnnnnnnnnnnnnnnnnnnnnnnnnnnnnnnnnnnnnnnnnnnnnnnnnnnnnnnnnnnnnnnnnnnnnnnnnnnnnnnnnnnnnnnnnnnnnnnnnnnnnnnnnnnnnnnnnnnnnnnnnnnnnnnnnnnnnnnnnnnnnnnnnnnnnnnnnnnnnnnnnnnnnnnnnnnnnnnnnnnnnnnnnnnnnnnnnnnnnnnnnnnnnnnnnnnnnnnngctggcatgagatcaccatggtgtgcctgtggaggtcagaggacaacccacaggagtggactctctccccctccccctccccttccctctcccctcttcccttcctcttccttggccttccaagattcatacttaacttctgaccaggagtggtggagtggtgctagaatgcttagattgccctgttctgctggctgatcaggttgagtactgaaaggacctttctattccctttctgttcccacattgctcccccccctcccctctccattccagttaaggccaaggatagcaacgtaaccactgagattgtcttagtcaccttctgagacttttctcttctcctcagctgtttgaaggcttgaaagcctttcggggagttgataacaagatccgattgttccggccggacctcaacatggatagaatgtgccgatctgctgtgaggaccacgctgccggtatgaacatttgcattcccttctatttcatggttattctgctctcacacccccccccccccaaaaaaaaaatctttgctgaataattgcatcagaccatatgagagtgaatgctgacttatgtatgtgatgccttcaattagaggtcagaggacaccttgagaatcagttctctgtaccacacgggatgatggcaagccccttaatgtgctgagcatcttaaattgtacattttagtacggctgtacgaagaagaaaattaaaacccagcccagggaggttaaaccacttgtccaaggtcactcagaaggaggacagcaaagtgatctgcggtttcctggcccatgcagtcatggaattgattaaacttcatctctgctcagcacccccaagacctgacttgttgttggcacaggttacttggatagccagccatcctcacatctgacacctctgcaatatgatcatgttcctgttccatgatcacgctagtgcactgtgatcatgctagtataccatgatcatgctagtgcagtgtgatcatgctagtgtagagtgatcatgctagtgcactgtgatcatgctaatgcagtgtgatcatgctagtgcactgtgatcatgctagtatatcataatcatgctagtgcagtgtgatcatgttagtgcagtgtgatcatgctagtgcagtgtgatcatgctagtgcagtgtgatcatgctaatgcagtgtgatcatgctagtgcactgtaatgatcatgcttgtgcactgtggtcatgctagtgcactgtgatcatggtagtgcactgtggtcatggtagtgcactgtgatcatgctagtataccatgatcatgctagtataccatgatcatgctagtgcaatatgatcatgctagtgtagtgtgatcatgctagtgtactgtgatcatgctagtgcactgtgatcatgctagtgcactgtgatcatgctagtgtgtggtgctgttctaccttgcataacacatcacgtctttgaaagtgtccctctggtctgtggatgagtggaaactgcttgatcagtttacaaagcccacttgtcacctttgggataagctgatgtccccttgtctttgtgaccagcgttcagttcagaacatggcctgctgcaattcctcattggtatctcaccatcagcttcctgatctgaaaagccagagtttcagtttcaaataggcaaattttatctttattttcccttgtggtttgtttatgttttatgttttctgggtaagaggttgttttaaaccttaaagttgtagatatctattttttaaaattagaagccatgatgctttgttatacttaatcataatatccagttataattgagaacagaagagctcacagatatcaatttttaaatagaagtaataatattttgttgattttgagcataaaatccaactataattgataagagaccacagatgtccactttaaaataaagatcataacttgttacatttgagtgtaaaagtataactgatatgggagtatgctcaatagggatctaacatctttttcaaaaatctcatttatttatttgggggcagggaggtgagtgtagagttcagaagcaacttggctttcttgcaatcatgtggttatcaggcttggcggcatgaccccttacgtgctgagctgagccatcttgaagcctcagagaatctaatgtcttatcttttccttatgaataattcatagttttccagagggattcacagattttttttttaaagcatttattctgggtacctttcacaatgtttcatgttaggaaagagtgaataaaagctgttgaaggagccaatcggcactgcaacatggggacagttttgaaaattgagcttctgtctgctctctgatctgggagtctgactgtctgtcctttgctggaactcattagggattctgtcctttcagatgtttgacaaggaggagctcctaaagtgtattcttcagcttctacagatcgaccaagaatgggttccctactccacctctgccagcctctacatccgccccacatttatcggaactgaggtacggcctggctctatttaggggaaatatatatatatatatatatatatatatatatatatatatatataatttaaagtctttaaaaaatttatttttatgtgtacataagtgggcttgtgtgagccaccacgtgtgtggatgtcagaattgcatcttgggtattgattcttctactatgtgtgctgtggggatggagcttgggtagtttggattggcagaaagtgccttcatcctcagagtcatcttgtatgccccaaaggtaattttcattttttttttaattactcaccccaccaccaccacgtgagcacacaaacacacacaacacacacacacacacacacacacactacacttccacatacccctccctgtacacacctgtcccagtaattttttgacctcccttgatggctagttctggggtgtggctccctcatgacagacccttggagatcgatgtggtcatgctgtagaaagtttgtcagagagaacgcttggctttatttttattatcctgaatccttagcaattctgctaaaaaaaaaaaaataggaagagaaggggcccattcgaagaaaaattgctgaaaatatacttcatcaggagctggtagggaagggttggataataaaacctagggctactggataggccatacttgttggcaagtgtctttacccactgagctatcacacaagacccactctttataagataaatccattgcagaaggcttctctgtctgtaattggcatctgttgagaaacaagtattgaattgctttcacattcatttattttatgggcgttacacctacatgtatgtacattctatacatgtgcttggtgccctaggatgtcagaggagggtatcggaccctatggaactgtagtaacggatggttgtgagtcactctatgggagctgtaatgaaacccaggtcctttcaacacagggtttctctgtgtagccctggctgtcctggtacttgctctttagaccaggctggccttgaacgccaaatccttctgcctctgcctcctagtactgagattaaaagtgtgtacccacacatggctcctgtggcttgattcttgctcagcttgcaagcgttggtggcttcaggtgtgggtaacctgcctgactcaagtatttaactgtagtttaaagtcactgtttgcatcttttgttttttgatttttttaaaaatgtgttttaaaggcttcttcacttggtcattcctctgttttaaagttttctttatttcctttaaacctcacctatgtgaatgttaaagagctcactttctccacggagacaccaagttgtatccccaggtatcgattacacaggtccacattggatgaatcaattccgtatcgattgcagtgcctgttcacagcacatcaggctttgattggtaatgtctgtcacagcacatcaggctttgattggtaatgtctgtcttggggcttcctacccctgtcttctctttatgtagtttgttgcccccgtgccttgccatggtctttgctctcagtgttgtgcccttggtcacctgacctggtgtcttctggctccctcacacccagccttggttagctggcctctttggagatgtcttaactatagaagttagtaagggacttgtcatttggctgacaaannnnnnnnnnnnnnnnnnnnacaaagcacacttgtcacctttgggataagctgatgtccccttgtctttgtgaccagcgttcagttcagaacatggcctgctgcaattcctcattggtatctcaccatcagcttcctgatctgaaaagccagagtttcagtttcaaataggcaaattttatctttattttcccttgtggtttgtttatgttttatgttttctgggtaagaggttgttttaaaccttaaagttgtagatatctattttttaaaattagaagccatgatgctttgttatactcaatcataatatccagttataattgagaacagaagagctcacagataccaatttttaaatagaagtaataatattttgttgattttgagcataaaatccaactataattgataagagaccacagatgtccactttaaaataaagatcataacttgttacatttgagtgtaaaagtataactgatatgggagtatgctcaatagggatctaacatctttttcaaaaatctcatttatttatttgggggcagggaggtgagtgtagagttcagaagcaacttggctttctcgctatcatgtggttatcaggcttggcggcatgaccccttacctgctgagctgagccatcttgaagcctcagagaatctaacgtcttatcttttccttatgaataattcatagttttccagagggattcacagatttttttttttttaaagcatttattccgggtacctctcacgatgtttcatgttaggaaagagtgaataaaagctgttgaaggagccaatcggcactgcaacatggggacagttttgaaaattgagcttctgtctgctctctgatctgggagtctgactgtctgtcctttgctggaactcaatagggattctgtcctttcagatgtttgacaaggaggagctcctaaagtgtattcttcagcttctacagatcgaccaagaatgggttccctactccacctctgccagcctctacatccgccccacatttatcggaactgaggtacggcctggctctatttaggggatatatatatatatatatatatatatatatatatatatatataatttaaagtctttaaaaaaatttatttttatgtgtacataagtgggcttgtgtgagccaccacgtgtgtggatgtcagaattgcatcttgggtattgattcttctactatgtgtgctgtggggatggagcttgggtagtttggattggcagaaagtaccttcatcctcagagtcatcttgtatgccccaaaggtaattttcattttttttttaatcactcaccccactaccaccacgtgagcacacaaacacacacaacacacacacacacacaaacacacactacacttccacatacccctccctgtacacacctgtcccagtaattttttgacctcccttgatggctagttctggggtgtggctccctcatgacagacccttggagatcgatgcggtcatgctgtagaaagtttgtcagagagaacgcttggttttatttttattatcctgaatccttagcaattctgctaaaaaaaaaaataggaagagaaggcccccattcgaagaaaaattgctgaaaatatacttcatcaggagctggtagggaagggttggataataaaacctagggctactagataggccatacttgttggcaagtgtctttacccactgagctatcacacaagacccactctttataagataaatccattgcagaaggcttctctgtctgtaattggcatctgttgagaaacaagtattgaattgctttcacattcatttattttatgggcgttacacctacatgtagaatgctacacattctaaacatgtgcttggtgccctaggatgtcagaggagggtattggaccctatggaactgtagtaatggatggttgtgagtcactctatgggagctgtaatgaaacccaggtcctttcaacacaggatttctctgtgtagccctggctgtcctggtacttgctctttagaccaggctggccttgaatgccaagtccttctgcctctgcctcctagtactaagattaaaagtgtgtaaccacacgtggctcctgtggcttgattcttgctcagcttgcaagcgttggtggctacaggtgtgggtaacctgtctgactcaagtatttaactgtagtttaaagtcactgtttgcatcttttgttttttgattttttaaaaaatgtgttttaaaggcttcttcacttggtcattcctctgttttaaagttttctttatttcctttaaacctcacccatgtgaatgttaaagagctcactttctccacggagacaccaagttgtatccccaggtatcgattacacaggtccacattggatgaatcaattccgtatcgattgcagtgcctgttcacagcacatcaggctttgattggtaatgtctgtcacagcacatcaggctttgattggtaatgtctgtcttggggcttcctacccatgtcttctctttatgtagtttgttgcccccgtgccttgccatggtctttgctctcagtgttgtgcccttggtcacctgacctggtgtcttctggctccctcacacccagccttggttagctggcctnnnnnnnnnnnnnnnnnnnnnnnnnnnnnnnnnnnnnnnnnnnnnnnnnnnnnnnnnnnnnnnnnnnnnnnnnnnnnnnnnnnnnnnnnnnnnnnnnnnnnnnnnnnnnnnnnnnnnnnnnnnnnnnnnnnnnnnnnnnnnnnnnnnnnnnnnnnnnnnnnnnnnnnnnnnnnnnnnnnnnnnnnnnnnnnnnnnnnnnnnnnnnnnnnnnnnnnnnnnnnnnnnnnnnnnnnnnnnnnnnnnnnnnnnnnnnnnnnnnnnnnnnnnnnnnnnnnnnnnnnnnnnnnnnnnnnnnnnnnnnnnnnnnnnnnnnnnnnnnnnnnnnnnnnnnnnnnnnnnnnnnnnnnnnnnnnnnnnnnnnnnnnnnnnnnnnnnnnnnnnnnnnnnnnnnnnnnnnnnnnnnnnnnnnnnnnnnnngcctgagagtctcatcattgttccttacaggaatatgggtgaggggtcacttgctggagaagaaatgactcaaagacagctgcgtcacaagtccaccccagcacgggtgacagctcccaaagctggggacctggagcagccacagcctgcaggcagcgcagcagcttggccagtcctttccatgtgcctcacagttgatctaaatctctcccaggcggctcggctggtttccgcttccactgcagctggtgtggcctccaagtcttctttgcagctttgcttttctgagacagattctcagcttttattgcctgttctagccagagtgttggggtggcggtcgtgactcagggacaccctagaaccgttttgagttgtttagcttactgcttgaggagcttctgggctggatggaatgtattggaatgaaaacacaacagcttacttattattatttatcctgaggagacaagttctcattagcctagccacactagtctagaatttaccgtgcagtagcccaggctggcctcatttttataccagtgctattggggcagcttccccacttctgggattggcagcttgaaacagaatcttttttttttttttttttttttttgggggatcagggtctcagcctctctccctgattgtcgacttcaaatttacaggtaatctcctgcctctgcttcccgagtgggattgccagcacacccccacacccccacatctggctttgtgtttgctttctcctctacccagcttgagctagcagttggaatggtaaggtcagagcagtgaggagattcctagtcttatgagccatctcttactgtgcagccctgcagctcaaagcaggccccacacaccttgggttttacaagccacatagccactcagcctgccccaagcctgtcccatcacaccggaagggaaggagcaggccagcgactgtgacagggagcgaatgacattgtctgagagtgacctgtgttgtgtactcttcctcttgaccctttcccagtgttcttgtgcacttgaccatgtggacatttctgcttaggactgattttagatttaccgagccttgtttctcaggtcctaacctcacgatctgacttttccttggcattcgttttgagttttcacactgagtgttaagctctcggaccacatctcctgtcagtatgctataacctcacacaccctacggtgctgggcctggcctctctgaggtgtcattagcctcgaggtgaagcctcagtggaaaaggctgtaatacctgtcatttgtgtcactgacagcttcatttctgtggtagtgacttgagcggtggaggggtggggcctctttttagtgtcagtaatgcaggaggcagctttgctcacagacctgtttcccaactgcaggagcttagcatggtgacttggaggaggtgaggaagaggaggggagcaggcagnnnnnnnnnnnnnnnnnnnnnnnnnnnnnnnnnnnnnnnnnnnnnnnnnnnnnnnnnnnnnnnnnnnnnnnnnnnnnnnnnnnnnnnnnnnnnnnnnnnnnnnnnnnnnnnnnnnnnnnnnnnnnnnnnnnnnnnnnnnnnnnnnnnnnnnnnnnnnnnnnnnnnnnnnnnnnnnnnnnnnnnnnnnnnnnnnnnnnnnnnnnnnnnnnnnnnnnnnnnnnnnnnnnnnnnnnnnnnnnnnnnnnnnnnnnnnnnnnnnnnnnnnnnnnnnnnnnnnnnnnnnnnnnnnnnnnnnnnnnnnnnnnnnnnnnnnnggcaggaagcaggagctgatgcagaggccatggagggatgttacttactgccttgcttctcctggcttcctcagctttctttcctatagaacccaggactaccagtccagggatggcaccacccacaatgggccctcccacccttgatcactaattgagaaatgccttacagctggatctcatggaggcatttcctcaattgagtgtcctttctttctctgtgataactccagcttatatcaagttgacacacaaagccagccagtacacacctaccgtactgggcctggcttctctgaggtgtcattagcctcgaggtgaagcctcagtggagaaaagttgccagccttctttgtccttttctgctcaccctgcgggacatttgtgagtctaggtgtgaagtcactgttcccagaagtgctcttcagaatccccgaaaagtagccagggactcctcacctgagcccacggggacagagctattctttaatagcaaagcctgtgggaggtcagcaatgtaaccctgggctggctgaccttcagatatagtggctttgatgttatttgtgtggaacaaggtctcctgtatcccagatgggcctgaactcactttgtagcccaggctgaacttgaccaaacggcaattcttctgcctcagactctcaagtgtttgagattacaggtgcttgcttctgtgcccgtctctataccccttttcttttttttttcttttaatattttttattaggtattttcctcatttacatttccaatgctatcccaaaattcccccataccacccccccactacctaccactcccactttttggccctggcaagttcccctgcactggggcatatatagtttgcatgtccaatgggcctctctttccactgatggccaactaggccaccttttgatacatatgcagctagagtcaagatctccggggtactggttagttcataatgttgttccacctatagggttgcagttccctttagctctatgggtactttctctagctcctccattgggggccctgtgatccatccaatagttgactgtgagcatacacttatgtgtttgctaggccccggcatagtctcacaagagagagcgctatcttgctagtgtatgcaatggtgtcagcgtttggaggctgactatgggatggatccctggatatggcagtctctacatggtccatccttttgtctcagctccaaactttgtctctgtaactccttccatgggtgttttgttcccaattcaaagaaggggcaaagtgtccacactttggtcttcattcttcttgagtttcatgtgttttgcaaattgtatcttatatcttgggtattctaagtttctgggctaatatccacataccagtgagtacatatcatttgagttcttttgtgattgggttgcctcactcaggatgatgccctccaggtccaaccatttgcctaggaatttcacaaattcattctttttaatagctgagtagtactccattgtgtaaatgtaccacattttctgtatccattcctctgttgaggggcatctgggttctttccagcttctggctattataaataaggctgctatgaacatagtggagcatgtgtccttcttaactgttgggacatcttctgtataacacctgtccagggtcttttggctttcatagtctctgttgaaaagtctgatgtaattctgataggcctgcctttatatgttacttgacctttttcccttactgcttttaatattctctctttatttagtgcatttgttgttctgattattatttgtcgggaggaatgtcttttctggttcagtctatttggaattctgtagccttgtatgctcatgggcatgcctttctttaggtttgggaagttttcttctatagttttgttgaagatatttgctggccctttaagttgaaaaatcttcattctcatctactcctattatccgtaggtttggtcttctcattgagtcctggatttcctggatgttttgaattaggatctttttgcattttgcattttctttgattgttgtgccgatgttctctatggaatattctgcatctgagattctttcttccatctcttgtattctgttgctgatgctcgcatctatgattccagatttctttcctagggtttctatctccagcgttgcctcactttgggttttctttattgtgtctacttccctttttaggtcttggatgattttattcaattccatcatctgtttggttgtgttttcttgcaattctttaaaggatttttgtgcttcctctttaaggtcttctacctgtttagcagtgttctcctgtatttctttaagtgagttattaaagtccttcttgatgtcctctaccatcatcatgagatatgcttttaaatccgggactatcttttcaggtgtgttggggtgcctaggactgggtggggtgggagtgctgcgttctgatgatagtgagtggtcttggtttctgttagtaagatgcctttcgccatctggtaatctctggagttagttgttttagttgcctctggttagagcttgttcctcaggtgattatgttagcctctatcagcagacctgggagactagctctctcctgagtttcagtgtttagagtattctctgcaggcaagctctcctcttgcagggaaggtgcccagatatctggtgttcaaacctgactcctggcagaggttgtgatccactcaccagaggtcctaagatcccgtgaagagtcctgtggggaccttgggggtgtctgcagactccgagcccaaggtgccccggagctggtgcagaccagaagggacttgtgaccctgatcaggccaggttttctgcttccctaattaatgcagtctcaggtcctgcgagattggattggagcactatacccattttctacaaggaatgtcttactaaggtttggttgtttttctacaaatatttgataaaaatcaggaataatggtgctggagagatggctagtggctaagaatactggctgctcttgcagagacctgagttcagtttctagcactcacacggtggctcacaactatccttcactctagttacaggggatctaaagtcttcttctggcctctgcagggaccaggcacacacacacaatacacttacatacatgtagacaaaacacgcatgataaaaatggttctgctttatggagacacactggttatcaaaacagaaagaaatgagtagatttaagatgtctattagtccgcctttgacaagctggatgctcgagaaccacataccacagcacctcactcaggttgggggcacttgctcctgaagtgacatctaaaggatgtgtaagatgggcttcaatgttggatgctaccgggatgagtcttagtgtgactggctgctttgttacagtgccacagtgagttaattatttttcagttgctatgattaaataccgtgagcaaaagcagcttggggaagaaagagtttactttagcttatgtgaggtcctggaggatggggctcatcatgtagggagggtgtggcattgggcagaaagttggtagatcacatttccattggcacaagggagagagagaactggggtcagattataaaccctcaaagcccacagccctgctgcctagtgtgacttgcctnnnnnnnnnnnnnnnnnnnncccttgtctgcccagaagggagagtttctgtaaatttttctctatataaggacccaagtctggcaggatggctttacccttgtgacctcccatgatgcaccaacctaaaagcccctatggctttggacagtcataccagagctgtgatcttactctctgcctgactggatttgcgatcccctagcagccattcctctgagtgagtctatgagggtgttagcagagaggtttaactgagtagagaagacctgtcctgaatgttgtggtactgactcacgggcttgggtccctgactgaacaaaagggaaacggtgttgagcatcagcaaacatccctctccctgctctctgaccgtggacacagagaccagacacccacatttcctatgcgattccttccttatagcagtgagaaaagtcattaatgcagggagtcagggcttcaacggggacttcagaggaggtaatagaggtggggagggcaggagaggacctggaaggtggagagggaggagaattgaatgacaagtcatgctgtgctgatcggggatggagctcaggcagcagcaagtgccttcagggaaggtcttgggtacttactgtattgattatttctattattattacatgtatgtgagtgctttgtctgccttatggctgaggatgtcaggagagggttttgaatccctgggaactggaattacagcttctgtaaggcatatctcacttgggtgctggaactgatattgggtcctttagaaccagcaggcacccatagcccacctaagcatctctccagctctaagttgttgctgctgttcctcctcctcctcctcttcttcttccttcttctcctcctcctcctcttctagacttattcagcccccaaatcttaggcagctaaattggccttgacccccaatcctcctgcctcagcctcccaagtgctgagatgataggcaagagacatggttccattttctcatttaactctgaaagcttttaaaacagaagtctctgaaagcaagcgagctggttgtcttcctctggatccagccaccttattatttgctttgttggcttcggtcagaactgtcctcccacttgcaggctgccctgctccctgctctgaggccacactgtagactaatggaatttctcannnnnnnnnnnnnnnnnnnnnnnnnnnnnnnnnnnnnnnnnnnnnnnnnnnnnnnnnnnnnnnnnnnnnnnnnnnnnnnnnnnnnnnnnnnnnnnnnnnnnnnnnnnnnnnnnnnnnnnnnnnnnnnnnnnnnnnnnnnnnnnnnnnnnnnnnnnnnnnnnnnnnnnnnnnnnnnnnnnnnnnnnnnnnnnnnnnnnnnnnnnnnnnnnnnnnnnnnnnnnnnnnnnnnnnnnnnnnnnnnnnnnnnnnnnnnnnnnnnnnnnnnnnnnnnnnnnnnnnnnnnnnnnnnnnnnnnnnnnnnnnnnnnnnnnnnnnnnnnnnnnnnnnnnnnnnnnnnnnnnnnnnnnnnnnnnnnnnnnnnnnnnnnnnnnnnnnnnnnnnnnnnnnnnnnnnnnnnnnnnnnnnnnnnnnnnnnnnnnnnnnnnnnnnnnnnnnnnnnnnnnnnnnnnnnnnnnnnnnnnnnnnnnnnnnnnnnnnnnnnnnnnnnnnnnnnnnnnnnnnnnnnnnnnnnnnnnnnnnnnnnnnnnnnnnnnnnnnnnnnnnnnnnnnnnnnnnnnnnnnnnnnnnnnnnnnnnnnnnnnnnnnnnnnnnnnnnnnnnnnnnnnnnnnnnnnnnnnnnnnnnnnnnnnnnnnnnnnnnnnctgaattttgactcactcagtattgaagtggcatggagactttctcccccacttgctctccaaggaacggcagtgagttctttgaagatttgatttttattttacatctatgagtgtcctatctgtgcacatgggtgcagtgcccatttgaggccagaagagggcatcagatccctggaattgaagttactgagattccacgtggttgctggaaactgaacctgggtcctctgcaagaagagctgagccggtgctccagccctcaatgaattcttttcatggagagacaatggatgtaagctatggaaggttcctaagccatctatggtccacagaggaacttcgggcttgcaatcatgagtggacctggattaaattttagaaaatacattcctacgcacagctttggccagcattaacaaatgctatttattgtataacttagctgttgctaaggatatggatatgaatgaagcgactcatcaagatgctttgtcagcgggagatttggtggctgtgtctaattctgcgtctttccatctgtgctcgctgctgccccctagtggactaaatgcaaactaacttaccaaggtcaggaaagcacacgcacacagaggaattcccctttgcttctatactgtgtgccctcacagatcctaacgtcccagcccgaacgaggtgaaatttagtacagagaaaaaaaattattactctgtagctactgttactttcttttcttttcttttcttttcttttcttttcttttcttttcttttcttttctcttctcttctcttctcttctcttctcttctcttctcttctcttcttttctttctttctttctttctttctttttttttttttttttgtataatgcaattgtataaaatacttggtgtgtgtgcaccagcattcatgaggtaggggacaaagtactattaggttgtacataagacagacaattcattcagaaatttagaagctagatgtggccttcagataacagctagcatatcatatctgagtggcctctctggattccttatcatttgagttggttagtctcctgttgtgatcctactgtgaacaaggcagcttgcagagggaggggtttacttgggttggtgattacagagggttagctcacaatggcaggggaggaatgacagatggcaggcaggaagccggcaaatcacatccttaacctcgagcaaacggcagccgggtgagaccctctagatgtgaggtgctgctaccagtgaaagtcctccgggttcttctcaaaagaaagacttcagaggcagtttatctagcaaagcagaatgtgcatttcaaagagagcctggagcagtatggcccataatgaggagcggcccactgagttcctgggttgtggattttgaaactttacattgcagtagtctatgctaattatacctaagggnnnnnnnnnnnnnnnnnnnncccaatccatgagcatgggagatctttcccatcttctgagatcttctttaatttctttctttagagacttgaagttcttatcatacagatctttcacttccttagttagagtcacgccaaggtattttatattatttgtgactattgagaagggtgttgtttccctaatttctttctcagcctgtttattctttgtgtagagaaaggccattgacttgtttgagttaattttatatccagctacttcaccaaagctgtttatcaggcttaggagctctctggtggaatttttagggtcacttatatatactatcatatcacctgcaaaaagtgatattttgacttcttcttttccaatttgtatccccttgatcttttgttgtcgaattggtctggctaggacttcaagtacaatgttgaataggtagggagagagtgggcagccttgtctagtccctgattttagtggattgcttccagcttctcaccatttacattgatgttggctactggttcgctgtaaattgcttttatcatgtttaggtatggcccttgaattcctgatctttccaagacttttatcatgaatgggtgttggattttgtcaaatgctttctccgcgtctaaggagatgatcctgtggttgttgtctttgagtttgtttatataatggattacattgatggatttctgaatagtaaaccatccctgcatccttggaataaaacctacttggtcaggatggatgattgttttaatgttagcgagaattttattgagtatttttgcatcgatattcataagagaaattggtctaaagttctatctttgttgggtctttttgtggtttaggtatcagagtaattgtggcttcatagaatgagtgggtagagtaccttctacttttattttgtggaatagtttgtgcagaactggaattaggtcttctttgaaggtcttatagaactctgcattaaacccatctggtcctgggctttttttggttgggagactattaatgactgcttctatttctttaggggatatgggactgtttagatcattaacttgatcctgatttaactttggtacctggtatctgtctagaaatttgtccatttccttcaggttttccagttttgttgagtatagccttttgtagaaggatctgatggtgttttggatttcttcaggatctgttgttatgtctcccttttcatttatgattttgttaattaggatgctgtccctgtgccctctagtgagtctggctaagggtttatctatcttgttgattttctcaaagaaccagctccttgtttggttgattctttgaatagttcttcttgtttccacttggttgatttcacccctgagtttgattatttcctgccgtcttctcctcttgggtgaatttgattcctttttttctagagcttttaggtgtgttttcaagctgctagtgtgtgctctctctagtttctttttggaggcactcagagccatgagttttcctcttagaaatgctttcattgtgtcccataagtttgggtatgttgtggcttcattttcattaaactctaaaaggcctttaatttctttctttattccttccttgannnnnnnnnnnnnnnnnnnnnnnnnnnnnnnnnnnnnnnnnnnnnnnnnnnnnnnnnnnnnnnnnnnnnnnnnnnnnnnnnnnnnnnnnnnnnnnnnnnnnnnnnnnnnnnnnnnnnnnnnnnnnnnnnnnnnnnnnnnnnnnnnnnnnnnnnnnnnnnnnnnnnnnnnnnnnnnnnnnnnnnnnnnnnnnnnnnnnnnnnnnnnnnnnnnnnnnnnnnnnnnnnnnnnnnnnnnnnnnnnnnnnnnnnnnnnnnnnnnnnnnnnnnnnnnnnnnnnnnnnnnnnnnnnnnnnnnnnnnnnnnnnnnnnnnnnnnnnnnnnnnnnnnnnnnnnnnnnnnnnnnnnnnnnnnnnnnnnnnnnnnnnnnnnnnnnnnnnnnnnnnnnnnnnnnnnnnnnnnnnnnnnnnnnnnnnnnnnnnnnnnnnnnnnnnnnnnnnnnnnnnnnnnnnnnnnnnnnnnnnnnnnnnnnnnnnnnnnnnnnnnnnnnnnnnnnnnnnnnnnnnnnnnnnnnnnnnnnnnnnnnnnnnnnnnnnnnnnnnnnnnnnnnnnnnnnnnnnnnnnnnnnnnnnnnnnnnnnnnnnnnnnnnnnnnnnnnnnnnnnnnnnnnnnnnnnnnnnnnnnnnnnnnnnnnnnnnnnnnnnnnnnnnnnnnnnnnnnnnnnnnnnnnnnnnnnnnnnnnnnnnnnnnnnnnnnnnnnnnnnnnnnnnnnnnnnnnnnnnnnnnnnnnnnnnnnnnnnnnnnnnnnnnnnnnnnnnnnnnnnnnnnnnnnnnnnnnnnnnnnnnnnnnnnnnnnnnnnnnnnnnnnnnnnnnnnnnnnnnnnnnnnnnnnnnnnnnnnnnnnnnnccttagtccatggtggtctgataggatgcatgggacaatttcaatatttttgtatctgttgaggcctgttttgtgaccaattatatggtcaattttggagaaggtaccatgaggtcctgagaagaaggtatatccttttgttttaggataaaatgttctgtatgtatctgtgaagtccatttgtttcataacttctgttagtttcactgtgtccctgtttagtttctgtttccaggatctgttcattgatgaaagtggtgtgttgaagtctcccattattattgtgtgaggtgcaatgtatgctttgagctttactaaagtgtctttaataaatgtggctgcccttgcatttggagcatagatattcagaattgagagtttctcttggaggattttacctttgagtatgaagtgtccctccttgtcttttttgataactttgggttggaagtcgattttattcgatattagaatggctattccagcttgtttcttcagaccatttgtttggaaaattgctttccagtgtttcactctgaggtagtgactgtcttttttcctgagatgggtttcagtgtctgtctttttctctgagatgggtttcctgtaagcagtagaattttgggtcccgtttgtgtagccagcctgttagtctatgtctttttattggggaattgagtccattgatattaagacatattaaggaaaagtaattgttgcttcctattatttttgttgttagagttggcaacctgttcttgtggctgtcttctttttggtttgttgagggattactttcttgctttttctagggcatggtttccgtccgtggatcgtttttttttttttttttttttttttttctgttatcatcctttgaagggctggattcgtggaaagataatgtgtgcatttggttttgtagtggaatactttggtttctccatttatggtaattgagagtttggctgggtatagtagcctgggctggcatttgtgttctcttagtgtctgtataacacttgtccaggctcttctggctttcatagtctctgttgaaaagtctggtgtaattctgataggcctgcctttatatgttacttgacctttttcccttactgcttttaatattctctctttatttagtgcatttgttgttctgattattatttgtcgggaggaatgtcttttctggttcagtctatttggagttctgtaggcgtgtatgctcatgggcatgtctttctttaggtttgggaagttttcttctatagttttgttgaagatatttgctggccctttaagttgaaaaatcttcattctcatctactcctattatccgtagctttggtcttctcattgagtcctggatttcctgcatgctttgagttaggatatttttgcattttgtattgtctttgattgttgtgccgatgttctctatggaatattctgcacctgagattctgtcttccatctcttgtattctgttgctgatgctcgcatctatgattccagatttctttcctagggtttctatcttcagcgttgcctcactttgggttttctttattgtgtctacttccctttttaggtcttcgatgattttattcaattccatcatctgtttggtcgtgttttcttgcaattctttaagggatttttgtgcttcctctttaaggtcttctacctgtttagcagtgttctcctgtatttctttaagtgagttattaaagtccttcttgatgtcctctaccatcatcatgagatatgcttttaaatccgggactatcttttcaggtgtgttggggtgactaggactgggtggggtaggagtgctgtgttctgatgatagtgagtggtcttggtttctgttagtaagatgcctttcgccatctggtaatctctggagttagttgttttagttgcctctggttagagcttgttcctcaggtgattatgttagcctctatcagcagacctgggagactagctctctcctgagtttcagtgtttagagtactctctgcaggcaagctctcctcttgcagggaaggtgcccagatatctggtgttcaaacctcactcctggcagaggttgtgatccactcactagaggtcctaagatcccgtgaagagtcctgtggggaccttgggggtgtctgcagacgctgatcccaaggtgccccgaagctggtgcggaccagaagggacttgtgaccctgatcaggccaggttttctgcttccctaattaatgcagtctcaggtgctgcgagattggattggagcactatacccattttctacaaggaatgtcttactaaggtttggttgtttttctacaaatatttgttaaaaatcaggaataatggtgctggagagatggctagtggctaagaatactggctgctcttgcagagtcctgagttcagtttctagcactcacacggtggctcacaactatccttcactccagttacaggggatctaaagtcttcttctggcctctgcagggaccaggcacacacacacagtacacttacatacatgtagacaaaacacgcatgataaaaatggttctgctttatggagatacactggttatcaaaacagaaagaaatgagtaggtttaagatgtctattagtctgcctttgacaagctggatgctcgagaaccacataccacagcacctcactcaggttgggggcacttgctcctgaagtgacttctaaaggatgtgtaagatgggcttcaatgttggatgccaccgggatgagtcttagtgtgactggctgctttgttacagtgccacagtgagttaattatttttcagttgctatgattaaataccgtgagcaaaagcagcttggggaagaaagagtttactttagcttatgtgaggtcctggaggatggggctcatcatgtagggagggtgtggcattgggcagaaagttggtagatcacatttccattggcacaagggagagagagaactggggtcagattataaaccctcaaagcccacagccctgctgcctagtgtgacttgcctcctctagcacgggttgcatcttctaaaggttccatctcttttccagacatctctaccatctggagaccaagagttgagatctgtgatcccttctcttacagactgagcagctcaaactgcagttatttttgcagtgttttggagcctgggcatccatgactgattgtggctggcttcaggtggtaccttccttccaggtggtcctccctggcccttgtctacccagaagggagagtttctgtaaatttttctctctataaggacccaagtttggcaggaaggctttacccttgtgacctcccatgatgcaccaatctaaaagcccctatggctttggacagtcataccagagctgtgatcttactctctgcctgactggatttgcgatcccctagcagccattcctctgagtgagtctatgagggtgttagcagagaggtttaactgagtagagaagacctgtcctgaatgtcatggtactgactcacgggcttgggtccctgactgaacaaaagggaaacggtgttgagcatcagcaaacatccctctccctgctctctgaccgtggacacagagaccagacacccacatttcctatgctattccttccttatagcagtgagaaaagtcattaatgcagggagttagggcttcaacgtggacttcagaggacataatccagttggtaggcaatagaggtggggagggcaggagaggacctggaaggtggagagggaggagaattgaatgacaagtcatgctgtgctgatcggggatggagctcaggcagcaacaagtgcattcagggaaggtcttgggtacttaactgtattgattatttctattattattacatgtaagcgagtgctttgtctgcatgtacatgtgtgcagcacatgcctgccttatggctgaggatgtcaggagagggttttgaatccctgggaactggaattacagcttctgtaaggcatatctcacttgggtgctggaactgatcttgggtcctttagaaccagcaggcactcatagcccacctaggcatctctccagctctaagttgttgctgctgctcctcctcctcttcttcttcttcctcttcttcctcctccttttcctcttcttccttctcctcctcctcttctagacttattcagcccccaaatcttatgcagctaaattggccttgacccccaatcctcctgcctcagcctcccaaatgctgagacgataggcaagagacatggttccattttctcatttaactctgaaagcttttaaaacagaagtctctgaaagcaagcgagctggtcttcctctggatccagccaccttattatttgctttgttggcttcggtcagaactgtcctcccacttgcaggctgccctgctccctgcctctgaggccacactgtagactaatggaatttctcagttcactgactcctttctgccacccttcaaataactcgtgacatccccccttctgtgaagggatttctgggtgacccagaaagaagtggcctttgtttctcaccacacccaagcgccatttgtctgtgcagaggactaatgggtctggttattgtgaagcttagccccgtctcccaaagctaaaacaaaaccaccacgctgaaatgttccttagacaaacagacttggcacaggccatttgcagtgtccaccggctgctgacatccttattccctatttagttatgtggcttttcttttagttaataagaagcacaactttatcatcccataaccttgtctgtcattcggttggcattacataataaaattcacttaataggagcacaggatatctaaattgcttttcagggtagaagaggagattggagcaaggggctaagtcagggatcctgagtgtgtgggtgtttgtggtagtgggacaatgcctgtcaccaaatctttcttgaagcctagactgaattttgactcactcagtattgaagcggcatggagactttcttcccacttgctctccaaggaacgtcagtgagttctttgaagatttgatttttattttacatctatgagtgtcctatctgtgcacatgggtgcagtgcccatttgaggccagaagagggcatcagatccctggaattgaagttactgaggttccacgtggttgctggaaactgaacctgggtcctctgcaagaagagctgagccggtgctccagccctcaatgaattcttttcatggagagacaatggatgtaagctatggaaggttcctaagccatctatggtccacagaggaacttcaggcttgcagtcatgagtggacctggattaaattttagaaaatacattcctacgcacagctttggccagcattaacaaatgctatttattgtataatttagctgttgctaaggatatggatacgaatgaagcgactcatcaagatgctttgtcagcgggagatttggtggctgtgtctaattctgcatctttcaatctgtgctcgctgctgccccctagtggactaaatgcaaactaacttaccaaggtcaggaaagcacatgcacacagaggaattcgcccttgtttctgtactgtgtgccctcacagatcctaacgtcccagcccgaacgaggtgaaatttagtacagagaaaaaaatttattactttgtagctactgttactttttttcttttctttctttcttcttcttcttcttcttctttttttttttttttgtataatgcaattgtataaaatacttggtgtgtgtgtgcaccagcattcatgaggtaggggacaaagtactattaggttgtacataagtcaataacagcgagcatatcatatctgagtggcctctctggattccttatcattggaggtggttagtctcctgttgtgatcctaccgtgaacaaggcagcttgcagagggaggggtttacttgggttgacgatttcagagggttagctcacaacggcaggggaggaatgacagatggcaggcaggaagccgggaaatcacatccttagcaaacggcagccgggtgagaccctctagatgtgaggtgctgctaccagtgaaagtcctccgggttcttctcaaaagaaagacttcagaggcagtttatctagcaaagcagaatgtgcatttcaaagagagcctggagcagtatggcccataatgaggagcggcccactgagttctgggttgtggattttgaaactttacattgcagtagtctatgctaattatacctaaggggtctcctgacatttcatacacgtttataacatatttggaccactctcctcccattaacccctttccttttcctgacaagttgtgctatttttaaaagatgtctttatggttatttataaggcaggtggcatatttattggataaagtgactcctttccccctgggttattgtggattgggtctccctttttagggtttgtcttccttccagcttctagaaaagcccaaaagggaagagagactgacagctacaatggggagtgtttgacggggagcccgggggtctttgcgccctcacaccctcactggtgtttggtgtgtggcaactaggaaagtgtgccccctttccctggctgcctttgnnnnnnnnnnnnnnnnnnnnagcctggagcagtatggcccataatgaggagcggcccactgagttctgggttgtggattttgaaactttacattgcagtagtctatgctaattatacctaaggggtctcctgacatttcatacacgtttataacatatttggaccactctcctcccattaacccctttccttttcctgacaagttgtgctatttttaaaagttgtctttatggttatttataaggcaggtggcatatttattggataaagtgactcctttccccctgggttattgtggattgggtctccctttttagggtttgtcttcctcccagcttctagaaaagcccaaaagggaagagagactgacagctacaatgggagtgtttgacggggagccgggggtctttgcgccctcacaccctcactggtgtttgtgtgtggcaactaggaaagtgtgccccctttctctggctgcctttgcttctgacacagcagaaatatcctaactgcagcttcaaggcctcagagaggtgctcagagcaccagagacacagaagacgctgcaacagcgacttcctcagttatctcctgtctgacaccttgcccacacagtctcaccattgaagaaactctcagagacaagatggttcccccagagctgggacgaaacaggtgtggatctgtgcacagtctccctcccagatgagaagacatagagttcccaagctcttcatcctgcagggggagaagataagttcctattgaagaacaaacacctttaatctcagcatctgggaggcagaggcagggggatctctgtgttggaggccagcctgggctatagagtgagttccatgacagccaggattatgtagagagactgtctcaaaacaaaaaccaaccaaccaaccatattcaaactagccccactgctctcagaccggtctctctgactcagtcatgtagtttaccatcagtttattctaggggctcagagtcctgcttggtcctcctgatagagggaggtggggggctttcaggtgatgtccttacccacagacagtgtgtgtgtgtatgtgctgtatgtgtatgtttgtgcatgtgtgtgagtgtcaatgtatgtgtgtgtgtgggtgtatgtggtgtgtgtatgtatctgagtgagtgtgtatatgtgagcatgaatgtgtgtgtatatgtgcatatatgtgtatttgtgagtatgtgtatgtatgtgtgagtgtgaatgtgttatatgtgtgagtgtgtgtgtgtttgtgagcatgtgtgcttgtgtgtgtatgtgtgtgagtgtgtgcatgtgtgtgtgtgtgaacatgtgtgttggtgtgtgcatgtgtgtgtgcctcacgcacatgtgtcatggcacagtagtacagtgttcatgtcggagggcagcttttagaagttgttttcacatctcacctctatgaggcagtatctatctgccatgtcgtgagctccaggctagcttgcccaccagctgctggctgctctgtcttcttccggcctctctataggagtgctgggctcacgtgtgccacatcctgccacatctggctccttcccatgttctggggattgaactcaggtagtcaagcatatgtggcaaacaagctggcttaccggtccaccgctgcttcctgggcttcagctatttaccacctgggtcttaaggagagggcctgagggcaggcagtgcgtgctagaggcaggtgtggtggagactcaagcaaaaggcagctgcagagtctgtcagcatcagcttgttaggcagagagcataaagtgtgcagccagctagagtcagggccctcttcattgtcactgagcggctgccagcctctgtgtcacaggtacagaacactgcagtggtcagcatccgtcctgggggatcctggcttgttggtttgttcttgccgtcttacatagtatagctgaatggaactgacctgtatgtcttcatgacacacggcctctgggacttggagtttctgataatccactgccctcacttcacgacttttccttgtgctagagaaatttatagtcttcctgtatttgtggaaaaggctgtcttctgtcttgtatccatttgccaaagatttatctttattttatgcacatggccgttttgcctgcttgtatgtgtgcacacacgcacgcacagcatagaggccaggagagggcactggatcccctggaagtggatttatgaacagctgtgagcctccatgtaggtgctgtgaactgaacccgggtcccctacaagagcagccagtgctagtaactgaaccacctttccagttccctgttgtccatgatgtgaagtctaagttctctcatctccttttgatgggacttctgctgtctctgcctgccttctgttgtctattatgtgctgcagaggcaggcaccatcacagctggcttccccatgcccacctctgctcatgggcctcaccttttctggagtgcccagcaggcttcacaaagacttgaagggggtgggttatgttctaggaggcaggctcttcactcttcctgtgagcagtttcagcaactgcaactgacagctgtgtttctccctctgaaatcataactcagaaagcaaaccaaaacggaacttaaagttcttttaaattacaatgatttatttatgttgtgttgaccgtgcatgccgtagcatgtctgtggaggtctcaggtcagcttgtagtggttggctctcttctttccaccacgcgaggctcagggaccagactcaggtagtcagcttttcaggtgtggcagcaaacaagcatttatccactgaggcatcatccttttatcccatccttttatcccccacacccaaatttaaatacacattctcagtatattctttaaaatgctttgtgtcactaagctttgtttgggtgaccttctgggatgtggacacaggtctattttagactcttaagaaggatgtctcactgttggttacagaggcatggtttctctctttattacagccatctcttggcgtcaagaagccttccaaagccctactctttgtgatcctgagccccgtgggaccttatttttctagtggatcttttactccggtgtccctgtgggccaatccaaagtacatcagagcctggaaaggtgggactggagactgcaagatgggcgggtaagtcggtccctgtgtccttcctgtatagtgacagttgtgtgctttcaatggcggtgtgcttggtagagttcacaagcgagtagctgtctgtggtttaagatttagctttgtaaacatgttagttgttggaggtgttgcttgtggcccctctaaggcagcagtgtggcatgggtattgcgtcccactcgaccagcaagaaagacgcaacaaactggaatcttccgtggcaaaagctttattgcttacttcttcaggaagaccttgaaccgggaaaatggcgccgcctttataacccgcagtgtgacgtttcagcaccccgatatggcgtgatggctcctgattcgttgcttgcccatcaccccactattacaccccgagaatgggagtgactaggagtgaggtcactcttgcacctgcgtacaaggcttgtttactagttaggcacagcggaggccagcaccatcttataatggcgattgctcgctgcacggctctccacacatgggcatggagcagtgacttgaaccagggtcctttccagctagagactggccctgggggtgatgctttcacttggctccagggaaccctgtctggaaaggtgactatttcactgtctgcttagccacagatggcaggctcacctgctgtgaaggggcagaggaaagccctgctttggctctgcctggccagcctcaccggccatctgtagctggcaggaaacaaaagagggtttgagatgtgctggccagtttcagcgttgacttggctctgaattcagaatgtccctcggtggatacaacagaaggagcaagtatcacggactcgtccctggtctgaatcaactggtgacatacagagatgctcctggaaagtgactttcagtgatgttctgagaggtttaggaaagtcattgcccagggataggcctctgatatgagggctgatggcagcaagatgcgaaaggtatcccacaagccccatgtgctccccaccccctacagagcatttatagatgaccagcttctctagaaaactgtagcttgggcgcctcaggtcagcttcctctgtctttgtgtatgcaacactgttgcgtctcacctgagcggtatttgctacagaattaattctagcctcccagcttagcagtcaccagcacttgctgctcttctagagatcctaagttaagctctctgcccccgtgtcagcaggctggcaacaacctgtaactcctgctccctgggatctgaggctctctcatggcctttataggcacatgcacatgacacacacacacacacacacacacacacacacacacacacacacacggagagtgcatatttgtgttactgttcatgttgccagtgagcaaggcagggactgagtgagcaaggcagggactgagtgagctttaggcctgccttattcacagagcccgtgatctaagaagatagtagaataacaacttaatattatctcacctcacaccttgtctgcatccagcaagcttcacagggaggggtggagttaacacaagccagccttcaaagcaagtgctctgcttgcatgcaagtctgcgaaccatgctctttcctggtacccttggaggccagacgagtacttttaggtagtcaggggttgccatgtgagtgctaggaactgaactggggtcctttgcaagagaatcaagtgctcttaagcacggagatgtctctccagcttctgcacctctcttgttattgtttcttgccatctctgactgcattctctaatatttggaattaaaccctgtgaagtgtgaatggtgtagaccagggagatggcagggaggttaacccagaacaaactctgagcagtgtgcatgcgtgaagctgttaatatgtatgcttggactcctaatgtggagtataaatgtctcctcatgggagagaatattgaagtgcccctcttcagtcctccagcccctccattatttgtatagtccttcacgtcttgtccccttctctgcccatgccaacaaccaggtttcatggcacctgtatcagtttcaaagttggtcactctttcccattgcaagttgctcccaaaccttcctgtggggaaatgtggtctccctcagtccaaggctgtccctgggctatcatggtgacatcgcagttacatgaagacattaatgccacctgcagggtgtcttgacataagtgacttgacacagtcacaggttctgagcctaagggtgtggacatcactgagggagagaatattctgcaatggctttaaggttcccaaaaggtgcttggaagctaaaagtgtgactgcatcgcctgaccatttcctgcgctgacgtcatgtgtgggcgtggtctccagtcatgtgtgggcgtggtctccagtcatgtgtgggcatggtctccagtcatgggaaatagaaaaccaggtcactttggactcgcatttgaagccactaaacagcgagcgagcgagcgagcgagcgagcgagcgagtgagcgagagagagagagagagagagagagagagagagagagagagagaacgagagagaacaaagaaaacaaaatgtagagtatttaactaaataagcccgaggttggcagacttctcagtgaggctttgcctttcccaacgattagaggccaagcatgctgagagtgggtagagatgtattagcctgagtagttagttgatcactaggctcattccttgtagcattctgagagtgagtggagatgtgttagcctgagtagttgaccacttggctcatacctggcctgagttccaggttagttctcaaatcctgtttcccctcctccctctgccagggcagcatttgtcttttaacatccatgtttgtctgtcctacaggtacttaagtcatttgtgtgtcgcgtgttaatgtatgtgccagggcatgcatggtgggtcagaagacacctcatgggactcagttctctcctcccactgcgtgggccctgggatcaagcccaggtcactagtcttggcagtaggctccttcactgactgagctcttttccggcccagggaagaagttttttttttaaagggaagtgttttggaggagatcagtcagtttgttggagcctcaacccagggtatagcctatggttttcccaggcaagacaatgtcaagtattccttagccaaattataagaccactaattttccaaatttataagtggattatagtaatcttgggggttggcagagaaagagaaagactcaggtagacatgcgcctcctgtcccagtgtctggaacaattggtcctcccttccccccgttggtgtgtccacagtgcatgtatggagatcagaggataaatcgtggaagtgggttaactcttgccacctgtgggatctgaagatgtaaggtcagtaggccttcgaaggaagtgagccatcttggccaccttcaagtcttaaacgctaactctctctctctctctctctctctgtctctctctctgtctctgtctctctcttcctctctcttcctctctctctctctctcgtctctctctctctccccctagcaattatggagcctcccttctggcacagtgcgaggccgtggagaatggctgtcagcaggtcctgtggctgtacggcaaggacaaccagataactgaagtaggcacaatgaatcttttcctctactggataaacgaagacggaggtaattgctcttctggtgtcttgacagctgatgctgtcaagagcgcagggggcggggacatcgagggcagtgcggggctggggactatagtggctgctgtggagaccgcatcagggttggtttttattcttgtttctgctgtttggcttgaaaagcttgagactgatttcaaactgagctgctgtacatatggctcagcatgtaaaagccctggctgctcttgcagaggacctgagttctgttctgagcaaccacactgtggctcacaactgtctgtgactctaatttcaggggatccagccctcttctggactccaggggtactgcacccatgcacgcacacacagtgtatagcccaggataaccttgaagtcattataccacaagggctggctttgaaatgttagatcctccattctgtatggcaagaatatatgggattgtatcatacctggcttgagtgttttgttttttgggtttttttttttttgtttttgtgttttgttttgttttgttttgttttgttttaagacagggtaccacttggtagcttacagaaatcctcctttggaatgaggttgtgggatgctataattataaacatgtgccactatatgtggctatctttagcatcctggatgctcagtgcctgctttgataagagttcaggggaagtgttgacagtttatgtagcatcgagtgaaatgccataaagcagggaacagagcagacctgtgtcgactgttagcatttcagtaggtgtgcagaacttaggaacacagttttagacctgcttatggttgtagattatttatttcatggtaattatagacactgagaatgtgcaacgacttcaggggtgtggctggctgtttacatttctaacaccagcattaggaagtggagacaggcagaccctgggagctcactgacccatcggcctcccagacagggtgagctgcaggttcagtgagcgaggctaactcaaaaataacatggagagagctagaggaaggcactcaatgttgtcctctggttctgcatgtatgcacacacacgtgtgtgcacacactcccttgtacatgtgcacacatgcttgaatgaacaaatgctcatacacatgtacatatgctctctctctctctctctctctctctctctctctctctctctcacacacacacacacacacacacacacacacacacgcacgcacacggtaagataatacttccatgtacaagttcccagtcttgccttcggtgaccattaaagaactcattgctttgcggtagccccctccacaccagcttcattttgctgtcgaggtgggaagaagtgattcagccaaggttgcatgcagccctgcgtgctgatctgagtacaggcctgccttatattccatctgagggagagtgaacagcctgccctgaacttgatctgagcacttctgcttgtgttcctctggccctgggcatgcgattctgggagatgcaccaggcaccttcttcaaagtctgctgtacttggaaatgtaagagaaccaaatttatgctggaatttgggggatttcaaactagaacttcacataaacatacatcggaagtgatggtagagagaagatggccggtgctgacttctgtgttcaggagacatcttcctctctagtcactcctgtcctggtccccacctaccagcaccacagatacaaatagggacatcattcagaaaaggcaaagtcattatttatgggaggtgtcaaggacttagccactatctacgtcatagccatacaagttaaccagacactgtcctgctcaaataattgtcccttatccagacacaagtcacgggacatgcttacatggcaggtcgcagtggggataagtgggtttgttttctgcctcttgcaaaatatatgaggccttactaagagttagattttataacttttgcccaagccagttttagtttcaatgtgtttcttcagttggggtgtttagcaggagaaggggggttggagaggatgggtcaggatgaaaacttcagttcctagcacctatacctggcagctcacagctcacagctgcctgtaactgcagctccgggagatccacaggcacttgtgtacttggacatgaagtctctctctctctctctctctctctctctctctctctctctctctctcacacacacacacacacacaattaataaacaaacggttcctgtctctttacccatcttctctgactcattgataatctaacaccatggaacagagaaacctcctgcgattctcctcgttggaggatgaagatggatcccacagaatgcaggacagcaaccaactgcaacatttgcagagtcacaagccatgtctgtggggctctgtttcctcccgggtgttctggaactcgctctggctcctgggagcgtgttgtggttgcagaggaaaatgaatacttctcacccaaatgctatcatgtagccggctctgtctgggaaccaggggacagatgtcccatgtcgtctgctctgtctggggaccaggggacagatgttctatttcttgacctcaggctggcggttacagcaggaggctaaattcattccacagaacagcctttgcgtgtgtgaacactgctgtttgggtttaactcggtgttgtcagagagctacactaactgtaagaaaggtctctctctgtgtgaaaactgcacacacacacacacacacacacacacccatgcatttctctgtctagctaacgagttatcccaaacacgtttattttaagaccataaacacttaacaaatgacaagtacccttgggaacatcgccagtaccaatctcttctttctaaaaagtgattttcagaaaataaatggtccctgctgcagcccagcaaagagaattcattcattcatattttaaaattaaaaaatacttattatggaggctggggaaatggctccacaatccgtgattaggagcagtagctgctcttccaaaggatccaggttcagttcccagcacttacagatctgacccttttctgttcaagggcactacctgcatgtaccacacattcccatataccaatccctaggccagacatcgtgcagaaactggggcatacaaagatggaaaccatcagagagcaggagagattctagctccaccccgtcctgagacagagagaagcactaggggaatagatgcgcttgcatcctgagacagagagctgtagtcccagggctggaacactgctgtgggatccgagcgttctctcacaggtctgggcaaacatacatttgtttctctggtaagataaggattggtctgggttagttctaaagttcctatctatattcaaggccctgggggagccccaaagcaacagggcagcgtgagccctgcaatagcagggcaattcctctagtgcttctagctggtgcttctctaagcatatttgtgacatcctctgcactcagggagtaggtcatggacaggttgtctgctataaggttcagcatctttgtaaggtgatatttaaggcttgttggtccacattgctagatgccagtagtgagaaggaaggggggagttgactaccaaggatgactttttaaagatagaacagcccagactagtctcaaatctgatctaaggacgaccttgaattcccaattctgccttcaattccctagtgctgggattgcatctgtaagtcacccacatccaattcatgtgatgaggggatcaaacccagggcttcacacatactctgaaagcagtctacctactgatgtattccctgagtccaccagagtgacttgaaagggggagggttacccagagcttacagctggagcgctgcgcctggctttcatggtggagcgttcacttgggggtctcccgtgtagtcagagtggcagttcatctcttgagactgtgtttgcattttctcttttcttcttttgaagacatgaagcttcccctgagcccactgccttcagatctctgtgggaaactccggatcgcccccattcatgcagcacctgtgtagctcgacccacagatgatgtgggcttctgaaggcagtgtgcaggcagcaccaggaggaagaactcgtgtgtgtgtgtgtgtgtgtgtgtgtgtgtgtgtgtgttgtactgctgtggagctcagaggattgagaaagggagggtgtctgctcttgtgtgtgctcctgtgggggtgtactgctgtagagcccagaaaactgaggtagggtcttctcttgcttctttccaccttatgtgctgagacacaaggcctttctttcactgagcccagggctactggtttggctaaactagttggccaggcagtgtctccttgtttctgtagcaccagtgtgagccaccccatccagctcttatgtgggtgctgggatctgaactcaggtccctgacaagctcttgcttgcctccagtcatctctctggctcaggctacccaactctgaggtaatgggcttctcgcagaaacaaacgcttggtactcccttgggtcctgagcaagattttatgcgtgttgttataggtaccaattaatttttatctactttgggaataattttgacatgactgctcatcttgaagagtatttcttaattctcagtactgagaatagagttcacttttaacttatttatttatttataatgttttatttgtgtgtgtgtgtgtgtgtgtgtgtgtgttgtctttagcatgtgtttatgctctctatatagatacccttggcagccagtagagggcgctagaatgcttggaattagagttatacacagttgtgagtgcctggttggtgttttctcctgctgtgggattccagaggattgaattcaggtggtcagactcaggagccagtgcccttacccactgtcatctgtttctgcttatctaagaaaatttgttgtattctctctctctctctctctctctctctctctctctctctctgtgtgtctctnnnnnnnnnnnnnnnnnnnnnnnnnnnnnnnnnnnnnnnnnnnnnnnnnnnnnnnnnnnnnnnnnnnnnnnnnnnnnnnnnnnnnnnnnnnnnnnnnnnnnnnnnnnnnnnnnnnnnnnnnnnnnnnnnnnnnnnnnnnnnnnnnnnnnnnnnnnnnnnnnnnnnnnnnnnnnnnnnnnnnnnnnnnnnnnnnnnnnnnnnnnnnnnnnnnnnnnnnnnnnnnnnnnnnnnnnnnnnnnnnnnnnnnnnnnnnnnnnnnnnnntcaggtggttgtgagcctccttatgtgtgtatgagaacagcagctctggtctgagtagcagcagctgttggcatcctctgagctgtctcttctgttctcatatgaaagtggctttaagaattgtcactgctgcggtatgttgttaatgatggaaatcttgcaagcatccctgtttctaattgacagaagaggagctggcaacgcccccactagactggcatcattctcccgggagtgaccaggcagagcatcctggagctggcacaacagtgggtgagtgcctgaacaacatccatgagcccaacagacacacacacacagatgtacacacagatgtacacagacatacacacacacagatgtacatacagacacacagatgtatgtatgtatatatatatatatatatatatatatatatacatatatatacacacacacaaacatacacagacatacagtcatacacacatatatacatacacagacgtgcacacacatacacacacagacacggacatacacagacatacacacacatacacactcatacagacatacacatacacacacattcacacacaatccaaatgagctttgctttgcaatgatagcataccccatagttcccacctgtgttatctaatctttaaatctcacctcgagcgaagatctcctgagaaggtctgcattggcagacctttttttagcagggaaccagttggagaaggtgttttactgaggagggcttcagtactagccccagtccgtgtgcagggtgccttctaagccagcctggccagactggatgtttccacccagtcttaactgtgagctattccacgttgtgttgatgacatatcctatcctgtaatgtattccagtattataggagctacagatttttattgacatattaatatcaacgtaatattaatttggtcctgttttttttcttcccccactaccccattcccattgtctcagatttccacacatgtttattttaaaattaaaaacactcaaagaaaatataaaattgttttctgtggatgttcacatccatgggaccaaggctggagttttagggtgtttgttatttgaagtgacatagcgtttgtaaggcggatgtggagtaaattggctggctggcaggggttcttggctggcactaatgattcatgtgttcctaaagtccccatagaccataaaaaggttttcaggacactgtggtcagacagttctcatacacaaatgtttggacacacacataattttggagtggaccacagtttctctggaaaagactgcaaacagaggctgtaagctaaataatcctaccaagtccagagtggacaaaaccccagtgccgccttttggctggtgcacagtgggcacggtctttgcaagctgctggtttaatttcaacagcttgccctgtcccaaatatgtttgcagttggaaagatagcttcctgacgttcagtaatttctgttttattaagagagtaaatcaaccgagcacagaaggttggccgaccaggccagtaagagccagtttcacacctctggctcttgagcctggaagataggttattctggaggcgtttccttgtctccttaactgcagcttactttaaagctttattgaaaatgccaagaggcactggggtcacggcttgccgcacagggagctaatccacagacgagccctgctctgttgatgtgcaagagggttgtttttctgttgcttctctccagaatgcagacctcaacagttctcagtaaggtttgatgattttctgaaacatgcttgtttaataatttatttaactttgaacaaaatcacaacagctctcactgtagttgctcatacaaagtcaaaacattggctcctaacaaagagcgatgacttcagctctcagagctcgggttatgattttttactaattttgaaggcaatcaggtgaggattgtttggccctgggaaagcccctccccatctggagtccaagcatcctcacctgtaacgtaaagaggacgtcttcagcattagagacctcggcccatggtgggtacaaagtcaacggccattatcataccaacgtctgatgcagtcacttgttctcctctatcatggaagacacagaaaatgtgttaagtgcgtgaagtggttcttagagtcagctgcttgtgaaatccatgacaatgtgcacgccctaaagtcaggactgtgcgtcatgactccatgatgactttgaaagctgtgatttggaagtgggttgctcagaatgttgggcaaacacacagtgtgccctttcccactcaacttgttaaggtaatcgcacagtgggccctttcctgctccctgcaggggaccattatgacaccatccaagttcagccagatccaaagacacacagtgactttttttttctttttctcttttttcttccaccactacctcctcccctttctcctccccgtcctcttctccctcctcttccccctcctccttcgcctcttcctcctcctcctcctcctcctctttctaacattccaaacagggtgaatttaaggtatgtgagagacacctcaccatggatgacctggccaccgcccttgaggggaacagagtgaaggagatgttcggctcagggacagcctgcgttgtctgcccagtctctgatattctgtacaagggccaggtaagagaaagagttttatgtgctcatcattcctagccctttgcccagggctggtgatggcgcagtgatggagacatttatcatccaggctgagaacttaagatttggtccctgggacccacatagtggaaggaaagaaagtgacttgcaaagcttacctctgacctcctctcctgcacttgtctgcaccctccccctacacacacacacacacacacacacacacactaagcgagtaaatgagtaaatggaattttaaagatataaacatttacctgtaattgaatgaagtcataacgtgagggaaattcgagagcatggtcctgggttggctcaaacatttcaccttcctggtggtttcatgagaactcaaccatgagatcaagtcagccctgaccttggaaaatgtgtgagcctaacttggtcagactgtcccctggttctgccagcctgctgcagtaggaattaggagtggagcggccacagaatgcatgcgaggtgaaatttcatcagatgccattgctgttgtcagggttcagtagaacactgcacagacatttcaacactttcccttttttatgtatgtgagtacactgtagctgtcttcagacacaccagaagagggcatcagatctcattacagatggttgtgagccaccatgtggttgctgggatttgaactcaggacctctggaagattagtcggtgcgcttaaccactgagccatctctccagcccctgcacagacatttcaaatgatgccctctgatgtcctattatcttcttgctacatttgtctgatttttttaaagaacagatttatttgcttttatttcatgtgtatgggtattttgtctgcacgtctgtctgtgcaccgtgtgtgtgcagtgtctgtggaggccctaacactgcagttacagacaaccatgtgggtgctgggaatcaaacctgggtccttggaggagcagccagtgcccttaaccaccgagctgtctctccagccccattaattcacttttgcttgtgtcgtgtgtgtattattttgacagttcgagggcttttcctcgtgcacatctgtcagcctctgtctttatagtgtaaggatatatatatatatataggaattgctttctagggtttccataagtgtgtagctgctatgctgtggccatgcaggcagcctgtaactgcgtaggtgttgttcctacaagactaactacttctgatggcttgttagatacaaagtcccctgattcatgaatcgaaccttataatctcagctgactggtctgatcattattactattcattatcattgctattaattattattattatttgttattatgttttgcttaacactttagaatttgcttttcagggctggctggtgatgtagtttgacatgcagatatttctcagtggggaaactacttggttttatgttgatatggcagagagatggggaagagggaggaggaggcatgcataccagggagggacagagagaagcaaagagaggaagaaaggattgtaagggcctagtctgagaattttacgataatgtctaggtatgttatttgtccattttagtaactaaaatccaattgttcctccactctagaaataaaaagtttacaaaggttaacttatctttaatgcttctcctaaatgctccagggaggcattcagagcccaaagggttcctaattatcgtattatactaaaaggcataataagaagagtgtttgagaatatgagctatctactaactatcaaagcatcaaaagccagcccgccagcaaggcatgaacgggcatggctcagatataagccaagggcatgagatctctttcagctaggaatttaaccctgccttcccatgggagttgtggcccatggaggtgcgccctgccccagatgtaggttcagaaactccttatgtaaaagaagagccttgctttaattcatctctttgaaatgtcttgcttttgtttgttgagaaatatctttgaggtctggttccttgccagcgtgttcagtagggggcaattatccatcctgtggattcttagactcctgggttgagttagtctactgtttcagggaccccttctagtctgaattccttttttttttttttaaagatttatttatttactttatgtctatgtgcacacactgtacagattgtgagccttcatctggctgttgggaattgacttttagggcctctgcttgctctagtcaaccccgctcaccctgtcccaaagatttattttttgttatagataagtacactgtagctgtcttcagacagcaccagaagaggtgggtcagatctcattacagatggttgtgagccaccatgtggttgctgggatttgaactcaaagaccttcggaagagcagtcagtgctcttacccactgagccatctcaccagccctattctgaattccttaaaccaccctgaagaatgatttccaaaccttttgtgctttcagttgagttggtaggaaatgaatatgttgtcattaattgacttttttattcaagtaggagaatcaacaatatgaactaaccagtaccccgcagaactgtgtctctagttgcatatgtagcagaggatggcctagtttgccatcaatgggaggagaggcccttggtcttgggaagatcatatgccccagtacaggggaatgccagggccaggaagcgggagtgggtgggtaggggagcagagcggggggggggtataggggacttttgggatagcatttgaaatataaatgaagaaaatatctaataaaaaaatggaaaaagaaaaagctcaggttagggaggtagcatgtgttggcagtatgtcaggtgcctcccttggtctggtgggattgccttcctgttgtaggaatggtcttcctgttcccaccatgcatgcctctccccctcagactccggtcttcctgttcccaccatgcgcgcctctccccctcagactccggtgttcctgttctcaccattcgcgcctctccccctcagactccggtcttcctggtcccaccatgcgcgcctctccccctcagactccggtcttcctggtcccaccatgcgcgcctctccccctcagactccggtcttcctgtccccaccatgcgtgcctctccccctcagactccggtcttcctgtccccaccatgcatgcctctccccctcagactccggtcttcctgtccccaccattcgtgcctctccccctcagactccggtcttcctgttcccatcatgcgcgcctccccccctcagactccggtcttcctgttcccaccatgcgtccctctccccctcagactcctttctccttccttcctcagatgctgcatattccaacgatggagaatggccccaagcttgcaagtcgaatcctgggaaagctgactgatatccaggtagccatcttcaccacctggggttgggggccagctggggagatgagatggctcaggggataagagcgtttgctgctcttgtagcggacctgtgttcatttcatgtctcagcacacccatatcaatcagttcacagctctggctccaggagttctggtacactcttttgtgtgcctctggcattccacatggatggtgcacattcatacatgcaggcaaaatactcagatacgtaaaagaaaaaaatattaaaaaaaaaatccctctagggctcaggctgtggtcagtgagatagcccaagtttagtgctaaagcattatgtcctccacatagtagaaccacaaaggaaagagatgaagtggtgtgattcagggcgagtaatttaaacttaaggaagatattcctgacagaataagcagagttgagtaagaccggagatgaaagagagaaggcggggagggggtggggggtnnnnnnnnnnnnnnnnnnnngtggtggtggtggaagtggagtactcatgagggatgtggtgtcagctagcattccagaataaatgtgtttcaatactttaaaattctgatttaagagtataacatgttattgtaaaaatggaaaatatattaaaaataggagacagggttggaatatagtggtgctgtcttaacctaccatgtggtaatgtcaggtcatgtctcaataaccagagctgggggaggggggaagaaagaaagaggaattaaacttacccatggatctagcacttagatacaattactgttaattctaagttttgaatgtttataactccaatattatataagcatttacctgtttacttatattttccaacaagatagttgtaattaaacacaattttgttacctgctttttctatataataagccacctgcttttctctcccgagtttctcaggctggggacagagctcatttggtggagtccttgcttactgggcacaaagccttggggtcaggccccagcctctcacaccagacagctggtcacatttgtaatctcactacatctggagttcaggagaccagaggccatcctccaccaaatgaacttccaagctagcctgggctatatgaaaccctgtcttaaaaagccaaaactaataactaataaagaaggaaagagaatagttacttattgttttacaccagtgaggcgctttccatagagatcttttataagaaagttggtgaggagaacacctttaatcccagcactttgaagggatgggcaagggatctctgagttcaaagccagcctggtctacatcgggagttggcgttcaacagggctatatagtgagacctgatttttttttttaaaggttaaaattgaaaagacgcacataggggatgagtgcttaaatgcttgtcacccacagaattcaggtacccagaatcctatgtagattgctgcatgacatgacaacccacctggtgattctgaaagaaagccaggagatccccaaagcaatctgcccagttcaaccagccttatccatgcgctctgggcttgattgagtgaccctatctctgtgaataaggaagaagagtgtcaaccttaggactttgcatgcacgtgcacacatatatatatatatatatatatatatctacatgtccacatgtccagacacatatagacacgcctacaacaccacacacacacacacacaatggaaaagaaaaaataaataacagacgcatgtggtagagcggttgagaaaacccaaactttcccctcttgatttatgtgcttcagggacggtgacactaaatccaatgtcaggcctggggaagtagagtatttccggttgcaggcacatgctggtaattcagcacttggtgggtggacatggggatcggaagttcacagtcatcacacattttgcaagtctgaggccagcctaggcgagggagtgggaggagtgagagagggagtgccgcccccccnnnnnnnnnnnnnnnnnnnnnnnnnnnnnnnnnnnnnnnnnnnnnnnnnnnnnnnnnnnnnnnnnnnnnnnnnnnnnnnnnnnnnnnnnnnnnnnnnnnnnnnnnnnnnnnnnnnnnnnnnnnnnnnnnnnnnnnnnnnnnnnnnnnnnnnnnnnnnnnnnnnnnnnnnnnnnnnnnnnnnnnnnnnnnnnnnnnnnnnnnnnnnnnnnnnnnnnnnnnnnnnnnnnnnnnnnnnnncccccccccactcagaatccatactgaacaaagacataggtcataaccacaggcacaggagatcagagatgactcggagtcagtcgcaagcacacacacccgtgtctcccagtgcgttaagcaacagggccttccgtccataatcaaaaccacatcttcttccctcaattattttatgcttgtgtcctcaagtctccaaattatcctctgacaagatggcaaattggtgctgttagccaagtgactagctcgcctgtttccaagaaaaataattttagtaattactgagggggaaaaaagaagtctgatgttacatcatgtttgacatttgatctctttgggtgttacacagaaacatgatgtttccctacaaagtgttccacaaaattaaagacaagagttaaaaaaaaaaacccacaaaagaaaaattaaaacccaagttcttgccagtatgacccagggggaatttttgaaacctcagatgtataaacttttgaatattaggataagtacttgtccggtgtagctaattatccacattggtccctgggtgctagcttacgggaccttcactttacctcctgcaaagggcacagtcccaacacaaggttgttttgtgccccaccccttctttttataatgaggagggagaggcactagctctccatgtcgcctgctctcctgtttccacccaccctacactcccagctcccactctgggggtggggggcggggcaaaagcacctttgtttcatgaggccacgtctctgctgagcctcctacaacgtggttgcattataaggtcatggctgtctgtccttcagtgttcaatccctgtaggaaccttttcattggatttgtttttaagacagggtcccactgtgtagaccaggctggccctgaaccttccagagttcccccagagcatgtgcggcacacctcctgtggaaagcttttaaatacctcctgagctacctagactccaacgttcagtcataccggtccctcctagagctgcttgaatgcttgggttttgggtttgtttgtttgtttgtttgtttgttttgctttgttttaaacttctctttatgtcccttgggattagcacaagtcttgggtagagtatacagacagtaatatttcttcattgaaagaaggaatgagatgccaagataattttttttaaatacagctcatgtgttacttttgtgtatttacatataggaagagacgggaaatgtcttaaacaatatggcattgataggtttcatattattaaacaacatacttgaggtagtcattttataacgagaaaaggtttgtctagctcacagttttagagattagacattggtctggtctctgagactggcaggtaggtggcaggtttctatgcagtgaaaggcaatggctctagtgagctaagggccaaggccacagcttcagttctgctatcatttggtagctccaccctggggacagagccttcaaaccagagctattgaagagacacggcagacatcacatcacagcaagcatcaaattcttccatggtatcctaacaagatgaatattattaataccaccatgcctgcctcggggcagcaggagcctgggcttcaggcatcagggaaaggggtgtgaggaatgggctcttgtttcatggagtaggaaaaggaagctgcaggttcatcctgaggccattatcattttattgattgattgagatagtcttttacagtccaggctagccttaaatgcctgtcgatccttactgccttcacctcccaagtgctgggactacgggtaggtgccaacacactcattttctttttttagaagattcgcttttatttttaattatgtgtctatgggaatagagggggtggtatgtgcacatgaaacagagagggtgttgaatccgctggagcgggaattaaagacttttgaacccaggtgctgatagaagccaggtcctctggaagatcagtccgagctcttagctgcagagcccctgctgcagctgatggagcctgtggggttttgttgagctgctcgcttttagactgaagcacgtgtttttgcttttgtttcagtatggaagggtggagagtgactggacaatcgagctaccctgacggcaaagctcagggtatcggtgacggtgccacagaagagcgactcctgccctcgagctgggaccacctgtgaccatctagtcttgcacattgtagtcgcgttcctcatgtgttaccaaatgaggtttttttccttgagccacagaaagttgccagtgttcaatgccacctatatacatggtagcaattgcttactgtagtctccctcaccctgtaccagatccttagtaggagaatgggttcccaaaccaataagatgtctatgtgctggaagggctactgaggaaatgtcacaggcggcctccctgtgactcatgggcactctcagagcaggacactttgtttcttttgctggtgaggttcttttgttttttgttttggttgttttttttttgtttgtttgtttctaattggggcagatttgggctccccatgcagccctgctggcctggtgttccctaatgttcaccccggctggtctcagactcagagcagccttcccgtctccctcagccttctggatgctggggtgattgacaggtgtcctaccatgatttgtttttgttttttaatcaaaagttcggtcacctggatttcttttctccgttggtccctgggtccacgctaaggtgactgtcccttcttcgtatcacggtctgcactaatctcacccaaggtgtctgaggctggttgtccgcactgccctttttacgtaactataactggctgctcactgcgctgctatgagactaggggtcctgtgccttctagatctttgcatcctcaaagcccagcacatagtaggtattttcagtacatgtttactctaagaatgaacatagaagtgtactttctgtctctccatgctgaaaccctttcggaagccaggcctgatttgggcagcatgtagcagtatttacctcaggctgtctttcctgtccatggactcctccagacagcacagtcagttggaagaattgtcttatgttttaagattatcttggaattgaagcgattgccctggaaagatgaaatactaaccacatggaagtgacagatactatacattatgtgttaaatgccaaataaagggtcaggttgggagataaactctggatttgaatcttaatctacactttgaacccttctcttgaaggagcattgacgaagcgcctggctagtaacagacactaattccagaccatgttctccttggttaggaactgtgagtgaaaagttctctcatggcccagcttatccaggagaaagtcaggtcttgatagaaagcctcggaaggtcgacactcagccatggtacatggtttcctggtttccatagctttcagcttactgatggaacttgggtctcttcagagcctcagggggaagggctttataaaaactccacccattagagacagtccttaagacatttaacatttaaccatacacacacagcacttaagttccattccagttgtttatctgtctggctttttagacagaaacagtaaaaaattggagaaggccatgactggagatggggccttttctttggtgactggtcttgggcgagggtgtctttgagctgagcgtctctatccttccctgttcaggatccttcctgcaggtgctcatgagatagtagcatcgtgaggtgctctttggctttcctctaccctttgacttcatctttacgtctaggatagacagcaggtgtcgtagccgtcaggtagcacagaatgaccaaactgagtctggagagaaggggaggtgtcttgtctctcctgagtccacttaagactttacgcctttaaattaagagtggcccatgtgatggtcgggaacatgggccatggcctcgtaaatcaaaacctgttaagccttcnnnnnnnnnnnnnnnnnnnncatttcccagctgccaggttcccccatctgatggttcattttgactgtggcttgttttatagttagcttcagctgtggtcttgaccccttggaagaggatgccttgattgaagaactgactggaatccaagattggcttttggacatgtctatggggcattagaaaatgctaacagatgtaggtgggcccagtccactgagggcagcatttccctaggccggtagacctggactgcttaagtaatgttgctgtggctggagattgggggttcttatggaagaagtattgcaggactcaaaggggataggaactccacaggaagaccaacagaacccacccttagggctctcagagactgaaataccaaccaaagaacacacatggtctggacctaggtctccccacacatatgtagcttggttcatgtgggtcctgaacaaatggagcaggggctgtctcaaaagctgttgtctgtctcaaatcatgagctaactgaattccttaaactgagtgtctaaactgataaagatacaggtcatggattgagcccccttccaaccgtgtcttaggaacccaggctgagccagtgactgatgacattgtcacctgtgctgaggattttttccctcaggaaagaacacatgtggagtagtctctcctcttggtccatgcccacaagttcagaacactgctaatcagctaaggtagctcagctagcttacaatggcagacagtacctaagagaagcaggagttctaaagcccttagtattgctctgccctcctaaagaggggcggtgctgtcatacaagaatgttcaagattctggaagggaaagagttttgagggctgagttacaaaagcttctgaaattgttagtttttctggcttggataccacgccttaagaatgtatatgtatccaaaattatttaaatgttggatggaaaggttttggtgtctgtgtatgtgtctgtgcccatttgtgtgcctatgtgtgtgtgtgatctgtgcctgtgtgtgtatgtaactggggggtggggnnnnnnnnnnnnnnnnnnnngagactccccgggtcacacgggagtgggtgtaaccgggactaaacaggcctggaagctcacgaggattctcttattttgtatagctccatcttttcacaaacaagccagatttcctcagaacacatgagatacccaggagttcaggagtagagcaaacctgagccttggctaatgtggcttgccgatgcaatgtggttgttagagttacttatggaggactctattaagggtgctaaagaatggataaatgagcgatagctggcagcctatgtttgaaaaaattcaaagaagtgactgagaaactttgttagggagctatggtttttcctgatgtaaaaagaaagctttaaaggggcttgggagaaggctcagtggtaagagcacttgctactctggtagccaccctatagttcgctttcttgaacccacctagtagctcacaactatcttaattccagttccagagtatttgacagagtaaaggtcctcttctgacctttagggggagctacatgcatgtgatgtgatgggaagacacactgcttccaccacttgtatgtaaagtcttcttacaagagaaacaagctctgcggtgatgtgtctgctctgtgaagaggtagagagcctatctcagtcacactgggatacaatcctctttgtatcattttgttacttgttgcttggtaataatgtagctgaagacatcatcttgcggggctgagcgctcctgggctcctggtgacagctttgagcatgatgtagggaagactttgttttaatttggcactttcactttaagggaactagttgaagtatgaagctgtctgtataaccgttttctttgccttcctgactctgtgctctacacagagtcctctgtccttataaaattatgttgttcagtttaaaacttgtgactgagacagaaagtctcttggcagacaacggttgcttgtttccattggatggtactttctaaaccatttagaggattaccattggtcacatcaaagctaaggactatgggaaataatgtgtttcacgtctggacccaaataaggtcaatgaaccctttcttttgagtatttagctgttgtagttgcaaatagtggtgcctgtgagtggtttcatggacatgcggtagcaactgccattttattttgtcacaggaagaatttgttcagctttctaggttccacatatctctgtccccaaagaggcaaagggtttcagatttttcatgttgtatgttactgggcagaggccaccggattagggttggtttggtatacactgattgtgcatgcacacatgcatctcgctcagccaacagtgggatagcatgttcacatagaacataagtagcggataacgattacctcgcgcggagagtgtgggctgataacttgaactaactttagacataaaagtgatgtttaatagatacctaggaggaacagagaaagcacagctctcagccgtccatcacagttctcctcagcctgtataaggaaatccttgctggttctcttcttttctgctgcttgggagattagaacagaggtcttttcacactcaagtctgtggattctcaccaggctcctatcacttgcccagcatgtctgtcatctacacttttatttgtaacaaagtatacaaatacacttgaatttgtatcctgtatctgaaacagttttgaattctcagctgcatctgacacagctgcactctgccaccgggctgcatctctctcttcactttttatttggttaaatcatctcacttttgatgaccaaatttgcatactctgtaacctaggctggccttagattctcgattttcttgcctcagtttcccaaatnnnnnnnnnnnnnnnnnnnnnnnnnnnnnnnnnnnnnnnnnnnnnnnnnnnnnnnnnnnnnnnnnnnnnnnnnnnnnnnnnnnnnnnnnnnnnnnnnnnnnnnnnnnnnnnnnnnnnnnnnnnnnnnnnnnnnnnnnnnnnnnnnnnnnnnnnnnnnnnnnnnnnnnnnnnnnnnnnnnnnnnnnnnnnnnnnnnnnnnnnnnnnnnnnnnnnnnnnnnnnnnnnnnnnnnnnnnnnnnnnnnnnnnnnnnnnnnnnnnnnnnnnnnnnnnnnnnnnnnnnnnnnnnnnnnnnnnnnnnnnnnnnnnnnnnnnnnnnnnnnnnnnnnnnnnnnnnnnnnnnnnnnnnnnnnnnnnnnnnnnnnnnnnnnnnnnnnnnnnnnnnnnnnnnnnnnnnnnnnnnnnnnnnnnnnnnnnnnnnnnnnnnnnnnnnnnnnnnnnnnnnnnnnnnnnnnnnnnnnnnnnnnnnnnnnnnnnnnnnnnnnnnnnnnnnnnnnnnnnnnnnnnnnnnnnnnnnnnnnnnnnnnnnnnnnnnnnnnnnnnnnnnnnnnnnnnnnnnnnnnnnnnnnnnnnnnnnnnnnnnnnnnnnnnnnnnnnnnnnnnnntctcctcttcctcttcctcttcctcttcttcttcctcttcctcctcctcctcctccttgtcctcctcgtcctcctcctgttcttgttaaagttcctttcaaaggcccaggtagaatcaagaacctttcttcatcagtgtgttctgggctgtgtaatttggaaaggttgatatagaagctcattaagaccgtggtagcattcgtgggtaataattccacgaagtgccagtggatcatacttgctctaataagtgacaagaacttgagattttggccacatctttaatcccagcgcttaggaggcagacacaggtgggtctctgaatgtgaggccagcctggactacataatgagatctaggctagccagacagggctgcacagggagatccaggtttttttcagagagagtaaaaaagaaagcaagcatgaagttcgtcatagagacaaagtgtgctttagaactgctgggtgtgagttttgagatttcatgtgcccgaagatgtccttttcatacgatgacgagtctgatgtgggagcttttaaacaccagggatacaatgttcagttcacatcatgcactgagatcccaagagctaatggaaaccggggctgggagtgagttaaagtctagtacactgacagacatctgcatggccatgtggtgaagacccagggcacctgtcactgaatgaacacaagagaaggacaaatggaggtggtgaagagagaagggacagtctatctttgggtgtgaactattcatgttttttgcagaggcctcctttttctgccaggtcctgggaccttcagccttcaaagtcagggccaagtacagttagtgttgccagtgagccagcccagtggcctgtcttgctagagttaaactttgagtttatattcctggtgcatagaggttctttactcctaacgtccagtatggaaaagcaccatggtgtgtaagctctgttgtgtctagtctttagtcatttcattctcagatacagaaagccccgaagccaaataattagcgatatgtagtctgtcttttccttcctccagagaattgtacaccactactcccatttctggatgaagggcaacagatttggaaattatgtggcttacaactaagatgtgtgccgtgccatgtggttgttccctctggctggtttcagaaggctgtgaaaatcttcccaaggggtggggatgagatggagatatatctcttcagaccccagggctctggcacctttcccaggaacaccgatgagacttctttcatttctccagagatttgaatcaggttccaaaaagctagtgggctgaatcactagcacgtgggaggatgaggcaggatgatagttgtgagtcttaggctagcctgagctacacactgagttctagtataacttggactactgacagacaccctctttctaacataatgaatgagctccaaacactaagacagttgaagcaggaggctgcaaattcaaccttcggtttcagtagcgtagcaagatggtctcaagattaaacttgtgggtttgcacacacctgcacacctgcagatcttctctggttgatgtccagtagggaacgctccaacagcatgtctacggctaccgcacagaggaagcctgaacgacacaggtataggatctgtgccctttgacttggtggctgagaacagatatgtaccgcaagtttcaacctcagagattacaggtggggtcagagtcagctgaacgacagagtcttagccatctctcctgcatcagcattgggtaaagccatgccatcacaaggctccacttccttggtcattaagtagacagacagatgctgtgcacaggcctggctttcggggaaggtcttggagggctttagagaagtgcagagtaaggagagtggcgtgggagttcactgggtatgggaaactacctcattctcccaaaggttcgtagaagcacagttaagtatggaaagtggcttccttgcaccacagacgtctcacgtgaagccctgctagtgttaaggacccacagtggtggtgttctgcgggcaatcgacacattcctcactgttggcaggttctgcagattatgtccacctttctgttgccaataaaacaactgaaaacgtaccgtttgcccagtgtcgtgaaactggaaaggttgcgtgcgtgaagctacgagtgccttattgctgcttttattgtgtctggacgcttttggtcagtgactgcagtaaatagcatgtatgtctttaaaccacagcagcaccaagaaggtgaggatttagggcactagagacctgaaaccacacaaccaaatgtttgaacaagaaatgaaatgggagccgggcgtggtggtgcacgcctttaatcccagcacttgggaggcagaggcaggcggatttctgagttcgaggccagcctggtctacaaagtgagttccaagacagccagggctgacagagaaaccctgtctcaaaaaacaaacaaacaaacaaaaaaagaacaacaaaaaagaaatgaaatgggcatttaagaatcccaggctggtaaaatggctcggctcgggagagggggctggaaaggtgctgataaattccatccccaggactgacctggttgaaggagataactgactcccacaagtgttcctttgacctctgtgttttccacagaatgctctcaccggccccaacacacataaacaagttcattaaagccgcccctccctcctccgaatcgttctgctcctgtctctcagggttgcccaggaagatgggttggtgcaatggtcagtttcaaacatcagcttgggtgtcggaggcttttttagagaaagctctgaagggagagcacctgccctgagtctcacgggctgggcgcttggacacagaaagggaagaagcctgctgagtgaagacatcactgctcactgaatgaagaccatttctctgtttactgatgttccaggatacgaacaagcaaccattgtggagttctccccatcttggagctgcctgaagccgtctggctggtcatgaacacttgttcaaacgcacctgttacataggcacttacagagtgattttatgtgtatgggtgtgtttcgtgcatgtgtgtctgtgtaccatgcgtgtgcctgacacccgtggaggacagaaaagggtgttgggactcctaggactagaatttgactggtgtgagctgccatgtgggtggtgggagttgaacccaggtcctttggaagaggaaccagtgcttttaatccccgagccatctccacatatgcatttctgtggcttattcaaactaatgtaactatagaaaaaaaaaaacccagcttttcttttaaagaactgctgtaaatcaaaaaaatatagaacctagaagtgtctgtgtgttcagtgacctctctacacttcgtcaatctgtaaagatcttggctcctgctaagatctctgtcagagttacatgtatgtgttgggggacacagcttagtggtagaacacttgactagaacgcccaaggctctgggttcagttccccagcactggcagaagagtagaggagggagaagcagctgggaaggtcattgtccttctgaggatgtcgatgctgcacccccacaggaatgacaaagggagacctgacattcctgagggtggtgacacatttgcagacactgatgtgacagatgagaagagacagatgtctcctccagggcttcaagtgtctctttgtgtaaattagtaggaggtacagagaacaagaagggggcctccagtttttctaatgatttttgtacaaggctgatccaacatgattttaagcatattctaatcaagggtcgggttccatataagagatgtgacctctgcctcttgtcacaaccacttcttgtacagcctgactccatttagagcattgacaagaggcaaatttgcatcctgggttggggtagatgttcatccataaagtagccactgcttggctttttagctctgactagaaaacccatggctatttgctcccaaaatcacagttcctggaggttttgaaaatgcaataattaaaaaaaaactttccatgttttcatttttttaaatgctcattcttattttacctgtttgggtgttttgcctgcatgtatgtatgtctgcaccatgtgtaaggggcccacaggctggaagagtgtattggattccccccaacctgagttactactgatggtgagcagctgtttacgtgtttggaattgcaccaaggtcctctgcaagggcagcaggtgctaaccactgagccacctctccagtcccttcccgctccattcttagatctgtgctgactattccatacatggattttccaagctaaactgtttttaaaaagactaaattgagcttgtttaagggtagtactataaggtagtgaatatttctcattagtgattccttcactgtgggaaacaggtgattcatgctttaatctctggcatcttgtgagatagaaggaaacagcctaacatgcagatggctaataataaagagaa

SEQ ID NO: 8 - DNA, 1162 bp, Mus musculus
tttaaggactgcagtaatggatgctccgcgccgtttgctggagaaagaggatcagaagaagtggcggagacttttagggccaaagatctcatcatcacaccagccactgtcttaaaagagaagccggacccggattcgctggtctttggagctacgtttactgaccacatgctgacggtggagtggtcctctgcgtctggatgggagaaacctcacattaagccttttggaaacttgcccatacatcccgctgcctctgttttgcactacgctgtggaactgtttgaaggcttgaaagcctttcggggagttgataacaagatccgattgttccggccggacctcaacatggatagaatgtgccgatctgctgtgaggaccacgctgccgatgtttgacaaggaggagctcctaaagtgtattcttcagcttctacagatcgaccaagaatgggttccctactccacctctgccagcctctacatccgccccacatttatcggaactgagccatctcttggcgtcaagaagccttccaaagccctactctttgtgatcctgagccccgtgggaccttatttttctagtggatcttttactccggtgtccctgtgggccaatccaaagtacatcagagcctggaaaggtgggactggagactgcaagatgggcggcaattatggagcctcccttctggcacagtgcgaggccgtggagaatggctgtcagcaggtcctgtggctgtacggcaaggacaaccagataactgaagtaggcacaatgaatcttttcctctactggataaacgaagacggagaagaggagctggcaacgcccccactagactggcatcattctcccgggagtgaccaggcagagcatcctggagctggcacaacagtggggtgaatttaaggtatgtgagagacacctcaccatggatgacctggccaccgcccttgaggggaacagagtgaaggagatgttcggctcagggacagcctgcgttgtctgcccagtctctgatattctgtacaagggccagatgctgcatattccaacgatggagaatggccccaagcttgcaagtcgaatcctgggaaagctgactgatatccagtatggaagggtggagagtgactggacaatcgagctaccctga

SEQ ID NO: 9 - protein, 302 aa, Mus musculus
FKDCSNGCSAPFAGERGSEEVAETFRAKDLIITPATVLKEKPDPDSLVFGATFTDHMLTVEWSSASGWEKPHIKPFGNLPIHPAASVLHYAVELFEGLKAFRGVDNKIRLFRPDLNMDRMCRSAVRTTLPMFDKEELLKCILQLLQIDQEWVPYSTSASLYIRPTFIGTEPSLGVKKPSKALLFVILSPVGPYFSSGSFTPVSLWANPKYIRAWKGGTGDCKMGGNYGASLLAQCEAVENGCQQVLWLYGKDNQITEVGTMNLFLYWINEDGEEELATPPLDWHHSPGSDQAEHPGAGTTVG

SEQ ID NO: 10 - DNA, 152759 bp, Homo sapiens
  misc_feature (1)...(152759): n = A,T,C or G
aacatggtgaaaccctgtctctgctaaaaatacaaaaattagccaggcatggtagcgggcacctatattcccagctactcgggaggctgaggcaggagaattgcttgaacccaggaggtggaagttgcagtgagctgagatcgcgccactgcactccagccttggcaacagagcaagacttcgtctttaaaaaaaaaaaaaagaagctaatggctgaaggagagatgacagaagtttgaaataagatattctaatgagtgtgaagagcgaaagacaaatttaagaaattataaaggggaatctttgtaataataaagggacattataaatgatcagatttgaagagagttcaggaaaggtaggatctaatgttgactgactgttgtttgggatactggtttaatagtgttgttattaagaaagctagaaggccgggcctggtggctcatgcctataatcccagcactttggaaggctgaggccagcagatcaccttaggtcaggagtttgagaccagcctggtgaaacctcatctctacaaaaaaatacaaaaatcagccgggcatggtggcgtgcacctgtaatcctagctattagggaggctgaggcaggagaattgcttgaacccaggaggcggacattgcagtgagctgagattgcgccactgcactccagcttgggcaacagagcaaggctctatctcaaaaaaaaaaaaaaaaaacaaaacaaagaaaattcaaagagtctaccaagcatgcaacacatagtagcaagacacacacacacatacaaacacacatgcacacacacagagaaggatttaagagtaaatataagttaattatatatacgataaaagtctactgagttatacatgcctttgggtcagacatgtggaaatgtacattagtcagaattatgagtagagtgctcttgaagcaggtgacactggagtatgtgtgttattgaagccaagaaatgcttctggtgatagtaataaaatattccaccagaagtggcaaagcagtaaagattaattatgtcatataacaaaacttttgaaggtaggcaactccaggtttggcaaagtggctcagtgatgtccccaacagtccagtctctttcttttttctttgccatcctcaatatttggtttttggtcttgggcttgccactcatggttgcaggatggttggtggcagcattctgaaacatttatctgtatacaacatttaaaacaagaagagaatggggtgagaaacaaagaatagaattgtgattgccagggctggggaaaggggaaaatgttgctaatcaatggcaacagatataaaatttctattatgcaagatgagtaagttctagagatctgctgtataacattgtacgtataaataacagtactgaattgtgcacttaaaaatctgttaagaggggccaggcacggtggttcacacctataatcccagcatttagcgagcctgaggtgggagggtcactttagcccaggagttcaagacaagcctgggcaacaaagtaagaccctgtctccacaaaaaatacaaaagttagctgagtgtgggggtgcacgcctttagtcctagctacttgggaagctggggctgaaggatcacttgatcccaggagttcaaggctgcagtgagccatgccacgacactgcactccaccctgggtgacagagcaagaccttgtctaaagaaaaaacaaaacaaaacaaaacaaaaacctcgggcgcggtggctcacgcctgtaatcccagtaatcccagcactttgggaagctgaggctggtggatcacctgaggttgggagttcaagaccagcctggccaacatggagaaaccctgtctctactaaaaaatacaaaattaggtggggatggtggcgcatgcctgtaattccagctacttgggaggctgaggcaggagaatcgcttgaatccgggaggcggaggttgcggtgagccaagatcacgccattgcagcctgggcaaaaagagcaaaactctgtctcaaaagaaaaaaaaacatctgttaagaggatagagctgttaagcatacttactaaaataaaattaagaagaaggcagaaagcagaaaaagagagggaggaggaagtggaggtggagaagagggagtagggggaggaaaggaagaaggaaaagaaggaggcaccagtaagctctccttgcctgatttatgttttcctaatcaaaagggaaatccttaaaagctcctcgggtgactttctcttaagtctcattgatccgaacttgattatttgatcttctctagctcaagagagtatgggaaagtaaatatattgcaaagtacaatgagattgtcatcactgccttagattaactattaatcccccaggactaggcatattctgtatcctcaccatagaaaaaagaaccagggctctattagaagaaaaaagaagaacaatggatttttgttattttcatttttattgtttgagacagggtctctctgtgtctcctgggctggagtgcagtggtacaatcacgtctcactcaacctcccaggctcaagtgcttctcacacttcagtcccccgaatagctaggactacaggcatgcatcaccacgcctggctaatttttgtattttttgtagagatggggtttcgccatgttggccaggctggtctcaaactcctgggctcaagccatccacctgctttggccccacaaagtgctgggattataggtgtgagccaccacgcctgggtaaaaaatggcccgttgctagataagtaagagtattagccaaggagtagatggatttccttatggagaggatttaaaatgaattagaaaaaaaaaatagccgggcgcggtggctcatgcctgtaatcccagcactttgggaggctgacgtgggtggatcacctgaggtcaggaagtcgagactagtctggccaacatggtgaaaccccatctctactaaaaatacaaaattagctgggcatggtggcaggcgcctgtaatcccagctccccggggcgggggcggagggggcggggcgtggcgaggcaggagaatggcttgaaactgggaggcggagtttgcagtgagcggagatcgcgccgtcgcactccagcctgggggacaagagcgagactacgcctcaaaaaaaaaaaaaaaaagaaaaaaaattaaggacatgggatgaaaccctaagggagaacactatttgaagagatgttaagaggtaaaagagattgtgaaggattgagaaggcagactcttgagaggtagttagtaggctaacaccatggtcattacaaagaaaatggttctgtgttttcacagaatttatccaagagaagagtagctaagacttatacaccagtaattatagaaacagtattgtattagtctgttctcatgctgctaagaaagacatgcccaagactgggtaattttataaaggaatgagatttaatggactcacagtttcacatggctggggaggcctcacaataatggcggaagacgaggagcaagtcatatcttaacatggatggcagcaggcaaagagagagtgagaaccaagcgaaggggatttttccttataaaaccatcagatctcatgagacttactcactgccacaagaacagtatgggggaaaccacccccatgattcaattatctcccactgggtttctcccacaacatgtggcaattatgggagctacaactcaagatgagatttgggtagggatgcagccaaaccatatcaagtacaaaagttggtgtgggtctgtaagcagggtttctcaactttggcactattgacatttaggaccagataacttttttttttttttcgacacagagtctcattctgtcacccaggctggagtgcaatggcatgatcttggctcactgcaacctccacctcctgggttcaagcaattcttctgcctcagcctcccaagtaggtgggattacagatgcctgccaccacgcccagctaatttttgtatttttagtagggacggggtttcaccatgttggtcaggctcgtctcgaactcctgacctcaggtgatcctcccgcctcggcctcccaaaatgttggaattacaggtgtgagccaccacgcctggctcagataactctttattgtgggagctcgtcctgtgcattgtaggatgcctggcagcatccctggcctctacccattaggcgccagtagcaaatctcccccacttccctaggtattataataaaaatgtcttcagacattgccaaatctccccagggggacaaaatcactcctaattgggaatcactggtttataacaaggagtgcttcaggaaaggctgcaaatggggcaatagtaattaaaacggatctccaagactggatatcatttagccaagcaaagtcggaggaaaagaaattccaaggagcatttgtgcagaaacaatgatggaagatttcaggtgtgcttaggcacacaacatgtactcatgtcaggctctcaccagagcatctgagtgcaagttgcatgattttgaacaggagaaaaaaatctaatcagaacggaggactagggagattactagccatctgtgtgttgggtggattggggcagggagagattaaaggcagggataacagtaatccagagggaaagtacaatgaatgaccaaactagggcagtgagagtgggaactgagggggatgactaagagattttgtggagatacaattgggacggcttagtgattacgggatgggggaggctcatatctttctctcttgctttaagtactatctataaagataggagctatatgaaagtttggaggctggataattggaagcacattaatgacatcagcagagagagggaagcaggttaaaaagggaagattatgtgcttggatttggattaattgggcttgttagaatagagatgaaccagagatctagtatagttttaaaagttatcagactacaggtcatagtagagacactagaggacagagtataaagaggagattcaagatcagatacaggtgggatgaacaccttgcctatatttagagggcatgaggtgatcataaataaggtgtaaggacctgccagagaggctggaggagattcagaatcctatcgtggaagggaggagtttcaaggagaaggaggatagctttgtgcgtcagggtggaaagtaccctgagaggttctagagaactagcagaaagaagactttacaatatcctttcaaaatagataggaattaatttatttttatttttatttttttgagatggagtcttgctctgtcgcccaggctggagtgcagtggtgcgatctcggctcactgcaagctccacctcccgggttcaagccattctcctgcctcagcctcccggtagctgggactacaggtgcctgccaccaagcctggctaattttttgtatttttagtacagactgggtttcaccgtgttagccaggatggtctcgatctcctgacctcgtgatccgcccacctcggcctcccaaagtgctgggattacaggcataagccaccgcgcccaacccagtaaatctaattttacatggggattaggtactagagtgtgtacaacaaggataaaaataaatccagtgagtcaaaattgtcatgggaaatttcccaaaaagtacagtataaatgattttcgagtattgaacttggtgtgtgtgtgtctgtgtgtgtatgcatgtgtgtgtgcacatgtatgtaatgggcaatgaatgcaagtattataggaaatataaaaacagtacaattttgaagtattttttactatgagaaatagagaaagagaatgacattgttttctgagtgtgtagagtagaattttagagtagattttcctcttttaagacagagtatcattgccttatgtaaactctcctattcaaattccaggaactgttaataactcaaggcagagaatatttgtgagtttctgctttcctagagaaaatttagtaagatacagggaagacattctgcaggtagttggcacatatttttcataatgatggcaataaaagcctttgttaataacagtgaggacaaaatgaagctggactgtctggcgctctggagtcaacctcaaaattagtgtctattagaaatcttagaaatgctgtctcttcttcagtaaaagacactgcccatagatgggtatatggtatatatccagtttggatccagttttccttaaatatcttttactgtgacttgtttgaagtacagtgccactgtcagagtaacaaccttcgttgatcatgagcctcatcatttgggaaaagcatgtgtgttgtctgggagagaagctttgggagtttacagttgacaatgagggagaactgtggggcccttctatcaacactaaagggaaatgggaggagagacatagctagattgttcttatattctttttttttctttttttttttttttttttggagatgatgtctcactctgtcacccaggctggagtgcagtgaagtatgaagtgatcacagctcactgcagcctggatctcctgggctccagtgatccttccacctcagccttgggagtagcttagactgcaggcacataccaccacaaacagctaatttttgcattttttgtaaagactggcttttgctatgttgcccaggctggtcttgaactcctgctttgacgtcccaaagtgctgggattataggcgtgaacgcccggccctcatattcttctgtggatgttaattccctaactttctcacttcccttcaagctctttttttttttttttttttaaatatatactaccttctctcttcctttgttgctaacatcaaaagaatccttaagtaggggtaacagcaacagggttggaggtgaaactgtaccttcaagccaaaaacagcctgaaggctgaaagaccagactgctggtcctggatgaaatccatgacgcaaagtgagaatttctgttcctgtttgcctgcccctcccctattctgagccgataaaaagccccaggactcagcctcatggaggagactttcctgccttcgggtagggggaccacccccgcttccctctctgctgaaagctgtttcatccctcagtaaaactccccgccttgctcactcttcaattgtcagcacatcttcatttttcttgggcatggggcaagaactcaggaaccaatgtgcaaggcaaacttgactcaggcgggcaaattgcgtggggtgcctcctgcagcaggtagtatgccccgagctaggcctccggcattgccggctagaggtccttgactggcaaagggactgagaaaaatcctgcattgagggagaggggggcgaggggcggtcgttggatctaggagtaattgccaggcttgctctagaacttattaatgcatttatatctatgaccccatcactctctatccccttattactctttctcataaaatttaccacatggtacctgtttttttttttttttttttttttttgagactgagtcttgctctattgcccaggctggaatgcagtggcatgatcttggctcacagcaacctctctgcctcccaggttcaagcgattcttgtgactcagccttgtgagtagctgggattacaggcaccccgcaaccacgcccggctaatttttagtagagacggggtttcaccatgttggccaggctggtctcgaactcccgacctcaagtgatctgtctgcctcagcctcccaaagtgctgagattacaggtgtgagccaccatgccgggccatagagtaacatctttattgagatataattcacataacatacaattcacctatttaaagggtataattcagtggtttttagtgtgttcacagggttgtgtaaccattaccacaatctaatttgagaacattttaatcaattcaaaaagaaatccaacgcccatgaacattcactctccattccaccctgtccccagattgaaaacaactatgtgttttctgtctctatggattttcctgttctgcacatttcagataagtggaatcatataatatgtagtcatttgtgagacgcttctttcactttgcatagttttcaaggttcatccatgtgactgcatgtaatcagtacttcatttctttttattgcagaatataataatattccattgtatggatgataccatgttttatttagccattcctcagttgataaacattttgctacctgatttaaagcttactttctgtttctcacactagtatatgagcttaatgagggtaagaacatttttgttgtttcccactcagtccctagcattttgcacattgcctgtctcatgtcagtgtcaggttcaaatctatctagctgtgctttcactgacgggggccaggaggtttcacaaggactcaatggctgattaaatgcttacagatacagatttctcagggcagaacttctgcaagcattttggctgtggtcagttactttcaggttttcattactttttggttttcacagcatccgcaagtgcccatagccattatctcagctgcctctctctttactctcttgccaatggtgccaggccacagcaggtgttatcttatcacctcagtccaccatacatatgcttatcaatttgaggggtcagcaatttcactggaggctgaaacccttgtcataaatggctccattttgagacatttcagattacaaaccactgttatataccagcctagcatgtagaaatcactcagtacatttattgaacacataatttaaccattcattcacctgaccaacagtcattaagcactgacacatttgttttcaacactccctctcttccacggcaggccacttggtatgggagataaatatgacaaaggatctgcccttacgaatctcataatccactgaagtgacaactgtgcaaacaaataattaaagtaaaattaagaagctgggcacagtctcacatctgtaatcccagcaatttgggaggcggaggcgaggggattgctgaggccaggagttcaagaccagcttggccaatttagtgagaccccatctccattaaaaaatgataaaataaaataattgattttgagaaaggatgtggacaaagtgcagcacatagaccaagggcccagttctgtttgagggcattggaggcaacttccacagcaaagacttgggttgaaatttacaaaaataggagtttgccagcttgacagagaggcagcggaggtcaaccagcagcacacttaagcagtcatggaggctgacctaggcgctggacatggaaaagtagcaatcctggagctttgtatagatgtggggagggaacttacaggggaccaactaggctactgggcaatttcacattataaagaattttatatgctcaaattaaaggattaaaaattttcccccatgtacataataaattggcaaaaatggttatatttgagggtgactaaggaactctgggaaagagatcggcaaaccaggcacatgttcttgactactgcaaaagtacatttaaagtagccgcgggggatacatgtatacttttgggcaggattgtgccgtggtcctctcagcatgcagcaaagttactttggggacagtagggaggtgggcaggagccagtgatgacggaatggcaatcacatttgacctctgatctgtttatttcctcctccttgacgtctccatataaatgttacacgggcatccccacactcggatacgcacccacagtggctgattcgggggtaaccgtgtcatttgcttgcaacactggcacctctgccctgcaccccgggagtgagcagtgagtgaggctcgggtctgggcgctggctccgaatcttcgggctgggagagactccaccatctgggggcggcctgggggagcagccttagtgtcttcctgctgatgcaatccgctaggtcgcgagtctccgccgcgagagggccggtctgcaatccagcccgccacgtgtactcgccgccgcctcgggcactgccccaggtcttgctgcagccgggaccgcgctctgcagccgcagacccggtccacacggccaggggctacgacccttgggatctgccctccgctcagctcgagcttccctcgtggccgacggaacaatgaaggtaactacttatggttttgtccgtgttttacaaaaatgtgtgcgtgaatcgaaccggcgatttctccaagaaacatagttggcagggaggggaggaaggcgagacaaccatggcttatatcccccgcaaacgtctcagtatcttctttatcaatcgtagtttgcggggaccgtgcattctgttcagatttcggtttaacctccactcgcaggacgtgccttctcggactttttcacattcgcttttgggaacggaggtgaaagtctgctacagctccctcccctgcttgtgaagtttggaaaggaagtgagggcttctctcagtttctcctatgcacaggaggtggggaattttggagaggaggtctggggatgtcccgggctgtaaatgcgctttcctgcagcgtgtgttcgtgatgcaggagggagcggctggaagagttgacccgggtggagaggggagggagaacgatcttttcactgttaaaagcagaaggcccctcttattttgtttcttgtggaaattaaagcttctaggagttacaaatgatagacgcctaagggcattcatttgttaaaccagtgagcaccctaatggctctgatcttgctaatcaaggataattagcctagctgcctattatttctgactatttaggtgtagggatgtacaccgttgagtgttttgttttcctagtttcacacactggaaaactgcaatcgcatataaaacccgaagagcaactttttccaaggaaagtgaaggatgggcagatattcttgccatctaacattttggaattgagatgaccataatgcaatctgaacttctggtaggaataaagcctcgtttcagagtttctaaggagggagatgaagcgtggttctcaactgctcttatctacaacccatcccagaccatagtttcacttagaagaaataatatgtaaatagcgcctttgttgccaaacaaaaactttcactacaattaaacagtaaccgagtggaaactatgcgtttttgtattcaacagagatcacacaacttttcttctatagttagaggttctatttctggcttcctcatgcttgtttcatttcagatgaaaaacacactttagttgattatagctttagtaagtaaaaggagaaaactaagaatgaacagtcttgcttttccagctttttcctgtccatgtgcagttgtggttaattacgcgtttttgtaggtccaaaaacccctgtcccttccacaagatacttttataacatggggaactaggtaagatatctacaagtagtctcttttctgtttcctgatatttcctaagattaagaaagaaatgattgtattctaggtatgatcgaagaagtatggaaggttccattaagttagttttatcacaatatttcaaacatctttccacttatctcttaaatatgtattgctatcacaagcttgattttttaaaaaaatgttatttgcacatggcatcttgattgcctttgtcctcagcaaattctccgggcttaagtcatgcatgagcttgtattttaagacagacacatgcagaatgggcaacttggataagaaacataggatatacactgagtagcatgtgtacaaaaatggtaagtgagtattatgacttaataaatttagatggggatttaaaaatgatacacatgtaaatgggattggaggcaagggaagtccgtgtgtgtgtgtgtgtgtgtgtgtgtgtgtgtgtgtgtgtgtgtggagggaagacgggaggcctagtggggagagaggttttacattccagacacaggatgtggcccctcaggctaggctcagagatgtaaagctagttaagctggcctaacaaaagggtggtggttagaaaaaggaaaaaaagaggtgggggttggggaggaaaagaatttaatgctggccaatattttcatctgataagtttcagtaatgagtaatttcactggatttcagaactacagagagaaaaggggaaaaatatttttccttttttacgcaagaatttctcttgcttttcagctcattagaaccagatctaattatttgaaatgagtttaaaaccttattatgaaaggaagttgaaaacattcgatcacaattgagttttgtactatggactaaaaccaagatgtgctttctgtcagtagctgtgcaactccctgaaaaaagaaaaatagcgcagagcgatctgagctttgtgaaggctacacaatttatcaggcccagagagataggagtgtgagacttcagtcacgtccccccgtacgcatgcgcaggagtaattatttaaagacattttgttcctgactaactgcctcactcattatgttcctggaatttgtgatacaaaaaaacaatgtttagcctatcaatagtttatatagtttatgttattttaatataaattcttctcaacttagaaactgcctcttttttcttttaaaaacccacttgtaactgctgtatatattcagggcaacttgatttggtgtttcgttggttgcagtcctcaaatttgacctcaatatactctctacttatataaattttgtctcagttttgtccgtaggctgacattccaattgttttcctaattatatattttgttccttatttctcatgtctagaaataaagctagggaagtaaacagctggaaaactgatagtggtgttattaacctaactgagagggctgggcttatgagtaaattattcctgtgcataaatgaaagattgtttctaaatggcggctatgttgagcctttgtattagttacatcttttggggtttcaggttgccagcttctttaaatggcctcttctcaactggtataggaagttggaaaataaagaactttctttatttccctttagtgttggtaaccacagtttctttaaataacagatgcccaccccagggaaacccagtggcatgatcagccttatgctcaggaaggtttggttgctatactggagagtgagaatctgggaccttccatgatagacataattgtgccagctatcctctactttctatatgatgctatcattcttttttcttttcttttttttgacagaatctcactgtgttgttcaggctggagtgccgcagagtgatctctactcactgcaacctctgcctcctaggttcaagcaattcttgtgcctcagcctcctgagaagctgggattaccaccatgcccagctaattttcgtatttttttgtaaagacggagttttgccatgttggccaggctggtctggaactcctggcctcaagcgatctgcccatctcggcctcccaaagtgctgggattacaggcatgtgctatcattctttttgagcacaggaggaaactatggctgatctgctcattttactgtcaaaaatataggcagcttttgtattgtaacattatccccttaacagctgtccaactggtctatacatttcacctaacatatggtaaatgttcctactgttggcctttcctgagcctctgtccattcaactaaggccactgcaatgggattgtatgcagttcagccaagaaataaatgtgaggtgcaactcacattttttaaatgtttcaaaattaagcatttaggtgcttttattcataaacatgactttgcaaatattggtaaacagtttcatcataagaccttgtcagtgactcacaatgtcaatggtgaacgcaaaggagaatctgtcttttctggaacaccaggttcaggtatcagtttcaactatgcttataatttgtgctctaaagtccacaaagctaaattatctttcccctaaaaattgagtactcatatccttaaaatagcttggaaattagattaccttatgaatacagcatagcatgtcacataaacgtttttctactgttatacctttttggtgggaaagactattttgcaaaacatttttcttgtgttcagtaattaatgggaaaaacaaactctaaaagaaagagacagttatgtcccaaaaatacaggaaaatggaagaatggaaacagggaagaccaataaagaaaaaaatagaggaaattacaagtaataaactgaagtcatactgaaaaacatatggctctttcttattgaaagttgtgaaatacttgcaaaactcagctagttccattaagaatagtctttaatctaaaaagaacaaattcatttgtcagttctttatttcggtgtgtagatttgaatgtttcatcaattgcatttacggtttatccctcagtgtgagaactgtttttgctgttttgactataaatggatatctgctttaggaagacttaggaagcctgggacataggattacagatcaaattctatttgactccatagaagttgagacggaaggagcacctgttgggatattctagaccaaacattccacagctgtctcttaacgtgactgacaaagagacacagttgagacgaagtttgggtatatcctgggatgaggccaagggtggatttgcacaggatggtcacagggcagttgttagcattccaccactacataaaagggtgattttgccaagtgcatttcatttcatttcagttgatttagataccaagttatattgttttgactttaggactagatgtgagttcaggaatttgaaatcataataaatgtttccttgaactttgaagataaaaggtagagttaaaagacagctgcgaagtctacatggggaagcataatacatgactcagggttccatggttttcagtgtcggtgagtgctctgtacacttataagaatagtgctggtgtttatagaagaaacacatgcaggtttgaggcaagacttccttgcttaattggtgcttttgctttccattttctaaatgccatgcaaactacttttttttttttcttttgttgagacggagtcttgctctgtcacccaggctggagtacagtggtgcgatctcggctcactgcaagctccgcctcctgggttcacgccattctcctgcctcagcttcctgagtagctgggactacaggcgcccgccaccacgcccggctaattttttgtattttttgtagagacggggtttcaccatgttagccaggaaggtcttgatttcctgacctcgtgatttgcccgcctcggccacccaaggtgctgggattacaggggtgagccaccgctcccggcctcaaactactttaactgaaaacattcttctaaggaaagcatcagaaaacttactagaattgcttaagaataaataaataatacaaataaaagagcaaaatgagaaagtagacagactcctagtctattgtgctattgatctctccaggttctaggctttcttgggtctgacaccactttgtaaatttttttttttttttttttttttttccagatagggtctcattctgtcacctaggctggagtgcagtggtacaatcatggctcacttcagcttcaacctcctgggctcaagtgatcttcctgcctcagctccctgagtagctgggaccacaggcatgtgccaccacgcccggtgaatttttgtattttttgtagagatggggtttctccatgttgcactggctggtcttgaactcctgggctccagtgatccacccaccttggcctccaaagtgctgggattacaggcatccgtcactgcactgggccagtttgtaaatcttatgaaaagtatggccaatcttttgcaaaatgtgcaaacacatatagacacaaagttttatatctaaattattggttattaaagccaggacaatagagtgcatatagcatggaagacaggtagaaaagactgaaatggtttagttattcagagcagtggagggctattggctcttgcctttgcagtcagctgagatatgaaactatataagcagaagcttcacgctgccatttgaatattgaaaatctccacttttagttcaagagataaacaaccaatggtttgtttgttcacagcacataagttatcactttcttctctgtttcatcccatcaagatctaaggtgtatagttacagaatagaactcggttcataccatatgcaccctaatttcttcgatcttcaactagtttggaagtgtgtgtgggtgttttcttagccaaggttaatatgcaatttcttagtggagtgtaggagtttggggtgcctagccttcctacttcccacttagataacttcccctacctgttgtacctgtcaaaggagaaggccagtatggccatgttctttgcaggtgactccaccttagccacagctgattgtaacaagggtgtatatttggcccaagtccagccatcttttttttttttttttgaggcggagtcttgttctgtcacccacgctggagtgcagtggtgtgattttggctcactgcaacctctgcctcccgggttcaagcaattctcctgcctcagcctcctgagtagctgggattacagacacccacgaccacgcttggctttgtatttttgtatttttagtagagacggggtttctccatgttggccaggctggtctagaactcttgacctcaagtgatccgcccgccttggcctcccaaactactgggattacatgcccagccagccatcttttacttctttcttattctcttattccacatattcaagcaggtaccacgtcctgtggactctgtcttctctgaatctataggttctctctttcccattgccctgcatactggtttatgctctcattacttctcgcttgaattattccaaaagtctcccaactggtctgaagcttaattttcattatgtgctgttcgatgtcattccaccacgcaaaatctatggcttccccattgtctcctgagtttagtttagtgcatgagaccgtttaaaatctacctacacctcttctatgtgcatgcatttctctagtcataagagaggatttgatctatctcaaaatgtgttcttatatttgcatttactggtttttaactccctccatcctatctataatttgcaccatgttgctcaccatgcagcccactccccagacaccttgtgagaacagtgatcatgtttttgcagtggaatgaacatgggcgaaaggtgggaaggtatgcatagatttacattttgaagtcaggaaataagatactgatcaatgctttaattcgactgtgctttttaccttttcctctgttgtagcatgaaccttgccccaaaaagatattgatcatatgctgcaactcctctgcacttaccttttcttctaccatggcaggaaccttgcaccattgttggtgctttacagatattggttgagttaaatcgagagcctatttctggactttcaagattcagattaattgattctgttttatacttctctgtttttgaatggcacatacatctttccacacttggatttctttgaagttaaagctttaattgacttccaaaagacagaggattataaaaacacagagaacagtaaagtatttacacggtcttaatgcctattgccaaacacatatagctgctattaatgcctattgccagactcatatagctgcaaactcatgtagcttaatgcccattgccaaactcatatagctgctatatatgtctactggaaaactcacatagctggttgattttaaattgattgtaggaaaattcatacaaaaagatgctacataggaatataaactgaacaccacaaaaatcgtaatgaacaaactcagtaatgccagcctgttcaatcactagttttcagattaaggcagtatgcaaagggaaacatccttggaatggtcttagaatatagaacaaagtcatgtgtttgggaatcttaaccaattccaatactgttcaacatgtttttctttgttgcaaacaatgcagtttttaagcaaactaatgaatgcataccctgacaaacaaatccaacaaaagaggtacttagagcagtgttcattgaatcctagaattttgaaagaaaaaatctattaggtcattttgggcttttacttctgctgaagaaggattgttcttttgagtttatttttctagctttcagttctattccatttaaatgcctcgagaaataggacttctcaaattccctgtggagagttctggcacctactatattcacttttgaaagtctcctgataactgatttcctttttcttttggttatacacatcaactattcatggttggctctgctgatagttttccatgattctttatgcttatttaaaagaaatcatataacattaatcatataacatataaccattacttggttataaagcatgatattaactaaactggcttttaaaaattcaataacattagagcaaatattttattaatattgtcagtagttccatgaatatatagatgtaggatgtcaataaagtttatgccccttaataactgagtgtgttaatgttgtatttgctggttaactggcaccttccctcctcttgatcaatgttcttagaacagtatgtacaggagtactttagtctaccacttgatattcaaggacaacacttcgaagcttgaaatgagggattgttttaaccatattaacgtaactgcatagtttgcaatagatttaatgattcaacatcattgttaatatttagtttaattaaaagtgccttatattaacttgtacacatgtgaaatgacttatcaacaagattatttattgcagcattgtttgtgattacaaagagtggaagtcatttgcatagtcattaggcgtaaaaaataatgacattaaaagaaaacaattgaggaaagaaccagtaagctctcaggtagagataaaaagaaagttaccgtgagccttttcactgtatatatttatatatttgatttttgacacgtgagtttattataatcaagattgaatgaaaaaaattgaagccttttaatgaaattagcttgacaccagagtcattatcaagaaaatctgaaatactggtacctatgcacatttgattttattatttttagttttattattttttgagacagagtcttgctctgtcgcccagactggagtgaagtggtgtgatctcagctcactgcaatctccagcctcccaggttcaagcgattctcctcagcctcccgagtagctgggattacagatgcctgccaccatgcttggctagtttttgtatttttagtagtgacggagttttgccatgctggccaggctgatctcaaactcctgacctcaggtggtccacctgcctcagcctcccaaagtgttgggattacaggcgtgagccactgcacccggccatttaagcaaattttagttaagaccagtaacatatttttgacagtatttccgaagtgttgtatttaatttaactaattgaaaattatctattaagaaagcaagttaaatgtaatgtgtatacttcatagtatacacattataatgattcatagtaaccattatatgaagagtgtctaaacttttcttcaaatctaccatttatatagtacaataatgaccagcaaacaatggctaagttttacttaattagacatttgtgtagctcctaccaaggctaccagactttgtacccagtaacaggaaaacagaaataattcaagcattattctcactcttgagaaacaattctatttagggagatatacataaaaagcaaaggtggctgggtgcagtggctcatgcctgtaatcccagcactttgggaggccaaggcaggcagatcacttgaggccaggagttcgagactagcctgaccaacatggtgaaaccctgtttctactaaacatacaaaaattagctgggtgtggtggcatgcacctgcaatcccagctactgggcaggctgaggcagataattgcttgaacctgggaggtggaggctacagtgagctgagattgcaccactgtactccagcctgggtgacagagcgagactccatctcaatgaataaataaataaataaataaatagcaaaggcaataatgtgcatatagtaggtgctacagtagaagtctgcacaaggttctgtgtatgtggaaaagacaagtcagaaaaattaggaaaggctttattgggaggtgacatttaagcagaatcacgaaagaagacctgatgaacatgggggtaagagcacttgtacacaaccccatactcctgggctcagactcacttgctcattccctaatcatagaagaccttgaggaaaagcatgctggggttcccttccagcccactggtaaatacagagaggcctaagcacccaacatcccccagggaatacaccactgggacttaaagcattggcaacccagcacccagttaaattccccttgtcactgtttccacattgtccccatcaccttcactctcttgatgctctgcattttctctcttaactcgacccacagtagaccctcccactcaaatctgcccccaataccctttgcaaccaatattaccgcactacactttatcttccctaagggtttcctgctcctcctggtcttaggtgaggtcatttctctgccagcctttaaagtggaagctgctcattttctctgtccctcatccagggctggagtgggactgatgtccttcaccctgcccagtactgtttccacatgagactccttgcatagcatctgctctctgctactcagaccaggagtctgtgctctctcttcctctaaccatcattggaagacaccccagtccctctggccccattatccactgtagattttagcacttacctcctctcttccctcccatgtgctgttttcccatttattttaaggtgcatgtggatggcccattccccttcctggcatcttaatccctttaatttctcatttccattaatttgctacattcctcatatgccagctacccctatggccatatcccagacctttgaatcacacaccaaattccatcaagtcctatgagtcatttttggtccaagacctatcttacatctatgcagtcctatctattttaacaaccatgtgcccagtttaggccactgtcttctcttcactgaatatatgtgttcctgttttttctcatccccatttgtttcccagacacaatttgttctccagagcagagtgatcacatcagtcacctgctataaaaactcctcaacccggtggggcatggtgactcacagccccagcactgtaatcccagcactttgggaggctgaggtgggaggatcacttgagcccaggaggagctgaagtgatctgtgatcacgtcactgcactccagcctgggctacagagtgacaccctatctcaaaaacaagcaaacaaacaaacaaacaaaaaccaacaaaaaattttttattaagcaaaaaacctcttcaacctcttcctgttatgttttgaataaaagctaaagtccccaccatgctccagaagttcccaagggatctggtccttctcatctttacagcctcatcttgttttgccgtttccacctccctcatcccccaaactctttttcttcagggcctttgcacttgctgatgcctctgcctggaaggtcttcttctgattccccatccaggggtgccttatcaccctgccctgccaacctcagattggatgctacttcctcaaagagacccttgggactcccatgtttcccaggctttcagtgccctcatctcaacttgcaatgattgtattggggtgattatttgtatgactttgggattgatatctgactcttccactagaccatacatttcttgagagcagagagcatatccagtttttttaccactgtgcaaccatatgtcgtccaatgcttggcccataatagggggttggtgaatgtggtaggctgagtcatagcccccaaggatgcccatagcctcatccccagaagctttcatggtaaaagggattttgcagattgtgattaagttatggatcttgagatggagagattatccttgattatctaaataggtccaatataatcagtagcgtctttataagagagaggcagagggtcaaaagcagaatcagagaaggagatgccacagtggaagcaaaggggtgtgtgtgtatgtgtgtgtgtatgtgtgtgtgtgtgtgtgagagagagagattgagatttaaagagctccattacttgatctgaggataaggatgagccaaagaatgcaggtggcttgtagaagctggagaagccaagaaaacattctcactctagagcctccagaaggaatgcagctctgctgacaccttgatttggaacttccagaaccataagataataattttgtgtagttttgaggctgggctcatgcctgtaattccagcactttgggaggccaaggtgggtggatcacttgaggtcaggagtttgagactagcctggccaacatggtgaaaccctgtatgtactaaatatacaaaaattagccaggtgtggtggtgcacgcctatagacccaactacttgggaagctggggcaggagaatcacttgaacccgggaggtagagattgcagtaagctaaggttgtgccactgcactccagcctgggctacagcgtgagacttcgtcagaaaaaaagaataattttgtataatttcaggccacaaagtctgcagtcatctgttacaacagcagtagtacacgaatacagattttggtacctggaaatggtgtgctactgtaacagatacctaaacaatgtggaagtggcttttgaattgggtgttgggcagcatgtggaagaattttgagaagcatgataggaaaagcctagcttgccttagaaagactgttagtagaagtagggatgttaaaggcgctgctggtgaggacttggaagtgaagagcatggtaaagaaaatgtgtttcattttagagaatatcaaagtcattgtagaaggttggcagaagtgtaggttttcataatgtgttgttggtgagggctgagaaagaaatgaggaccatgtttagggaaactggaggaaaaagatccttgtcatacagtggaatgaaactgtggaattgtgtcttacagttatatgggaagcagaatttgtttgaacttggatatttggcttagctttccaagtaaagtattgaaggtgtagcctggttttctcttgctgttttatagtaaaatgcccgagaaaaagggataaattgaggtaggaactgttaagaaaaaggaacaaagacatgatgacttgggaaattctcaggatacctggtttgtaaaagatgctaaaattagaagattcattgtcaggaaagtgtgctctggagaggaagccaagggtgagttccttgtggcgtaggttaggggctgtggcagggatgcagggaagagatgatggtgacttggactaggggtctgacggggtatgggaaaatagagaggaatgagttgattctgttgggactttgtattgagttccttgattccataagtggaaacacatgtagagctctctttcctggccacctaagctctctgaccatatccctgactctctccagaatgccttggcttcatgtccacgtgaggacaaatcatatttttctgcattttgcgtgctggattcctctctggactaaagatccaatgagaggtggtttctagctttctgctctttcccacaacactccgtcagtgagtcttctggatgtcctataggcaactcactggatccacttggtctgtggaagaatcactaccacatccatttcaccttgggcacagactagaaggtgaggcagtcatgtcctgcagtcactgggtagcttacaagtgctaatacagcaatagcttaattagagagagagagaagaagaagaatgttatggagcctgtttctagagaggaaaccacaatatcttgatcaagagaccctaaaactggaagaaccagagcagctggtatcaaaatgtggaaaaaactgagatgtggcaagtggtacaactgatagccaaggaggaaaaatttgtatccccctgtaatcccagcactttgggaggctgaaagaggtggatcacctgaggtcaggagttcgagaccagcctggccaatatggtgaaaccctgtctctactaaaaatacaaaaattagctgggcgtggtggtgtgcacctatagtcccagctacttgggaggctgaggcaggaaaattgcttgaacctgggagcagaggttgcagtgagccaagatcgcaccactgcactccagcctgggtgacaagagttaaactctgtctcaaaaaaataaaaagaaaagtttgtaccctcttcttttctcttgcctcaggataactgagattcttataatgcatttattgaacaaatatttgaggagtactcattatgtaagcatcagacactgctcaaggtcttgaggctgtgagggtgtattagtccgttttcacactgctataaagaactacctgagactgggtgatttataaagaaaagaggtttaactgaattacagttcatcatggccagaaaggcctcaggaaacttacaatcatggcagaaggtgaagaggaagcaaggcacatcttacatggtggcaggagacacagtgagaagggagaagtgccacacttttaaaccatcagatcttatgatgatataggagttaagaagaaatcacttaggtagatagtgagggtacgggagtccttggtaaggcttttcttttaaatgaaaagcagccccacacatagacaagcaagctgggagcttgcacgggtgaatgccggcagaaactaggaaccagacacgttaagatggcggctccattttcccttctctgccagccaagtgtacagtaaggagcagacaagctggtgccggccaagaggagaattcatgtgcataataagattagggtggggtgaccagccttcccagtgcgctatgtgaacatcatacctgattgaaccaatctgtgagccctatgtaaatcagacaccacctcctcaagcctgactataaaatctggtgcattcgccacccgccggtgtttcctctcagaagtcccctctctctcattagagagagggctgttttcctttctccttcttctgcctattaacctgtgctcctaaactccctgtgtgtgtctgttctgaattttcccggcatgagaggatgaacctggggtatataccccagaaaacatagccacttaagtgagaactcactcactattcacccccaagatccaatcaccttcgaccaggttcctcccctggcgtgaggggattaaaattccacatgaggtttgagtagggacacagagccaaaccaaaccatatcagagggtgaagagcaggtaaagttgcagctctcctgcaacttgcagggaaaggccatataacacatggttatgagcacaaactgggactggactgcaggtgtgtgagccccagctttgctattgagtgaccaccagcaagttattaaactgtgcctcagtttttttgtttatgaaatggtggtattagtacaacccacctctcatggatgatgtgaggattaaataaaataacatgttgccaggcacagtggtgcacacctgtaatctcggcacattgggaggctgaggcccgagggttacttgaggttagaagcctgagacctgcctggccaacatagcgaaacctcatctctgcttaaaataccaaaaaaaaaaaaaaaaaaaaaaaaaaaaaggccaggcgtggtggctcatgcttgtaatcccagcactttgggaggccgaggcgggtggatcacaaggtcaggagtttgagaccagcctggccaatatggtgaatccccgtctctactaaaaatacaaaaattagccaagtgtggtggtgggcacctgtagtcccagctactcgggaggctgaggcaggagaatcacttgaacctgggaggcagaagttgcagtgagccgaggttgcgccactgcactccagcctgggcgacggagcgagactccatctcaaaacaaaacaaaaaaaccaaaaaaattaaccaggcatggtggcacacacctgtaatcccagctactcaggaggctgaggcaggagaatcacttgaacccaggaggtggaggttgcagtgagttaagattgtgccactgcactccagcctgtgcgatagaaggagacagtctgcaacaaagatccaaaaacaaatataaagcacttataacagggtctggtctgaaataagtactatgtaagtactgtaagtattaactaatattattacaatttatcctcatatagtaacatatcaaatattttcagtcagtgatgcaatatgaataaaatgaaatgatgcagtagtgacagaactgagagaaagctggtacaaatttatactgactggtcagggaaagcttcacagaaaaggtgaactttcagctgacacctgagtaccatggtctggaggtaagagtgtcccatgcatatggaacagcaaatgaaacttcccagagcataatctgagaggggagatttcaggagtggagccacatcattgaagttccttagtcctggtaagtgtggattttattctaagtgtggtgaaatgcccctgagaggttttgagtagtagatggaattccatttttaaaagtcactggtgagtcaagtagtgtactatggttacatttttttccccttatacctcattttgtttttcctgcagttaattcttgcattatttccttttatttacttaccttactatatatttattatgaattctttccaattcccaacttcctgacagcctctcaatgtaattttacttaggttaaatgtatctgacagttcattttcttttttgtctctgtactctttctgctaccattctcattcttgcactaatttgtgctggtttctctctgagccagctgcacagctgcctgcctaagacttcctcttggcatcttttaccctctctctgtgttacatccccggttttctgaatcgtgtggcgttctcctttttactttacttcctcatttgtgttgcacgtatgctctagttgtttttagataaagagtgcatcagaggtagatgttttgattccttacatgcctgactttttgttctacttttgctctaggttaatacttgattttgaataatatcctaggttagaaatgatttttcgtcagaattttaagggaattgcttttctgttgtctagtttcctgtgttactgataggaagtccaaaggggctcgtatttcaggtcctttttatgtgtaacctgttttttgttccttgaggtattcagggtctctttttattgctaatttggggagctttatcataacatgggtccttagtcattcatcctagaaaattttcctttcctatatctttgatgatttcgtctcctctgctttccctcttttctcattcttaaacttctatttgtttgacattagacctccttgtttgatcttctaatttaatttttctctcctagtgtccaatttttgaggtgggagaaagatttcatcaatgttatctttcagcctttcccctgaattttaaaattttactcttcatatttcttctgattaatcctttaaaaaaatagcatcctgggccaggtgcagtggctcacacctgtaatcccagcactttggaaggctgagcggggagtggatcacctgaggtcaggagctcaagaccagtctggccaacatgatgaaaccctgtctctactaaaaatacaaaaacttagccaggcgtggtggtgggctcctgtagtcccagctacttgggaggctgagacaggagaatcaccagaacctgggaggtggaggttgtagtgagctgagattgtgtgccattgtactccaacctgggtgacagagcaagactctatctcaaaaaaaaaaaaaaaaaaagggccctgttccactgaggcttcagtgctgagcatggagggatactacctccaaattccaaacacgtttgacacatctaaagaaccttctaaaggatgactaaactaattctgcaagctttagcctctaacttatctccaatttatatttaatagaaggctggaaattgaacagaaaggaaataagattatttggaaataaaaaattgtcagccaagcaaggagagcttggcatttctggaaacttctttaccctggaagaggtaaaaaagtgattctcccattcccccaacagggcattcactaaaaattaagtgagaaatgctttgcctagaggatctgtagcttgcgaacacttgacttgtgccactggtgtacggaacatagcagtgtcagctctgccctgggacagtcaaggctggctggtgctgcctgtggttagagtcaagagaggggtcttcagtgggtgcagtttgcagttccagagtttagtagagcaaagacgtcatgaactatgtgaactctgaggaaaggtgtcatagaaacacctcaaaaggacactgtctaagaaggctacttgctggggcaaggagaccccaggggtcagaggctgtgtagggaataatgccagagctggggttgaaggagaatccttagaggtgagacagaatgtgcatcattgcagtggggctgtgcaaggcagtggtctccacaggaggtgaggacaagggggaggggaggttgtgaagaatccgtaagtgaccatgatgcaatagaaagccagaatttgggcatttgccataggagagggcccccagtgccagattataatggtcacagacaaatgagatttttaaccatttcctctaattcatggtccacacttaaccccgtgggtcctggaaacagcagctggagaatggagaggaaagtgatgtgggagagagaaaactttctttacccttttcataactgagtttatgaagtaaactgacagtagaaagataaataggagaaaagacataaatttattttgtgcgtacacatgggagtcccataaaatatgagactcaaagaaaggccagatgattgaagtttatatagtattcctgagctacagaaaaggaatcagggcttggggcttattgaggggaggtggtgacaggttataagagggtgaggagaggaagtgtatagcgagcataggttgtcttgttatgcagataaaaagtctctcaggtgataaaagttgtctcagagtcccccatcagaagaataggtaatagcctgtgacaaggtctacctgtccaatcttctccctggtgataaaatcttccctggttgatgagattcttatcaaagtttttttctttatagatataaattttgtttacaaaaagacagtttttcagagctactcctgtgtctacagtgtctcagaataactaactggaaatacatcaaataagcatatcctgatgtggcatattctggtcatattttgggatggtgcgtcctgagctccaatgctgaaaaaacaggaaccccatttctgttggatgtgccaacctaaaataatcaaaagggtcagaatctagtttaaagatactttattcaagtgcaaagtttaaggacagtgctagggaaacacggatcccaaagaatggaagtcagcgttctgaactttagaagtttgggattgtttatagagagagagtttagggaagcttaacagaatttcaacatctttctgtgtaaggcttaatgcctagttacaatgatctgattagtcaaggtggtcactttcatttgagaaaggcatatttaacatttcacgggctgggagcggtggttcatgcctgtaatctcagcactttgggaggccgaggcgggcagatcatctgaggtcaggagttcgaggccagcctggccaatatggggaaaccccttctctactaaaaatacaatacaataaaataaaataaaataaaaaaaattagccgggcatggtgcacgtgcctgtaatcccagctacttgggaagctgaggcaggagaattgcttgaacctgggaggcagaggttgtggtgagctgagattgcaccattgcactccagcctgggcaacaagaatgaaactccatctcaaacaacaacaacaacaacaacaacaacaacaacaacaacaacaacaaacatttcacactgaaggtgtaacagtcatgggtttgtattttcgtttttcttggttttttttttttttttttgagactgtctcgctctgtattgcaggctggcatggcacaatcacagctcgctgcagcttcgattttgtgggctcaagtgatcctaccacctcagtctcccgactagctgggaccacagtcatgtgccaccacacccggctaatttattttttatttcttatagagaccagatcccccttttgcccaggctggtctcaaactcctggactcaaacaattctcctgcctcagcctcccaaagtgcctggattacaggcatgggctactgtgctcatcccatggggtcttttgtgccaactggtgtgagttaggtacaggacaataaaggaggcagttaatccattaatccataacaaagatcagtgaagggggaaggtctggtctctggtctctcctagtcatttacagaactagaacgatgagaagagagtgaatctataacctaagaagcagaattgcaaacatgctatgtgactcagtttccagtacttaacttctcccttggcataataaataattttagagagttttaagaattttgttttcttttacagatgttaacaacctcagcttgctgggggctggtggtggtggctgctcagacagtaaagcattgaatgcaatgtgaggtcaaagttttattacagatcataccggtcttttaagtacttgcagcaagattttcctaatacttaaaagtgactggaaactcaataggatcagtgtgatcttctccagatagggatggtagatttttgaaagtgggtgtgaagggcagtaatgagagaaaaataaaactatttctggttgtactctcccaagtcaaggtcattcaatgaatggttatatagatttgcatcaaaagtccctgttttcagcctcacctttggaaacacctggattctctattctgagactttctgagatgagggaaaggtggcttctcatcagtatctccttctttgtgcaatacagtttcagttctttctaatctacagagttagttccttctctactgtcagctttctaccttccaaaatgtgttaatgtcactcattatcatgtttcccattctctttcccttatggtttaaactttaaaagacaatggtatttgtttaagtgaatatctaaaaagatgtggagaaagattcatgtgttcagtctaccatgtttaattggagtcactggtagatttttaaggaaaaataacattctaggtttttccagtattgctatgtagcttgtctatgtagatcaccttgcattcttctgtttctctcttataacttgatttttttcttttcttttcttttctttttttttcgagacagagtctcactttgtcacccaggctggagtacagtggcacaatctcgtctcattgctgcctccatctcctgggttcaagtgattctcccacctcaccttcccaaatagccgggattacagacatcttataacttgatttttactcatttcattatcatccaagagatgaaatttaactcaaagcaaatgactattgtttcaaatacaaatcttaatcagggagaaaagattataacttatagttgaactggggtttggagattatatgtgttttttaaaattattctgtcccacatgtaacatacaagtgaggattttaaaaatttgtctgcagtttttttttttttaattgatcattcttgggtgtttctcgcagagggggatttggcagggtcataggacaatagtggagggaaggtcagcagataaacgagtgaacaaaggtctctggttttcctaggcagaggaccctgcggccttccgcagtgtttgtgtccctgggtacttgagattagggagtggtgatgactcttaaagagcatgctgccttcaagcatctgtttaacaaagcacatcttgcaccgcccttaatccatttaaccctgagtggacacagcacatgtttcagagagcaccgggttgggggtaaggtcatagatcaacagcatcccaaggcagaagaatttttcttagtacagaacaaaatggagtctcctatgtctacttctttctacacagacacagcaacaatctgatttctctatcttttccccacatttcccccttttctattccacaaaaccgccattgtcatcatggcccgttctcaatgagctgttgggtacacctcccagacggggtggcggccgggcagaggggctcctcacttcccagaaggggtggcctggcagaggcacccccaacctccctcccggacggggcggctggccaggcgggggctgcccccaacttcccagacggggtggctgctgggcggaggggctctttacttctcagatggggcggctgccgggtggaggggctcctcacttctcagacggggcggccgggcagaggcgctcctcacctcccagacggggcagcagggcagaggcgctccccacatctcagacgatgggcggccgggcagagacgctcctcacttcctagacgggatggcagccgggaagaggcgctcctcacttcccagactgggcagccaggcagaggggctcctcacatcccagacgatgggcagccaggcagagaagctcctcacttcccagatggggtggcggccgggcagaggctgcaatctcggcactttgggaggccaaggcaggcggctgggaggtggaggttgtagcgagccgagatcacgccactacactccagcttgggcaacattgagcactgagtgaacgagactccgtctgcaatcccggcacctcgggaggccgaggctggcagatcactcccggttaggagctggagaccagcccggccaacacagcgaaaccccgtctccaccaaaaaaatacgaaaaccagtcaggcatggtggcgcgcgcctgcaatcacaggcactcggcaggctgaggcaggacaatcaggcagggaggttgcagtgagcagagatggcagcagtacagtccagcttcggcttggcatcagagggagaccgtggaaagagagggagagggagaccgtggggagagggagagggggagggggagctgcaattttttatttagcaatttccaaacctattgtgttaggcagggttctccagggaaacagaaccaatagggcatatctatatctatatttatatctttatctatatctatatctataatctttctatctatctatcaagagatcgagagagagagatttattttaaggaattggttcatgtgattgtgggagctggcaagtctgaaatccatagggcaagttggtcagctggaaattctggtaagagttgatgttgcagtcgtgagtctgaaatttgcagggcaggtcaggtacagtatctattgcaattgcagtcctgaggccaaattccttcttcaggaaacctccgtcttttttgctgttaaggccttcaactaattggatgaagccctcccacattgagggcaatctgctttactcaaagtctgctgatttaaatggtaatcacatctaaaaaatactttcacagcaacatttgaacttgtgttgtctaagcaattgggcactatagcttagccaagcagacacatgaaattaaccatcactctgtagagatgaaagaactactgtttcaaaaaacaactgtttttgaatccgtcatttatcaacggattcacccaatggttaacctttctatatgctttctctttctcccaagtactgaatcatatgaaaataaattatggttgtgatatttcctatctaaatacttcatatgggacattctcctacatagcacacctaagaagattagtattaattcagagagatcatgtcatatctggttcatatataattttccctagctgacctcaaaatgtgtttgttttgtttacatattactctttatagttatgtttcttttaatacggatcaatatttgtgtgtttttgctgctattttttttaatgacattgttttgaataattcaggctcattggctatttcacatcctgaatttctctaattttatctttatgattagagccaggctctaattcttggcaagaataacactgaagtgaggttgtgtactcctaattgccctgcatcaaagacacatgatatgcattggttcctgcattagtcatgttaagtttgattagctggtgaaggtggtcgccaccatttctcactcttgtaaagggacattttctccttttaaattaatatgtaatttgtggcacaagactttgagactgtgtaaatatcccattctctgacaacctttcttctgatgactttagcattaactgatctaattatatcattcttggcattgagtagcattcttgtgtaaagaaggggttctctttctctccctcctctcattataatttgttactgttattttcttacaagttactaagaattactcaaaggcagtatttttcaataaatcattggtaatttatggtcttctcactctagaaaagggaggatgggtcagaaagctgaggggaaaaaaagggaggaaacgagaatgtatattatcgacataatcggttgaaaatgtctagtgctgtaattatgccatcatgcagattaaaaagccacctgtgaaaaatcaacttgtattgttttgttttgtttgatttttaataaatccttatagtgtatgaataaaaattaaattaattgatcagtatcttcactaatggcagagaaggggatggactgagcagattctgcttttcactctgatatttgttaattgccctgtgtggtctgaagacctgggttctagtaccagctctccctctgcagacaggtgtgttactttggtcaaggcaatcaatcttcttgatactcagtttggttctctctgatttgagcataagaaatatacttgaaggccgggcatggtggcttatgcctgtaattccagcactatgggaagccgaggtgggaggatcgcttgggctcaggagtttgagaccaggctgggcaacatggcaaaacctcaactctacaaaaaacaaacaaaaaattagccaggcatggtggtgcacgcctgtagtcccagctactcaggaggttgaggcaggagaatcctgggaggcagaggttgcagtgatctgagattgtgccactgcactccagcctgggagcctgggtgacagagagagaccctgtctaaaatatatatatacacacacttgaatgcttcatgtcccttgctcagtgacagccccgtcctctgcttctgcacagttgaccaaggcttctcagtctactcctgtgtagaaaagaattaaagcaggcctgaggctgctagtcttagaaaggcttgcaaagttggcccttgtctggtgtctgggaacttgaatttctggagggttctcaccattccctgaaaagaatggctcacgatgcctaaaatatttgtacaaacaatgaagtttctgctgaacatctgcttccttctgggagtctggaattttaggatgtgctaggtaggggtgtttacatgacagccccacataaaaaccttgggcactgagtgtctaatgagattccctagtaagtaatattttacacatattatcacaactcattgctggaggagttaagtgcatcctgtgtgactccactgggagaggactctgggaagcacatgtctgatttcctttgtcccatgtgccttttccttttgctgatttttgccttgtaaatttttttttttttttttgagagacagagtcttactctgttgcccagactggagttcagtggccccatgtcggctcactgcagcctctgcctcctggattcaagcaattctcctgcctcagcctcccgagtagctgggactacaggcgcgcgctgccacaccggctaatttttgtatttttagtagagacggggtttcaccatgttggccaggatggtcttgatctcctgacctcgtgatccgcctgcctcggcctcccaaagtgctggaattataggcctgggccactgtgcctggccataatttttatcctgtaataaattatagtcgaaagtattgagtcctgtgaatcaacttagagaatcaccaaactgcttccaattttctcatatgtaaaatgggttgctataataatgatgatatctaccttatagggttgttttaagtatgaaaaatatggtgaaatatgtgtgaaactaggggccggatgtaggatgagtcatacagtgggtggttattattacggatcatattaactcttcaggtaaaaaccatcttgtagctgggcaaggtggcacatgcctgtagtcccagctacttgggggactgaggcaggtggatcgcttgagcctaggagttcaaggctgtagtacgctatgatcacgtctatcaatagccactggactccagcctggacaatgtaatgagagtctgtctcaaaaaaaaggaacaatcttgtgtttgcgtgtgtgctcatgtctttgttggaataatactgacacagtcactcaaattaactctcaaatctttgattattcatttgatgggaacaacaggtttatgtgccagcttatcaggacccctagttctttcattaaagtgtgtatgtgtgtgtgtatgtgtgtatgtgtgcacatgtgtgctagttttcttatctaacgacgaagtcctttgggaggtttactttttcattactatttttttcatgctttcctttgatgtgcacctggcaatttatagagccaatgtgtactacatattctgctgcagaaaatgacagaggtgaggaaggagcaggaagcagatttagaaaggaatgttacagtttatcaagttgtgactaatggaagctattaaaacaaaaggtaccaacccatcttaaatattcactgcctctacaactatttttctataactgttgttccttgtcagctctggggtggagggaatattcctgaatgttttattaagtaattcaaagatcttcctaggtatgtgtatcaaagatcctatgatgtatctgtcttgtaaattgagactggcatatattgggcttacattactgggaaaaatgtatgtcatcatcattggtgaaaaagagtttccatagcagttttttctaagtagagagataaatgaatcagacttttggaggaggtatgttttaactcactggaggatcacaccaagtctgaacatctaaggaaccctagtggaaaactggttttcctgtatgctgctctagcgatctgaggaaaggcctaaaaaaagccagtgtccctgtgatattgtgaaatacatatatgtggtctttgttcctgtttcctggcatacaagtactaaaaatccttggaatctccaaagtgctgtctttttgtatattagtgttgactgatagcttcagagtggggctggtcaagttgatcaccaatggccagtggtttaatcagtcatgcctatgtaatgaagcctccatgaaaatccaaagggaatggactggggagcttctaagaagtgttttttaccttcccgtgagcctcctgtgctgaacacgtggagggtcacgggaaggtaagcaaaaattcattcacatgctgggagggtggcacatcccaactccacgaggacaaaagctcctgtgctcagaacccttccagacttggaccttgtatctcttcattggcttttatttgtattttaaaaaatatcctgagtgataaactggtagatgtaagtgtcttcctcagttctgtgaaccacgctagcaaattaatcaaacccgaagagggggtcatggcaaccccaacttgaaacctgttggtcagcagttccagagacctgaacttatgactggttggaaggacggggtgctcttgtgggactgagccctcaacttgtggatctgatgctatctctgggtagacagtgttggagctgaattggaggacacctagcttgtgtccactgcagaactgattgcttgcttcctgctggggagaaatccctatatattttggggtccagaagtcttccgtgttgattgtttttgtgtgagagcagaggaaaaatggtttgagagtttttcgggaaacagcccctcttagtatagtggtagaaacactccaaaaataaaatatgctaccccaaaaataaaaaatgaaaataaaaataaaaatctggagtggtcagtttgccaagaggatttatggagcatctaaggtcaagcattacttctcagccctgcagcaggcctctaattaagccatgccacagagtgcggtttgcagagaggtggagttcctgtggattcattcttctctctaaaattataaataacgcagcttccaaacatgccatattacctcacaaggtctaaagactcaatatgaatcttcaacttaacaattataactgacacagattgagatcttcctggatgctgaaataggctttacatgatttatctcatttagttctcataaaactctattattaatattattttacagatagagaaatggaagcacagagagggtaagtgtattagtccatttttatgctgctaataaagacatacccaagacagggtaatttatacagaaaaagaggtttaatggactcacatttccacatggctgggaggcctcacaatcatggcagaaggcaaaaggcacttcttacctggtggtggcaagacagaaaatgagaaccaagcgaaaggggtttccccttataaaaccatcaggtaacatgagacaattattcactaccacagaaactatatgggggaaaccgcccccatgattcagttatcttccattgggtccctcccacaacacgtggagctacaattcaagatgagatttgtgtggagacatagctaacccatatcagtaagtaattagacaaaccttgcaaagctagtaagtggtattgctggaattaaatctgccaatgtcactccagagtctatgtgatttactggtatattatagggtctacctataagcttgataaccttatgttagaacaaataaccatgacatattctgttcagtagtttgcatttccttttgactcctacaggggaggaggctgaggttcagggacattaaagtggggtttagagacattaggtggtttacccaagctttatctactagatactagataattgtctatctgacaataaagctagaacttacacccagctggacaatggagctacagcttaaaacaaaatcttctaatgagctcagaactcatggcttaataagatttgggaaaagtcctgcggacatttcactgtctatccagaaatgcgaggaagttaggagaaaaggcaaagtatctcatagacagataaaggcagttcagtaagtagcctgaataaatagccatatttaaaatctaatttggttcttttgtgcctaacacaattgactttatgctggtatctattttctgctctgtctctctttctgtctctacttatgtgtgtatgcatgtgttataaaatatatcagcccattgatcaatttttaatttaagcaaaaacatggtagattaatatattcaatcaatttattgagtagatatttatcgaggctcacacatttatctgactgtgtactaagcactggaaacccaaagagaatgaagtcactgcctagacagttggaggctgacacataaacaagcagggtaataatcaagtgtcataactagtctattacatgcaatgttaaactagcatctctaccatgcaaaacttgtgctcttggggatacaggaagactttccagagaagtacacaggacaggaatgtgttaggaaaccagtcagttcccaggtcctcgatcaggtcacagtgacttgtgattctattttgaacataggtcttaaatctttattttgatagcaagggttttaaacttttgatatatgatatacttctgaaaatcaaatttcatattctaaaattaagtatttttgcccttaactaacttgaacataatactataatacattaacatatattattaataataaataggacccctggaagtccaagagagacatgaggcttatttggtatgttaaaatcatacaggaagtgttgttaaataagaaatggtgttacactttctttgagttatatttatatggatatgttgttaatatgtgttccaacattgtatgagattcctaaaaatctgatatggacatccagtgtggttgttgggtcctctatgagcctagggagcactggccggttaccttgcatccattcatgtcagcgttggtagtgtcaggcacccgatggttcttagaagagtacttagctctactctgcagtgtctgaagttgctggatatatacctgctgtataaactgctgactagggcgctgcagtttacttactgtcttctcatggggaccttccccttcaactctttcctcttgggtttcacatcttgggtggggagtttcatcctagtagtttgcctgagaatacaggtgaacccacagaacaaagtggacttcgaaagcatctccttggagtgagactttgcttctttctctttgctagcaccatcttgtaccttatcgtcatgaactttgttggctgaatcattcccatttacttaattgaagagtaagagactggaacaatgctcactttgattttcctggataagagttaagagttcttgagatggcagcttgtttgacacatgaattttcttcaaatttgtgcttactaccaactgatttggtgtggaggagagcccagagaagttccctctctctgtcagaacaactttgtaacatttattaacctgacttctgccttcaattaagtgtaaccttttgccttccaaattaaaaagttccacattactccaaaaataaaaagtgaaaataaaaataaaaggctgatatgtcatggtatatgcagtaaattgctttattctgatttttttttctaaaagccttttgcaaatcctgaagtgctgtgtattcaaggaaattcatgaaagggaccttgacaagtagtcttaaatacaggtttctgataactttggagatcacacctttggactaggtaaaaacatccaaaactcgtctgggcgcagtggctcacgcctgtaatcccagcactttgggaggccaaggcaggcggatcacgaggtcaagagatcgagaccatcctggctaacacggtgaaaccccatctctactaaaaacacaaaaacaaaattagccgggcgtggtggcgggcgcctgtagttccagctacccggcaggctgaggcggaagaatggcgcgaagcggcaagacggagcttgcagtgagccgagatcgcgccactgcactccagcctcaaaaaaaaaaaaaaaaaaaaagtccaaagctctaatgaaaaactgatgcattcatgcagattgctaacccaacatcaaggagaacgagaattacatgggactgagtgaatgaaggattgaaattactattttaaagggtttttgtttgaaacattactgattttttttatgttttgttttccagactcaagaaaatattttttttcttttgagctatttatagcttacagcattggggtaaagtatacttctgtgagcaaaatggaaacatttacctttctttctacctgaattcttcagaatttggaaactattcattagtgttcttattttctggcaatatagttatttgcataagttcaataagaacctattttcggctgtgcgtggtggctcatgcctgtaatcccagcaccttgggagggcgaggccggtggatcacaaggtcaggagtttgagaacagcctggccaagatggtgaaaccccgtctctactaaaactacaaagattaaccaggcgcggtggcaggcgcctgtaatcccagctactcgggaggctgaggcaggagaatagcttgaaccttgggtggcagaggttgcagtgagccgagatcgcaccactgcgctccagcctaggggacaagagcgagactctatctcaaaacaaacaaacaaaaaaacaaaaagcaaacaaacaaaaaaagagcttattttcttttgtaactggacacatggaaacagtggttattttaccaaggctttgactggaatgtcttttttttgagtgcaaccggactgcttcgagggattgaggttgactttatacagccagtagacttggaaaaagacacacctggtaccttgcccacacaattcctttatagcgtttctaactttgcaataagtaaagaatgtcactttctgacaggcccagggacctcaagatattttggagacgttgaaaagagagcaattcacccaattcatacaggttttacaggcacagtctgatggcgaatctttggcttggcttcattgcttcaagagtttgtttttttgacacggaatctcactctgtcacccattctggagtgcagtggtgagatcttggctcactgaaacctctgcttcctggattcaagtgattctcctgcttcagcctcccgagtagctgggattacaggcatgtgttgctacacccagctaattttttgtatttttggtagagatgaggtttcaccatgttgcccagggtggtcttgaactcctgacctcaggtgatccacccacctcagcctcccaaagtgctgggattacaggcgtgagccactgtgcccagcccttgagaggtttcaaaagtcttaatctgagattccttatgaaaaaattccaacaaagccaacttaagagccatccctgtagaaaatatatctatttaaatatcgtctgttttatgccacaatgtttgttttgcgttgcaagccgttatctcctaggcatgggtaatccactttgagaggaaaatccagacatcattgtgcctaatttgctgccacctgtgtctgtgctggatcttaccagggttagctttattttctttcaactggcaaaattctgataaagcatgtagcttcacggtagagcaaaaagtgtaacttaattgaaagtcatgactttcaggagtctaatgatgctaatatattttcttctagagaggtgtctttattgtatgtaattccctgaagaaatgtaaagatttatctaattcctattgctctgacaggcgtgctcaatagaagcattgaagtaaaataaaaataacctttttaatctgtgtatttctcttgcccaccaagatatttaatttttttcttgatctttgcttttgtttatgtgaagatatttatgtctatatcatttctgtatatatcacagaaaagttttcacttgcttgacattttattctacaatgatttttagtttaagtttaaagaatggctacattcagatttattttcacaactatagtcctgctaaactgcctttgttgaaaactcagtttttataataaataaaaaatatcaaagcaaaaaaaaaagagccttcatgataaatcaccattcttactgcactttaagcagataatcatgccagagactaaactgactttgcaaataaattagttttattattattatctttgtgggtaaaagttgggatgactgtagaagagaaaattatatttcagaagaaaattataccatacttgttattagattctagtcttgataattgtttttttgagtttttgttatttgcctacaatttgggctgaatcctgaattccttcctgggtacaagtctccaaactaatgtttcctaatttttctaccatttttctgtcttggaatcaccaagccctgcaggctttagctagacaacttgatataaactttggaagaaataatgacagcaacttaatatatgagcagtgttcatgtcagctgatgtatggattactcagaaggtttacttgaacacctgattcaaactataatccagaaatatctgtaagattgccactgcaatctgaagctacttcagagactctaggaaaattagtttatagacaactccagatgttaatctttgtttttcttttgttttcatggaaatgccttttattaaacatctgattgcttgattcatagaggcctgactttggtggaagcaacaccactgcctgaaatgagatataactgttaaccgtttaattggagcggcctgttctcacgactgcaagactagttcaatggcttataaaataatccacccgctgggcacagtagttcacacctgtaatctcagcactttgggaggctgaggtgggcaaattgcttgagctcaggagttcgagaccagccagagcaacatggtgaaaccctgtctctaccaaaaatataaaaaattagccgggcatagtagcatgtgcctgtggtcccagctcctcgggaggtggatgtgggaggattgcctgagcctgggaggcagagcttgcagtgagctgagattatgacactgcactctagcctgggcaatacagtgagaccccatctcaaaaaaaaaaaaaaaagataatctaccaacccaatttctcaactggggaatgttgggctcctgctctcctgtctctgacctttcattctcccttgaggctagccatcaagactacaacccctcttccccaaagtgggccatagaaacaaaaccccttttccccaaagccaaccataaaacctaaaaatagtactctaacttccaccacccccagcctgtctgtgtaaggccataaagaaattatctgactcactttgtttgactgaaggttataagacccccattccagagagggtccagcaccacacccagaaggaagaaatgcatgctcagagaggcaagaagggtccagacagacaggctgtgctggatttccctgctcagtctattagcattagaccataccttttttgtccaatcatatttctacgtggctctccatactttgtttaacctaacctaagggggctcagggttttggcctgggcattgtctgttggggaatagagtgagtcatccccagctcatgggtttgcatccagttcttgttgtaaaaggcccaaagcctgttggatggcaaccctgagccatcgtggaaggggggttccagtttcacaaatagatactcagacagccaaactaccatctacttggtgccaacgtttgcactgtggtcaaagacttacctagcacagactgaacaaatcttcccatctgtcacataaatgtccccaagcaatgttgaagcacatgccaggatcggccttgctaggtcctgcttggtagataagcaaatggcttccttgtggtgtttttattctattttgtctcattaacactacaactttgtgttatctacttgataatctgtaattgtaaatacatacaggattatgtaatttgtgtaaatacataatgacagacttctgaaaactggtattttttacttggtgtccatttgaagctgttttaggttctgtggcacatgaaccaatggcatttaaaaagcatactctccttgctcttaaaaaaacaaacaaaacaaaacaaaaactgtccattaaaatttttgtatttttgtaaagacagggtttcaccataaaaatggacagtttcccttatatctttgggtcttcgttctgtaggctctcgtgtcacataaaattatgatcaaataaatttgtatgacttttctcctattaatctgccccttgtcaatgattttgagcaaccttctgaagaaagtgatggggaagtattccctttgctgccacaaggtatatatcagataagtcagtctattttcttgaacatatatcacattcataggaaaaacactttttccaaaagattactgtcttcccaaatacccacgttctccattttttttttttttttttagagatggggtctcactgtgttgtccaggctagtctcaagcttctggactcaagcaatcctctcacctcagcttcccaaagtgctgtgattacagacataagccatcacgcccggccccattttctcctttgggtgtatgtatattgctcattgtcaggcatcaaccatttctcttctctgagatggagtctcactctgtcacccaggctggagtgcagtggcgcaatcttggctcactgcaagctctgcctccctggttcacgccattctcctgcctcagcctcccgagtagctgggactacaggtgcccaccactacgcccggctaatttttttgtatttcttttttggtagagacggggtttcaccgtgttagacaggatggtctcaatctcctgacctcgtgatccgcccgcctcggcctcccaaagtgctgggattacaggtgtgagccactgcgcccagccctcttctaattttttatatttatcatgtatttactagaactggtttattttcgtgagcatatgttgtggattctactataaataatgcacttaataatcattaataaaacttaaatcctttccgtcttgattgtggccttttctttttgctattaatttcctcagcataggttaacctgaactcttaaaagctatttaggtactggtataaaacaaaattttctccaaagcaatccagtatataatatctggattttaaaaaagcagcctcatttaattaggattaatttctcctttcagaagttaagtgattctgtttctgtaaaacgcaaaattataagcttaattgttttccacacaggaaatgaaattcctaatctttttatccagaatcttcatgtgtttgtctctctgtccatctgtcactcctttttaaggtacctggagatgacctagaggcttgccacgcttagggtttcctccctgtgcagaagaagatgggaagtgcaaatgaggacgaggggtggggagggaagagggagtcaggtgattcagcaagtgcaggagcccacagactaagctcaggaatttgcactttgtctgctcgcagagtgagtttcatcgtggtgtgtatatattgagatatgcaacagactccactggaatgtcagaagaacttatgtttatttttcctctaacatgtgggaaagattaaactgtatttgtatttaactcacatagattggcatgtgctcattctgtgtgtcaccctgccacgctgtcacaaacttcgagcagggtcctgaggggagaggagggcatagctcctgctcccagggggttgcctgtgtagccctgcgcattcattctcttccagagggttgtgatttgtggcggtctgtgtgagcctggttaaggagagttacagattatgtcatctggtgttaactgataatctttgcaaaagggacattggctttaagagatgtctgcaaaaaaaactctaaacaaacataaataaaaatttaaaaggataaagccagaataataatgaaaatattagtaatgtaaaacaaggaaatgtgtcatgtttttcatgataactaatattttttcaatttttttttttttttaagacagtctcactctgtcaccaggctggagtcagtagtgcgatcttggctcactgcaacctccacctcccaggttcacacaattctcatgtctcagcctcctgagtagctgggtttacaggcactcgccaccatgcccagctaatttttgtatttttagtaaagacagggttttaccatgttggccaggctggtctcaaactcctgacctcaggtgatcggccgccttggcctcccaaagtgctgggattacaggcgtgtgccactgtgcctggccccagttcttattataagttctccattaaccatatcatgagattaaaaaaacaacaatgatttcatcggaactgacaaatagtgggtgacacaattttgatcatcaagaagactttaaaagaaggatttgtatcactgtcattactgattacttggcccttgtgtatactgggcctttagctagggctggtacaataaaataaccatagttagaaagatattttaaaggattacttatttcatgtttatctcacccttttatccctatttttgggcatgatttattattattaggtttttaaataaataatgaaataagcatgttaggtttgcatgctgctttggttaacattgctatataaccaaccaccccaaactttgtggccttaaaacaataatttatttatttatttatttatttatttatttatttatttatttatttttgagacagagtctcgctatgtcacccaggctggagtgcagcggcatgatctcggctcactgcaacctccacctcctgggttcaagtgatcctcctgcctcagcctcccgtagagctgggattacaggcacccgccatcaagcccagctaatttttcctttatttttagtagagacggggtttcaccatgttggccaggttggtctcgaactcctgatctcaggtgatatgcctgctttggcctcccaaagtgctgggattacaggtgtgagccactgtgcatggccaacaataatttatttttatctctcatggtctctagattgcctgggcccggctgagcagtctgagtcagccttatggtctctcatgtgtttttaatcagtcatgaggggccggcatcatctgaaggcttgactgggctggatgtttaagacagccactcacagggctgacagtgatgctggatgttgcactgttgactaatgagcctgcacgtggctcctccatgtgatttgggctatttatagctggggtgactgggttctaggtggggtagttccaagatccttccaagaggaagaaagcagaaactgcctggccagttagtgtatatgcttagtcttagaacagtgtcacttccatatttctccatagtccattaatcaaagcagttacaggaagcagacagacaggaagggaaaacacaatgcaacagaaggagagattgaagtgttggcagctgcaagccaagaaacacctgggttaccagaagctagaagaagaaaggtaggattctcccctacaggttccaaaggaagctgggcctgtccacacctcacctctggaactatgagacaatcactttctgtgggtttaagctacccagtttgtggcactttgttactaccgtcctaggcaaatgatacagtaactacatacacagtacatagaattgctcattttacttcgttgaatgggacttggcattgaataagcccaaatgagaattcttttgtcaagatttttttatggctcacttttccagagacgtgacatggcaggagtaaggggagggtttggcaggtaggaattatactcatctgtcattgtcttcccaataccaaccaggaagcatgtaaataatagctgtgcagtttgttttctgaaccaaactgggccttattttttttaaagaaactttattaaacaaacaaaaacctagaaacactagatgtatatttttaaggtttctctcacataatatcctaatcatcagtataccgtaatccaagggctacatataactgaaaaataaatgggtcttaaaaaaattaaaacatggtatataacactagctaacatgtactgagcagttactaagtgctaagtactgctaagtcctttatagatatcttcatgttgagtgtcgtcactgcccattacttactctgagtttaaatatgagactcaaaagaggttagtaatttgccaaaagtcatagggcttataagtgatagaaccaggataacgaatctcaaccaagggacttcaatgcccaaaccggtgctcagactgtagccccatgtagttagctatttacatttgaaaaaatttttaatgtttattattttttttaagacagggtcttgctctgtcacctaggctggagtggagtggtgtgatcttggctcactgcaacctccacctcctgggctcaagtgatcctctcatctcagcctcccaagtagctgggaccacaggtgtatggcaccacgcccaactaatttgttgtgttcttggtagaggtgagtttcaccatgttgcccaggctggtcttgaactcctgagctcaagtgacctgcccacttgcctcaccctcctaaagtggggggattacaggtgtgagccaccatgcccggcccagctatttacatttaaatataaattaaaatgaaacaagattaaaaattcggtttctcaatcacactaaccacacttgaagtgctcagtagctacatgtggcttagtggctacctggcagatatagaacgtttccatcagcacagaaagttctactggaaagcattgatccaatctctttgaacagtcacaatgcatataaagtccttattatgactgtacaagggaagacaacgagtagaggaaggcagaaaataggaaaaaaggaagaagaaagatttagggtgagggagagcagttctatgaagaaaagaagctcatatctaggagtggagtggaccctgagaacatgttagtctattatattctaaactttggcagttaaaattccaaagtatattaagtacatgctttctaaaatattagagagctgcagttcaacagatttttaactctccacagcatgtccggcactgggtgaggtgggatggctaggtgaataatataggcattgtcatgtgcgttcgtgtgaagagaccaccaaacaggctttgtgtgagcaataaagctttttaatcacctgggtacaggcgggccgagtctgaaaagagagtcagcaaagggtggtgggattataattagttcttagaggtttgggataggcggtggagtaggaacaattttttgtgggcaggggatggatcttacaaagtacattctcaagggcgaggagaatattacaaagtaccttaagggcagggaaggatattacaaagtaccttctcaagggtggggagggtgtatcatacaaagtgcattcacaagggtggggaaatatcacaaagtacattatcgcaagggcagggagggtgtattgtcacaaagtcaattgatcggttagggtggggcaggaacaaatcacaacagtggaatgtcatcagttaaggcaggaacctgctattttcacttttgttgatcttcagttgcttcaggccatctggatgtatacgtgcaggtcacaggggatatgatggattagcttgggctcagaggcctgacagacatgaacttcccatcataaaattagaagagcattaatcaaatgattagaataaaatattaccattattttgaaatggcaagcattgtatgtaaataaacagcagaggaacccactgtagcctagacagggttcagagacgttcctgccaaggacatggcacagggactgaacaaggaaggatgacagtgcctggcaaaggcagggaatgttacaggtatttgggcacctgtgagaaggcctgatgtccgaaaggactgaaataaattaaatgtgtggggggagagagaaagaaagagcctagcaaaaggtgagctggagagtcagaggcagaaggcagaatctgggatgggctgggagcttgccaatcattttgtcaaatgggtgatgtgaagccttgaaggttttttgaccaagaggagatgtcttcagatttgcgtttgagacattttcactggttgtcatgctaagaatggcttaaagagaagcaaggctggggtcagaggagctgcttggaagctgtttggtactaggatgcggataacatggttggagaaatggcaactgtcagggtatttggagcaagaatggatagacattggtgatcatcacttggatgcatttgagggacaactgctatgtttctactagagcaactacatagagcaggagtaagcaacttacagtccacagaccacatttgctctgtcccgtttttcaaatacagtttaatggaaacagagccatgcccgttctttcacctattctgcatggctgacatcaggcatggttctaagtaatatacataagtttcatatattaatgctcatctatcccagttgacaaacatgaagtgttgctattgtctcattttacagcggagaaaactgacatagagattctctttcgcacccatagcttcagttaccacctctatgccaatgattcaataatacctctaatccagacctcttctctgagcttcagacaggcagatctctcacagccagtcttggagacacttcagaaatcataggtcccaaaccagactcctcctcatcccctcaaacacattctttttcaacattccttttttcttagtgaacatcaccaaatagataagcaagtcagatccaaggaggcctccttggcacttctctcatccttgtcccaccttatatcatctatttttctttttctttttttttgagatggtgtctcactgtgtcacccaggcaagtgcagtggtgtgatcctggcccactgcagcctcaacctcaccaagttcaggtaatcctctcaccttaatcccgtgagtagctgggactacaggcacatgccaccgagcccggctaatttttgtatttttaccagagacagggttttgccatgttgcccaggctgccaccttatctccattcttgctgaaatctggctgtttctctccacttctattaccaaccaccagccaaatctgacttattaaaaggatcatctcgtatgtgggttctgtaatagcttcttcaaaatccattcctctccacccagaccctcttccaatctccaaactgcagccaataccttcaattctgtcaccgctcctgcatactccacctaatccttaacctttcaatggtttctcttgcccctaggttaagctaaattgaaaactgctaaagctacagcttcttagtgtaactagtaagtacagtgactactatgtctggtttacttcagctgttgctgactaatagcacttcttgaatgaagaaattatattaccgtactgtagggaaaaatttgtacttcaatggaaaactgaattatttagagcaaacctttaaggttatctgattctgattccatgggccctttcattgggtcttacattgtttcattgtttttgagttattttacagatgactgatagaaatgcaaaataattattgcatgcagtcatgcaagtaaaatctgaaggtcagggttcaattaacttctctcccctactgtggaagaagccaatttcatttgcatattcatttcaatatttctgacctataaacatgcctgttctttgaaccagtttttatatctgcctggtaacttcattaaatgatttaaataaactctataatttagtttattttatacctgtatgacagtcaggcttttaccttatttttgctttttaaaattattctttagctctccctaaggcactacttggctggccctttggctactcactagcccaagctccatcctcttctgtctaccgcagccccaggctctcttttggccctttgttccagccctcctcagagaagttcttttgtcctggaactcactttcataccaggtgctcttcatcccttcttcctttagtaaatttctttaatctttcagatttctgctcaaggatcacttgctgaaagcctttccaggcctttctgagtcaatacaatccattattagaggctcttagagcacaggcagcacttgttataattttacatctgtctgtgggattccttaacactttctaacacaattaacacttttctctctggctgggggcaatgcatgataacaggatgatggtatgctctcaaccctcccccagcaactagcccagtgcttcgaacatggtggatagatacaccgtttttattttagacagatttttgagtagcaagtacctactgctcaggagacagatggactgaaaaaatatatttgggagtcatcagcacataggtgcagccatgaaaatgcacgagaagcaaaaccattggcaggaacaaaatgaaggctattagagaccttatttaggtggaataattggacagaagcccttaatggggaggaaatagaagcagttaatacagatggaggccgggcgccgtggctcacgcctgtaatcctagcactttgggaggctgagataggtgggtggcttgagtccaggagtttgagaccagcctgggcaacatagcaaaacccggtctctacaaaaaatacaaaaattagcccggcgtggtggcgcaggcctgtagtcccggctactggggaggctgagatgggagaattgcttgaaccggggaggcggatgttgcaattagacgagatcgcgccactgcactccagcctgggcgacagagcgagactccgtctcaaaacaacaaggacaaaacttatcttataagcgaccctggacttccagggacactcgccgctctatggtggtacgtgacctgcctggactctgtggtctttggagcttgggaccccaccccagcgtaagaggcctttctgtgccttgtataaaggagaggaaaagtgtaggttttctgagttgataagattagagctacagtatattatcagtagcgttgtatgaaaccatttaaaaaaccaaaccggatttaaccgctttcacccagaataaactgccctccccctctttccaagatcaagtcagccccagttaccacttcctattaatttaaaaaccaggaaggctcataatttaggctgacgttgccccaggcgaacactgcatataagacaatagctattccaatcctcctttccctttctaaaccgaatagtacttctaacatcacttttccagtcctctttctaaatattgcgatcacgagcctacatcggaaaactatgaaaacagtatgattggagctcttgatggtctgctttgcctgaaaacgatgaaaggcattgagatctttgggcagaaatggcccttagggaatgcgagcctggtagccccataacaccccgagttacaaattcggtttgggtaggtggcgcagggaaatctaaaagctggattcacgttctcccccttcagtttgcacatagcggtcagtggcagacaagagcagacgcacaaatgtcaatccccgcccgcaaactctcgagggcagaaactgctttttgtcagttggatttggagtcggtggaaaagctgccctaatgtagtttctccgaggtttccttagccttgaccgaggggcgcttcccggccattcacctagaggttgtttaataaacaaggatgctcgcgaaatatctgcgcttggaaaggcgctcgttcgtggcgcgcattctcgggcctccgcaagcgaccccggtgacagggacaaccgcttcggttttagcgactgcagacagactgggacgagacggttggaggctcctccccaagggatgctggaggggttgcgtcgtaccctgcgcctggccctggcgcgcggccccaggtcgtggtacccagcgccctatgggccgtgcgccggggcttggccacaccgcctgctttcgcttccagccgcgcgctccgtgccactgccgctctctgcagccccgcgtccccgcagcctccccatggccagcccgcttcgctccgctgcggcccttgcccgccaggtacctcgaacccgggcgtttgcggaaggggggaggattggaacccgggtctcggtagctcgcgggcctggccgggcgccttgtcgccgtttcctgcaccatcctccttcgccttgccctccattccgcctccagcgaggcgtcttcccttccccgcatccctgcccgaaatctggagtcccagcctgcaatctccacctcttcgaggttcccgctgcccaggtctagcaccctcatgggtaacccgctccggagcgtggcgaggaccgccacgggggacgtgagggtagctatggactcgctctgagggaggaggcgggagctgaatctctgggctgccagaacccacagccacatcctacgtgactctgccaccccaaaatattttgaccgcagccttctgcctccttggatctcttccttccccacccccacccccgtagttatttagcagattacgcattaaaacaaatgtctgcaggttttcccaattagtcccgcttccctgtgtctttatcttttaaattgcccactaataccatgaggtttaaggtgtggggtggatgctgcggcatcggaggaccctgctggtggaggaaatggttcacgcccgtccccgttccctttgcaggcttgctattgtgcgtctgtgattgacaagaccacgaggctgagcgcgccctggagatttttctataaatggcttaacaccccagtctagactatttgctcggatataagggagacaattgtttttttgttctttgccggcgaaccctggctctgtagggctgacctggaatttaaccagtcttccctgagccggcggaggaggacaaaaaccgccgcgaccccggcagggtgggaagtgcagggcagcgctcccaagacacgcttgttggaggttcgggcctgggtgcttggttgtctgagcctccttttttgtgtttgcctgggtcctggagaggagcgcacggtatcatggtgagtgtcacgtaggttaccccgggtcccgcttacccacctgcatttacttaatggtggtttaattcttctttaaggattgcagtaacggatgctccgcagagtgtaccggagaaggaggatcaaaagaggtggtggggacttttaaggtaagttgcttgccagaggcttagtgtctaaagcaacgttcaactgaataaatccatttcttgttgagattcggggaaattttcactgtgtgggttacccagttcctaggttgtgttgccagacttttaaaattccactcttagaggaaaaaaagccatttagagagtgacagtacattcatcacaacaaaaattatctagcagctaattgctgattttattttgagtcatatatttttcttgaaaaatagtcaatgcgtaaatattaaactagttgtttatcagattccataatacgtacaaaccttcagtctacttgtagaaaaagttaaactgtgatttttctctttcagtagcacataacactctacagtgaaagtgttgcattttcttcttttctatctgaattgcggggtttatatagtaaatagctcatacttcaaacagtgagaaacaaagcacgttgaaaactgtacaaatacaaatgtaagatgtaatattattttttctataagtctatctcctaccctccctcctcgtggaggttttagcttcttctttttatgcctagtgctgctcttctgcctgtttgagtcactgtcaattgtcatcagacaattgacacagagtgtcctaatgatctcacatcctggcggttcagagagggaaggaaacttgactcatcagtttctcacacattgagctctctcacagtgtgctggagactgtgccatgcattggacatccaaaggtgaattcaagattaggtctctacttgcaaggaatttttattttatttttctttttccttctcttgctgtcatcttagcaaggattttttaaaaagcaaaattagaatattgcaatttcttttctgttttttgagacagggtctcgctctgtcacccaggctggagtgcagtggcacgatctcagctcactgcaatctctgcctcccaggttcaagtgattctcctgcctcagcctcctgagtagctgagattacaggcatgtgccatcacgcccagctaattttgtatttttagtagagatggggttatcaccatgttagccaggctggtctcgaactcctggcctcatgcaatccacctcccaaagtgctgggattgcaggcgtgagccaccaagcctagcctgaagaattctttgcaaagaaaaatatcaactcaaatttaaataatcttttcctttctttttcttttttttgagacagagtcttgttctgttgcccagactgaagtgcagtggcaccatcaattaggtatcactttcagccttgatctctcagactcaagtgatcctcttagcctctcaagtacctgagactatcggcttgcatgccatcaggcccaactaatttcgtcattttttgtagagatgggatctccctgtgttgcccagactgatctccaactcctgggcttgtgcaaccctcccacctcggcctcccaaaatgctgggtcacaggcataagccacaatgcctggccataaataatcttttttatttgttaatttagatttctgtatattaggttttatttaggggaattgcctgtttacactcatgtatttacacatcaaaacatgagttatggtggatgtattcacagcacatatgtaataaggcatgtgtaaaaatgatattgataatttagggaataaaaatggtagattttatagaccatctttgtttttgatatacttttctctgtctcaaaaaacaaaaacaaaaacaaacaaacaaacaaaatatatatatatagcctacattgttgttaactataatcaccctactctgctatgaacagtagactttatcgcttctatctaactgtatgtttgtactcattaaccaacctctcttcctccacctacacccttcccaccccctgccatcttctgatatctatcattctatgagtactctcttcctccatgagatcaacttttttttttagctctcacgtatgagtgagaacatgcaatatttgtttttctgggtttttttgtttttctgtgtttggcttatttcgcttaccataatgacttccagttccatccatgttgctacaaatgacacgattttactcttttttaatggctgagtagtattccattgtgtatatgcaccacattttatttgttcattgatggacacttaggtgattccatgtcttgactattgtgaatagtgctgtaataaacatgggactgcagatatccctttgatatactgatttcctttcctttggaaaatacccagtagtaggattgttggtttatatggtcattctacttttagttttttttttggaaagcttcataccattttccacagtagataaactaatttacattcttaccaacagtgtataagcgttctcttttctctgtatcctcatcagcatctgttattttttgtctttctaataataaccattctaactgtggttgcttttgacatatttctctacctttttgttaatctacatcatttataacatttcatatggccttttgggtctctcttgggtagttttcgtatttcttctcccctccccatttatgatgcagtcatattacatgaggatgcagttttgcagcagggcctagcaatgagatacgttgttacacatcctggcgaatctttctgtggactctaggatcctcttcatttgcaagaggtcagccatctatttcttccaattcctccagcttcacatatctccacagaatgcaacactgcaaatctgcagttctcttcatgatcctctttattagattttaaaagagtatctccaaaagatgaacatagtgcctaaggctttccaaatggagtaagaataatgcacaagaacctagaataaagttattaaatgtctgatacagttgtaatacagacttgatttttgaaaaatgtggccaatgaagagaagagcaaatgtgctatacgatggtgagcaaaaggtgttgacaggcctggcatggtgactcacccctgtaatcccagcactttgggaggctgaggtgggtggatcatttgaggtcaggagtttgagactagcctggccaacatggtgaaaccctgtttgtattaaaaatacaaaaattagccaggtgcgatgacacatgcctgtaatcccagctacctgggaggctgaggcttgagacttgcttgaaccggggaggcggaggttgcagcgagccgagattgtgccactgcactccagcctgggcaacagagcaaaaaaaaaaaaaaaaaaaaaaaaaaaaagtgttgactgaaccctggctgaaacagttttcaggtgctttcaacaaatttacacttccctgccctgagcctccctatttcagaacaaatgattacccaactgcaaactttgaattaggaagttgtttttaatatgccctgtttttctcaatatttcttgccatttcacaatcagttattgtggcattccaattcttccacaaacatatgatgtgaaacatcctgacttcgatgtcatcagggaatgtggagcattggaaagagacagattaattatgcagaagaaagtatcatttgacaaaatattatttttatttatctttggaaaggaaatctagaaaaagaaaatactttttaaagaacactgataaaaattgtttataaaatttgtttcctttaggaaacaaatcgttcccttaaaactacatttcatatctgccccaaacgagtcacatgtcttcagctaatattgcttgtttacgtttgaactttattcaattctatcacctagtaatttagtattcttaggtaatttctctttgagctcaggttaaaagttgttatttttagttttcagagttgcagaatttttttttcaagtagagaaaagttcatgatgagattctgaagccacctaatcgtatattactttgaaaaactggatatatgccgggcgcggtagctcacacctgtaatcccagcactttcagaggccgaggtgggtgggtcacctgaggtcaggagttcgagaccagcctggtcaacatggtgaaaccccatctctaccaaaaatacaaaacttagccgggtgttgtggcacatgcctgtagtcccagctactcaggaggctgaagcaggagaatcacttgaacctgggaggcggaggttgcagtgagcccagatcacatcactgctcttccgcctgggtgacagagtgagactccatctaaaagaaaaagcaaaacaaaacaaaactggatacagggcagtgcttaggtacaaatcagaaagttagaggttgctattcatatcattaagaaataatgtgtcttacgaaagaatgtagcagtttactgaaatagaagtcatacctagaaatgtaataatttatctttaattgtcagaaatttaactgatattatgaagttctaattataagaacacttatttgaggttaaaaattaccttattctatccctgctttgccgctaatttgatctctctggattagtgggttattgtgggtcctatgggtattttaaggagaggtctcagaaaactaaaaattatatatactggatcataatcattcttgtcacccactctcatctttctgtttttgttttgtgttttactacccttccccttttactaagtagtcttagtagaagaaaatttgcattaagtttgtcgtactgtattgatatggctccaaatgtttcttagcccagggtcctccccattcactgataaaagctaactaaggtaaatcacaggtgtttattgtgcaagaatactgtgaaactattcatgtaataaaaagtttgtgttagaatttcactctctttaaatcctggacatcttctgtgagtgtatctgaaagcagccagacatcttcagtatttaagaaaccctttactattctgtgtgctaggcactgtgttagctttggaattcaactgtgaatactctagccagacttcttgtctaaatagtccagaataggggttgctaaactttctttctttttttttgagatggagttccactcttattgcccaggctggagtgcactggtgtgtctctgctgactgcaacctctgcctcccaggttcaagcagttctcctgcctcagcctcccaagtagctgggattacaggcgcccaccactacactcagttaatttttgtatttttagtagagacagggttgtgctgtttgccaggttgatctcaaactcctgacctttggtgatccacccgcctcggcctcccaaagtgttgggattcagggtgtgccactgtgcccggcctgctaaactttcttaaatggctagatgataaatattttaggcttgagggccatcaggtttctgttacaactagttggctgtgctgccactgaagatacaagaatggcgtgactatgttccaataacattttaatttcaaaacaggccagctggctgcatttggtctgcaagtaaagtctgcctgaccccctacctagtccagaggacaacgggagagaaaagggattcaaagataaaaataatttagctggaatatatttctttaaataaacttattatacttagtaaaaagtcttaaattaacgtttttacttgaattaaatagtggtaaaacaggctgggcacagtggctcatgcctgtaatcttagaactttgggaggtcgaggcaggcagattgcttaagcccaggagttcgagaccagcctgggcaacatagtgagtccctatctctaaaaaaaatacaaaataataataataatggtagaacaaagtcaattttttattgaaacttggcattttattggcatattacaaagtagcattactagactagcctgaacattacagtaatattctgtccttaatgccttttgtgtcactgtaatatgagctttctgtttgttttggaatatgttttcagcctgaatattattctaaaaatacaatttactatcattcataatatatcaaatgactcacgtagctgcaaggcagtgaattaaacagaattagatcattttaaaaataatgataagagctgatgatgtaaagtgaaggtctgtatttaatttgggagggaaaagactttttttgtatattcaaagagatggagtttgacatcccttcacaacctgttacaggttgaacttgcccctgtttttttaactgatcaaaaagttccttctcttgtgtttctttttttcttctcttttctcttcttttcttttcttttttttttttctgagacagagtcttgctctgtctcccaggctggagtgcagtggtgcgatcttgactctctgcaacctccgcctcccgggttcaagtgattttcctgcctcagcctcctgagtagctgcgactacaggtgcatgccaccacgcctggctaatttttagtatttttagtagagacggggtttcaccatgttagctaggatggtctcaatctccaaatcttgtgatctgcatgcctcggcttcccaaagtgctggtctcctgtgtttttgtcagcattccacagatgctataaagttagtggtggtatcgcatgcaatttgtacgcttaatgtttggccatttgcagtgggcaaactggctatgtcgggagctggtgagatgctgcttgtggggagttgtttcctattactctgatttatctttgtttaaataagagttcctttgttcactgtttcctccacacagaacagaggatttatatcttagtgttcattctcaactttcctgttttcaaagaggaaaacatttgcttcactttgctcatttcttctccagtgcacccagaggattttgaaggcttatgccaacaattctttggggcagttggagtgtaaccattgctaaatagcagttcagtacttaatgacattcattttagtttaacaaatcattgtgagtgttgccattttttattagggaaaacatctctttcatctttcccaaatactcaacatgagtcctatggtgagagtgaaaaagggttgtattctttttttgcatcatcttaccccatctgctattttgtccctcttctatatatcactgaaatttggttctgatattctattaggcagtgtacattgcagagattatgaataactggccgaattctgaatgcaggcatgatttgttcagctcagagtgttaaatttctgtgttagctgctaacctttaaaagtcaattgatttcctttttttttttcccctctgtataatctagccagcgaatgctcagtagcttttctgtaaatagtgatgatttttcttccccaggctaaagacctaatagtcacaccagctaccattttaaaggaaaaaccagaccccaataatctggtttttggaactgtgttcacggatcatatgctgacggtggagtggtcctcagagtttggatgggagaaacctcatatcaagcctcttcagaacctgtcattgcaccctggctcatcagctttgcactatgcagtggaagtaagtacatgggaattaaagagagtgacatgcttgcacttcactgtgggtactaagtagcttctcctgctaaaatagctcttgggcagtatgggctttatcatatttaccagaggaagccgaaaatgtctttaaaagttttcctatagacagttggattgaagataaatcttagcagctaatttttcagataatcttgcattttctgtgacgtcaataaaaaaattatttaaagcaaatagaaaggacagctggtgggaaaattggcaattaaaaagccagcactgttgataatttaataagtcacctttcttcttagatcttctaataattgagaaagggtcattgagaacaatattatgatttgattttaatgctaactccacatttttatgaccagtaataatgtctagttatgcatgttaagggacatgtaattaaatgtcctccttcagccatgagttgaaataattttaagcataaaatgtttaaagaattctttctctggtccttttcagggtgcacaattaaccagatgcacagtatacttcccattgtcttgattctcattgtattttacttttgaatgatttggacatctttcccagaataataggggtgctggaaataataatagtcttcctattaagtgctaaaatatggtaatagtaaaatattaatagattaatgataaaataacaacttttgtttactgaattcctgcaatacgttctgtattatgttccatatatgaatcatctcatttaattaccttaagtgagaaggcatgtgattaagcattcaggctttgaagtcagacatcctgggctcaaattcggtctcatttgctccataggaacctttatgacttgaggaatttaatcatttgtgctttaatttctttatctataaaattggggtagttataatatctatcttacagtgatctcataagtataaaataaagtaatttatctaagcatatagagtcatatctggtgcatagcgagagcccagttgttagcaataataattaactcttgaagcagtggtctcatccattataaaaggaggctcagaagagttgtttcttgactaatattacacagcagtaagggtggagctaaggttccaatgagaagcttctttctgttatatagcccctacatgtatacaccaaaattactaggatgcttttgcaattaactccttcaaaattataaattcatataattttggaaagatattcactgtccatatgtatccacaaaatgttgaatttaggaatctaagtttctgttcccagctcttcctgttatgtcaatttgaatgagttctttcattatttgccacaagccctcaccatgtcataaggtataataaagaacaggtgaaatgaagtgcttttatttatttatttatttttcagacagattcttgctctgtcacccaggctggagtgcagtggcacgatcgtggctcactgcagcctcaaactcctgggctcaagcaatcctcgtacctcagcctcctgagtagctgggaccacagacacatgtcaccatgtctggctaatttttacatattttgttgagactgggttttgccatgttgcccaggctggtctcaaactcctgggctcaagcaatcctcttgccttggcttcttcaagtgctgggatgacagccatgagccactgctcctggctatgtgcttttaaatttgaaaggaataatatgcccaagcccaggtcactggttctcaaacttaatgtgcatcagaatcagctggctacatctccagagtttctcatttctaacaagtgtccagatcatgttaattttgtcgctccagggaccacattttgggaattgctggcctatgggaagtaaatgagaaatgatttaatgtcatttttggaagttaaaaaagattttggtggtcactggtttttgaaaactctttgaaggctgggtggggtggttcacatctgtaatttcagcagtttcggggagatggggttcttgggaaatgagccctccacccatgggatctgatgctatttccacgtagataatgtcagagtcgttcaaaccagagtgactccatcctgaataggggctgggtaaaataaggctgagacctactgggctgcaacatgatgagaccctgactctattgaaacaaaacaaaacaaaacaaaacaaaacaaaacaaaaaacggccaggcgaggtggctcacgcctgtaataccagcactttgggaggccaaggcgggcggatcacgaggtcaggagatcgagaccatcctggctaacacggtgaaaccccatctctactaaaaatagaaaaaaaaaaaaaattagccgggcgtggtggcaggcgcctgtagtccaagctacttaggaggctgaggcaggaaaatgacgtgaacccaggaggcggagtttgcagtgagccgagatcacgccgctgcactccacactgggtgacagagcaagactccatctcaaaaaaaaaaaacaaaaacctctttggccatctatttagatgagttggaatgctactttgattggttttgccaatttagatttttgtaattagggtagtttaaaaaaactctcaaattactgttatcctttgttaaaaaccaaaatcttttattattagtcttctgcttacaatataagtaaaataaatgttttgtattaataactggattgtatattgcatggttaccactatgtaacaaaattaatagcttaaaattacaagcgtcattttaaaattatttttcatgtttctggggttgactaggatggctaagtggtttttgcttggggtccgtcacacggttgctgtcagtggctggggttagagtcagctcacaggcttcctaactcatatggtgctggagggagtgtctcttagcatgctaatgcttcataatttgtgtataatgaacagtgaggatgaccagaggtcactttcattgccatctgggctgcaaaactcaaggagttgaaggctcttccggcattacttgttctccatgtggtctcctcaggatggcagtcacagagtaggcagccttcttatgtgctgacctagggcccaaaatctgtatgtgtcagttgactgagcccagatggaagctctattgctgtttacgccctagcctcaaaactactctttcaagaaaaattctccaaccgagtttttcctctactctcacaccaccacaacaatagtcaacataggagacttctatgatcaaaggtgtagggatttctccccaccaccaagcagtgaaccccagctgggtgtcctccaattcaattctcacactgttattacgggaaaggtgtcccaatccagtccccaagaggttcttggatgttgcacaagaaagaatttggggagagtccacaaagtaaaataaaatttattaagaaagtaaaggaaaaaaagaatggctactccgtagacagaggagctccgagggctgctggttggctattttaatggttatttcttgatcatttgctaaagaaggggtagattattcataaattttccagaaaagggatgggcaattcctggaactgagggttcctcccctttttagaccttgtaggttaacttcccaccattgccatggcctctgtaaattgtcgtgacactggtaggagtgtctgttagcatgctaatgcattataattagcttataatgagcagcgaggacggccagacatccctttcattgccatatgggatttggcaggttttggctggcttctttaccacatcttgttttatcagtggggtctttgtaacctgtatgttgtgccgacctcctatctcatcctgtgacctagaatactaacctcctgagaatgcagcccagtaggtttcagccttattttacccagcccctaatcaggatggagtcgctctggtccaaacacctctgacattatccacctggaaatagtgtcagatcccatgggttaagggctcattccccaagaccctaaccaccctcacctggcccagacacaagtcacaagtcctgtcctctggaatgtctgactgagaggcatcaagttggagttcccatgaccccctcttctggtttgattaatttactggagcagctcacaaaactcagggaaacacttaggtttagtggtttattataaaggatactgcaaagtgtatagatgaagcgatgtgtagggtgaggtatcgggggatggagtgcagggcttccatgccctcccggggtgtgccaccctttaggaaccttcatgtgttctgctatccggaagctcactgaactcattcttttgggtttttatggaagcttcacgtcaatattccttcccctggggtatgaggcaggaccttcaccggagagggtcttttattttatttcattatttttaaaatataagatggggtcttgctatgtagcctagggtggtattgaattcctgggcccaagtaagcctcccgcctctgcctccgaaagtgctgggactacaggcatgagccacccagcccctttggagaggatcttaagactcacagttagaaaggagggcaggagaaggtcagagagattctgcttcctgcccctgaggcctaacacacccagcattataacaaaagactgtaacaagggctatgggagttaccagccaggaactgtaaatcacacagtattatttctgccttactcttatcagtcttgatggttacaaaggcctgtccaagttcaaaaggaggaaaaaagcactccacttcttgatgaggaaggtcagggttctggaagagcatgggggactggaaatattgttcggccatttcatggaaaatacagtctgtaatagacatcagtgataaatggggagatatggtggatgtattgttttcctctgagtgccaaattgggttctaagatttcacaggccagatattattgaagtggctacgttgtctggggtatataccttggggttcgtcattttgtgccaggaaaatttaggacaaggactcacacgaggagtttaggagtggaggtttaataggcagaagagaaacagaaacagttctttctgtagggagagagggatcttcgagggaaaagaccatccagcagcagatgagctggattttatagtcaggtttgaggaggaagtgtctgatttacttagggctaacaggttggtttgatcaggtatgacgtttacatagcacaccgggaagtctggttgccccaccctaatccttttatgcaaatggactttcctagttgattggagctatcttgtctgctccttactgtacaggtggctgacaaagagaagggaagatggagccgccatcttgaacatgattgacgcagctgtggatatctatgtctgcagcttgattttacaggctgctcttctttagaaaggggctgcttttcattaaaacaaaaaccttactgaggactcttgtaccctcactatctgcaggtgatttcttaactcctgtatcattattatagtgtcataggaatctaggaagtgtgattgccttctggagagaacttcagggtccctggattttctcactaatcatattcatttcattccctgtttacctgtttaataaatgttgagtggctactatgtgcccagggctgtgcaaggtgcctggaataggacggcaagcaaaccaaccatgaccttgctctcaaagaattgttttctttctttcttttttttctgagacaaggtcttgctctgtcgcccaggctggagtgcagtggcctgatctcagctcactgcaacttccacctcctggcttcaacagattctcctccctcagcctcccaggtagctgggattataggtgcccaccaccatgcccggctaatttttgtatttttagtagagacagggtttcatcatgttggccaggctagtctcaaactcctgacctcaagtgatccgcctgcctcagtgccgagattacaggcatgagccactgcacctggcctgttttctgtcttttttttttaacccccacatggaaagttaggcagggatttaatttcaaagagtttcttcccaaatattgtggtgaaacatctagtccatttatgtttcaggctttttcatagatattactgtttctcttagactgacagacttaggacatcacatgattgaatgtcaacctgacttttaagttcaataatagtttcattttttaaatgcaaaattaaataggagtaatatccttgaacatgtttctccttcactcatcggacctattgagtctagaatccattttattttgagagctccaactacatgtggtttctgttaatatctgaaagtaatttttaatatctgaaagtttcaaatagtgataatatttgaaggtttcaaatagtggaggagagacgcaaactgcgagtagggaacgcggattgaaggaaatgaaaagttgataataggcacttcattttcagattataacaaatatttagtgaaataaagcataattttaaaaaatggataagacatgtatgtactatttaatgtgtactaataaatgaatgctcatatttgccatccagataaagaaatagaacagttgaacatcacagaagccctcgcgtgtcccattcagatcacaaactctatctttctactggtaaccattattcttacttttgtgataacctttctttgctttcctttatggagtgtgtagattcttaacactatagttttgcctctttttgaacttcatgtaaatgaaaaaatgtatatattttgtgtttgtgtgcatgtgtgtgtgtgtgcttgcacacgtgtgaataccccttattgtttgagcttagtattatgtaagatctaaccaggaaggaccaacctaacatttgtggggcctgggacctaagtatagacagagatgacatggtccactccatatctgttcccatcccagttctgccctgtgctacaaggggtcttccagacactgcataggtacccataccacctgcaggcagatgacctttgcctgtcctttggagttaggcctgggtaccctactagtggtgtctgctcttgggatgataaacccgaggggcttatcagctttatatatatatatatatatatatttttttttttttttttttttttttttttagctagcatctctctcgttcttccaggctggagagcagtggtgtgatcttggctcactgtaatctccacctcctgggttcaagcgattctcctgcctcagcctcccaagtagctgagattacaggcacgtgccactatgcctggctaatttttgtatttttagtagagactgggtttcaccatgttggcatgtgagccactatgcccggcctcttttttttttttttttaagagacagggtcttactatgttgcccaggctggtgttgaactcctggcctcaatagatcctctgtccttggtctcccaaagtgctggctcagtcattatgttctttactgccatccattgcagtataaaaagaataacagttttccctcagaatattcttggtgaaacagtaacaattattaattttattaaatcttggctcttgagcaaatgtcattttaatattctgtgtgataaaatagcaatgtcacataaagtgcttttacatacttaagtactatggttgtctgaagaaaaaggagttgtgtgattgtcttgagtttgtaagtggaactacttttttcatcgagcaccgtttttacttgaaataacaaagtatgaatatgaatgcagatttggccatttggcagatttttatttatttatttgagacaaggtcttgctgtgtcacccagactggggtgcagctcactgcagcctttacctcctgggctcaagtgatcctcctgcctcagcctccttagttgctgggaccacaggtgtgcagcaccatgctcagctaatttttaaattttttgtggagacaaggtctgaccatgttgcccaggctggtctcgaactcctgggctccagcaatcctctcgcttcagcttctcaaagtgctggaattacaggcgtgagccacggttcccagctcgccttttcatatgtttattgggttgctaaatatgttcttatttgaagtgcccacttgttcaagttttttgttcacttttttattgctgtctttataattttttgatgacaagaaatatgtttaaattaaaggcagttttgtcaatctgccttatgtttggaatttgttgtgtctttaaagactcttttcctgcccttatattataaagatatcttatagtattgatattgtcattcacagttaggtctttaatcctagaagttgatttttgtatgaagtaagggcccaatttatttttttccacctatgtatacccagttttcccagcaccatttaaacgggcggtactttcccctctgatatgtcatgatgacacctttgtcatgtacacatgagtttgcttctggatctctatttgtgttcagttgttttacttgtctgcataaatgccacagtcttggtttctcagtcattataatgagccttgcctgctaggaagggtccttctactttgttctccaagagtgccttggatattcttggtcattttctttccatataatttttagatttggtttatcaagtcgataaacttttgtcatgcagttttttaaaagaaaataaagtgccctaatgtgattttttttaatttggattacattgaatacataaatcagtttggggaaaatcaacatctttataatattgaggctttttatccatgagcatgaaattgctttctacattaataacttggtaaagttttatattttccttatggatctttcacttcttttgttagatttttctccacctaagtactgtatcttttaattctactgtaaatagtgtttttattttttaactgctgctattacataggaatataattttgcatctggccagcttgcctaaacagatgatttcaaaatattatctgtcagattttctgtgttctctatctctgtaatcatatcatctatgttttatgatctatgacagttatattttttcatctccaagctgatattttaaatttcattattcttgctttatactggttgtacatattcagttagagtgattgcagtaggcaatttgcgatgttcccaatttgataaggaaagcttttacattttaccattaagtataacgtttgcgagcttattatagctatcctttgtcacttagggaagttatctttgttttttagttatctaggaaactaaaaaatcagaaaagttagtttgattttatcagatacatctgctacatctaatgagatgatcatatagtttttttcctcccataaactgtgaatataatgaatcacattaattgatttttttaaatgttaaaccaatctccatttctgggataaattcaacttagtcatgttgtattagccttttgtatatcttatatctataatactgaatgagattatcatactctttacatgtatttgaagccatgtcattaagtgcatacaatttttattaaatttttaattgacaaataattgtatttatttatggggtacgatgtagtgttttgatatatgtttacattgtagagtgactaaatcaagctaattagcatactcatcactgaacatatttatcatttcttgtggtgagaacatttgaaatttaatctcttagcaattttgaaatatatgatacattattattaactacagtcaccatgctgtgcgataggtctcaaaaacttattcctcctaattgaaattttgttccctttgaccaacatcttccaattccccaacccctagcctcctctggtaaccaccattctactctctacttccattagtttgactttttcagtccacatatgagtgaaatcgtgcagtatttgtctttctgtacttgtcttgtttcacttagcataatgtccaacaggttccccatgtcattgtaaatgatggaattttcttttttatagctaaataacattccatcatgtatacataccacattttctttatcgattcatctgttgatggacagttaggttgcttctgtatcctggctattgtgaataatgctacaataaacatgagagcacagatacctcatgctgatttcaattcctttggataagggtccccaaaccccaggctatggaacagcagtggtatgtgtggcctgttaggtactggatcgcactgtaggaggtgagcagctgcgagtgagcattaccacctgagctccatctcatctcagatcagtggcagcattaggttctcataggagtgtgaaccctattgtgaactgtgcattgcaggaatctaggtggtgcactttttatgagaatctaatgcttgatgatctgaggtagaatgattgcactctgcaagactccccacgctcatccctgtggaaaaattatcttccacaaaactggtccctggtgccaaaaaggttggggactgctgcttttggatatatacccagaagtgggattgctgaagcatatggtagttttattttaattttaatttaatttagtttaattaatttatttttagcacctaggctggaatgcagcagtgcaatcatagctcactgcagcttccaattcctgacctcaagccatcctcccaactcagcctcccaaatttctggaactacaggaatgagccatctcactcagccctatttttagtgttgggaagaatctcaaaaagtaatgactgtactaatttacaccgctaccctcagtatacaagggttccatatcctcactaatacttatcttttatctttttgatagtagccattctaagtatgtatagttttaaaattatgaagtttaaattgaaccttaggaagttgctactctgtcaccaggctggagtgcagcagcgtgatcttggttcaccacaatctccgcctcctgggtttaagcaattctcctggctcagcctcccaagtagctgggactacaggcacatgctaccatgcctggctcatttttatatttttggtagagatgggtttcaccatgttgtccaggctggtctcgaactcctgacctcaagtgatccaacagccttggcctcccaacgtgttgggattacagacgtgagccatcacacccagccttgaagttgccttttttatcttcagtagtgcttcttggcttaaattcttttgttttataaatagtaatggaagcttgccagttttattttagaaagtatttgcaggccaggtgcagtggctcatgcctgtaatcccagcactttgggaggccgaggcaggcacatcacttgagcccaggagttcgagaccagcctaggcaacatggcaaaacctcgtctctacaaaaaatacaaaaaattaacttgggcgtggtggtgcgcgcctgtagtcccagctactctggaggctgaggtgggaggattgcttgaacccagggggtagaggttgcagtgagccaagatcttgccactgaacttcattcagcctgggtgacagagaaaaacaactctgtctcaaaaaaaaaaaataaataataaaaaataaagtatttgcatgatatatctttttctgtctttttgattcagatattgtcagctgagtccaatctaacaaacttatattttaaccgaagctttagtactgttatatttaataaactaataatatatttgcacttaaatacaacatctaattttatgctttttaattatacatgatttgtatttctttttttcccatgtaagtttttagggtatacatctttaaaggccttacttttcattatcgttcagtttaacttattttctaatttccatttttcttctgtgacctatggtttagttagtggtggatttattttccaaaatatggatggtgtccagtcaaacttttggtattgatttctggcttatcttgtgtttggaaaatatgtgaattctacagctggtctgtgtaagagttctctgtatcagttagggaagtttgttcttcctgttgttcatatcttgcatatctttactaaggtttagcctgtttgttctataaattacttagagaagctgtgttaaattttctcactaaaattattgatttttgtctttctctgtatttatcagtatgtatctactgaagtcttttcaaatccctgatcagtggtttgttcgggacagcactttgattgagggaggtgacgtggcttaacatagtatggtcttgagctgcctggtttctgtgatttagggactgaaccagctctggtcacatctggattatctactatccagcattcaaatgaaccagattacatgaaaggatatgggggtactctttgggggccacggtgccacaaggcctttggtttcgatctccattgcctagggaattaacctgtgctgtgtgattctagatgttttcttcctgctcccttaaataacacctaaatgtgttattcagcagtgtggctcctgctaagcagaggagaactcggaattcctaccaaattctgataataaaataactttcctccacctcaaccattgtttttaccagtcctgtcaactgttagctttcctggatttaatgatctcaagttgaggtcaatgtcaacagctttatgggatgaataagatgaacgcccataggaaagtcagtctcttgaacacgggttgttttcttttggttaccctctaagattttttctctttgatctccagttatttgaaggattgaaggcatttcgaggagtagataataaaattcgactgtttcagccaaacctcaacatggatagaatgtatcgctctgctgtgagggcaactctgccggtatgtaagtgtaggagtttcttttgtgtttcttttaatgtaacgggtcacggtgttgaccaccaaataaataatttctgaatagttagataaatattcagtacaaaccatatgaacattaacattatttctgatctactttagttaggtaaaaatacaagaaaatggccgggcacggtggttcactcctataatcccagcactctgggagactgaggtgggtggatcacttgaaaccaggaattggagacaagcctggccaacatggtgaaacaccatctctgcaaaaaatacaaaaattagccgggtttggtggcacatgcctgtggtcccatcggtgtggctgaggcatgagaattgcttgaacctggcaggtggaggctgcagtgagccaagataatcacatcactgccctccagcctaagccgcaaagtgagactctgtaaaaaaaaaaaaacaaaaaacaaaaaacccaagaaaataatatcatttggcaattccacaattttttaaaatcagtgtctgtgggggattcatatgcaagtgagagatgaaagagtaaggaagaaaaatgtatctcaaactaaaataatatttgaagaccacatgaaattaatattgaaaatggaaaatatggtgtgcagcacaggtattttgcggatattttgcctaattgctttagatgctagcaagatatagtaacttaattattttgatattttatcttaagtaatgttttgagataaaaagatatcaaaatggtttctcatggccattgaatcgtggctgtcacaatgtttcttatggagcagaaatcattgtaagatgggttagattttttttttgagagagagtctcactctgtcacccaagctatagtgcagtggcacaatcttggctcactacaacctccacctccggggttcaagtgattcttgtgcctcagcctccttagtatctgggattacaagtgcacgcagccatgcccagcttaatttttttaaaaattatttttagtggagacatgatttcaccatgttagccaggctggacttgaacttctggcctcaagtgatctgcctgcctcagcctcccaaagttctgggattacaggcatgagccaccgtgcccagcttcagggatttagcccaacctatgcattcaggaagcctgaggacggctaaatccaagtgttcttcattcctctgcctatttttgtaacccgcatttcacccatctcctttggaggccataatatagtagcagaggggaaattaaggtaaattctttggactagggcatagtttcgctcttcttctcattacagctagatcactggggaaaagtctttaaaatggggctggaaggaaagggaagtaatatttgttagacatcaattttgctaccaaactgtgttatgtagtttcacattccttatctgtgtaatcacagcagtaaggcgttgctaagaagattatttgttgtacagtttattagtgcctttgtacagagaagaaaacttgagtccagagagattaaatgacttgtctgaagtcacaaagagcaaaaggacagggcaagaaattagatccaggtgtttttattcctggtcaagttctcttctcactgaattctgtctctagacagcaataccaggggctgaggcaggtgctacagggttcacctatatgattggcagtcccaatttctataacattactacattattattgctgttacaggtcaatatttaaatagacaaattctgacttcatgagctttactcagatgcttatgactgactcatttctaccttaggtgacccatcacatctctgaaagtatgtttctctactttgcaagtgagcagagactaaattattttatgaagtatcacccatctagtagatgtaatttttttttctttagaaataaagtgctctttgcttttgcccattttcctattgggttatctatctcttcattgactttggggatatccaaatatatataccagttaaaattctttgttgatcatgctaccaataacttcacccagtttgttgctttacatcttttgaagaacggaagtctttaagtttcaaatagtcacattttatccatttttttccttcatgatttgtgttttacatctcctacttaagaatcctttcctaccttaaggtcacagagatattttgtactttttaaataaagtcttagtattttgtcacatttaagtatatcatctaattagaattgattggggggtatggtaagatgtagggatctaatcttatctttcacatgtggatagctcgtcatcccatcacaatttttggggggaaaatcagaaaaaattgtttggttttattattactttaaaattttttttattggtaccataaattatacatatttatgaggtacactgatgttttcatgcatgcatataatgtgtaatgattaggacaaataagaaagaaataaataaaaattaggataattaggatatccatcacctcaaacatttcttatttttttgtgttgggattattaattttttaacagtttaaatgcttcagtgaggatcatttattattgccacattgtgagaaaattctgtcatttattatgtttttcattctttcaggtatttgacaaagaagagctcttagagtgtattcaacagcttgtgaaattggatcaagaatgggtcccatattcaacatctgctagtctgtatattcgtcctacattcattggaactgaggtgcaaactgactccttattttggggtactttgctgggcaagttattattgtttattgttgtttgaaacttctagcatatagtttgcagtagccccccagtagcatcattaatgacttcttccttctgattgtcaagattagaggtagcaaacattttctgtgaagcgccaatcagtaaatattttttggctttgtggccatatagtttctaataagaaattagatccctacctcttaccataccccaaaatcaattataattcgattatatacttaaatgtgacaaaatactaagacgtttattaagaaatacaaaatatctctgtgaccttaggtaggaaatgattttttttttttgaggtctctctctggttttttttttttgcccacgttgtcgcttaggctggggtgcagtgatgcaatcacggctgactgcagctttgacctcctgggctcaagtgatcctcctgcctcagcttcccaagtagctagtactacaggcatgtgctaccatgcctagctaatttttaaattttttgtagagatgatgtctcactctgttgtcctggctggtctcaaactcctggcctctagcaatcctcccaccttggcctcccaaagtcctgggattacaggcatgagccacttcacctgaccggagaggattcttaaactctgccattttagtactaaagcagccatagacagcacataaatgagtaaatgcagtgctgtttgccttgcccaattaagactagtcattattttctaagtttacaagtgcagtgcctcccattgtggcagtacttctctgaggtagaaatggttttaaaatttaggggagggagagctgctaattttcattttcatgaggtcttgggattacttggcatggagtgagaatggaggttccccttcccacatagaaaaatggtgaaaataaagttcacagtgggagttaaggaaggaaattgaagagctgggatggtaggtttaaataacatgaccttatgatttcctggtgggtcacagtctcttggttgggtgcccttgtgaataaaggcatggattgggcatgcctggaggggccaaggccttttgagcggacgagtatgtttatatgaagaccctgtcacctgtctctggtatctgctaggcagctgtggcttgagagtgtgatattgagggataattgatggaaggagattgaatgtggctggcaggtaaagagatagggaacatatggagatatttagaataagagagtgtgagatagagcgcttttgctatagcctagccattctgttctctactaagtgttgcggggttaccaggttttctactaggctgtatgaatgcaaaaggtagagagatatatagggccatggaataaataccgaagtgttttctttggtatccttgatacctttcgaaagccgtgtaaggatctagataatgaatttcgtgaattgcagtctctctgacaagttttaaagaataggaacaattttaaaaagtcatctacttccataagttttttgacattttaagataattgaatttttttttttcagcttttaagttccagggtacatgtgcaggtaggtgtgttatataggtaaatgtaagccatggtggtttgctgtacaaatcaacccatcacctaggtattaagcccagcatccattagctattcttcctgatgctcttcctcctcccgccccttccgacagaccctagtatgtgctgctccctgcatgtgcccatgtgttctcattgttcagctcccacttataagagaacatgcagtgtttggttttcttttaatattatttttaactttatgataggaaggagtactttttaaagttggttgaaacattgttactgatctcaaagcactaccttccagttattctgagatactttttcagtctaagatctgatactcctattcctggtttgttgagagtttttgtcatgaatggatgttggattttgtcaattgctttttttgaatctcttgacatgattatgtggttttgtactttattacattattaatgaatgaattatatcaatttatttttggatgttaaatcaaccttattttcctaagctaaatcctacttggtcattgtgaataatccatttttttatcttgctatattcagtttgctaatattttaagaatttttgtttcactgttcatgaaatatattgatctagttttcatttttcttttctttcttttttttttttttttttacatctccctcctcttcctcttgatctagttttctaatacagctgcactccaacttacgatggtcctacttaggagtttttgactgtatgatgtttgaaaacaatatgagtttagtagaaacttactttgagtacacataccattctgtttttttgcttttagtacagtattcaataaattatgtgagataaccaatactttattataaaataatacacttttagatgattctgccctaccataggctaatgtaattgttctgagcacatttaagataggataagctaagatacgatggatgtttggtaggttaggtatattaaatgcattttcaccttaaggatattttcaacttaggatgagtttattgagttgtaaccccatcacaagttgaggaacatctatgtatctaattccatgattcagtaaattctttagactgccaaaatcctgtaatctagagttagacaagatcttaaatcaggttttgtggtccatcttgtagtcatgatcattctcactattagggaattcttaactttttgcatttgaatcaccgaggtgttatttaaaatacacatatggaatccaagctccagagactctgagtagatctggtgagtgattgtgatgcctgcccacattcaagaaccttagtacaaaagccctgctgaatggttctctttcactatacactctatcaacttatgtacttgatcacactttggacctcaaaatcaataatttttaaaaatctacttcctaagttgtgaggtacgaattgaaggaaataatgaatactatttggggagtcaacattatttattaacgaataccatttggggagccgacattatttatatttggttggtatatttgtatcaactatcattttctaattaatggtataggcagaataaaccatcacttgtgattcagaaaggaacatgatacaaataacatccaataatgtatatggatttaaatagatctgccccctacagatgttacgcaattcatgttggtaatgatcattcattaggttttcgtggtggctacatttgatatgtgaagtactggctggaagactggtgccagtagcttcaggtttgctgggattctttcatcagagatgactagctttacttatctttttatgttgcatgtttctatgatgggcctatcctgtcattgtcttcatagtataattgcaagctcaactctgtcagttatgtgatttttttttttttttttggtcctgtcttgcttttggctgacttctatatgtttttatttcatgtccttttcatagttagattaactgggtcttatgtccaagagatattttgatttctttgaatgaataaatctatgttaggctactgtattaggttttatagacacctagttgatcacttgtgtccagtctctattccctggtatggtagttgctgtgtttatagaacattgaggattctacaatggacacattggtgttgggccccagcccagacccaaatcgaaatttctagagccaggatcagagactctgcattcaacaaactctccagagatttcataaccacttttaaaggactcaccatcccaaaccttgttaaggaatgaaatatatgtctgccagtaatttcagtgctttaagtcattgaaagctgaacttttaatggcaccaaagtggaaatatttatataattgaaagctaaacttcatcctaatggcagtgttgagttcacttccataggccctgatataacagtctaatattattgtttttcacataaaataagattcagtcactgccatataattagggagtggctctgctattggatggacttaaaatatttcattatgtttgccaagctctgtctctttacatgttttataattaactgatccttcatttttattttgttttattttatttttgagatagagtctcgcttggttgcccaggctggagtgcaatggtgcaatcttggctcattgcaacctctgcttcccaggttcaagtgattctcctgcctcagcctcctgattagcggggactacaggtgcgtgccaccatgcccagctaatttttgtacttttagtagagacggggtttcaccatgttggccaggctggtcccaaactcctgacctcaggtgttctgcccacctcggcctcccaaagtgctggattacaggcatgagccaccatgcccggcctccttcatttttaataatcttcatagatacatacttgttgtactaatgtttttgtgcagttcctcatgataaataattaaatcaattactaaaatccttatagatttatgatgataataaatggaagtgtgtattattgaaacatgtttaattaactgttcatatataaccagtgagtagggattggcaattaaaaataccaggctaccagtgcatggaaatttgaagaaaacaacaacctgaaattcagaatactccaaaatctgaaactttttgagcactgacatgactaaaaatgctcattggagcatttcagatttcattttttcagattagggatgctgaattggtaagcataatgcagattaatccaaaatctgaaaaaaatcctaaatcaaaaacagttttggtcagaagctttgtggataagggatagtccaagctttttggactgaagctttttggataaggtatagcctataatacataaatacataatacaggataatcactgacctgaatgtatagcatcagtatggtacacaaatatttaaatccatgtactttgttggatattatgttatataaacttcttgtaaaaagtttagagagtaaaatcattcacattaccaaaagatttctcatatttataaaaaggattatagcagcattttaatcagtatctcctaaagtatttatttatgggttgttaaatctaaaagagaaactacagtctggagggctctaaactactgctgattacatatcagttgggaattaagagaaaatctcagatcataatatttaaataaaaacatttacatgaatgatttctaagttttcactttactagacaagaaactaaaattatatgactgtcatgttcaatattggatacttaacaacactacatccaaggaagccaggttttgctgattttaacctcgtcctgttgagtaactccatgcaggtacagtggtacaaacacatgtggacacacagacccagacctttatttcctcggggattctggtaagtgtagaggtgtcttgaccatagtcaatagcagaaatatgcacaaccacaagctctgaaattccatttgattgttgctcttagccttccactttttaggcatatgtcagtcccatttcatcccacccactctctccatttgggaggtggtagagtgagacaatactgaactataccagggctgagaataagtgtctttgaaaagggtcgaatctgtgatgctagagacagccctggaaactgtcaggagttagcccaaccaggactgtgaccagatcccaggctgtccaccacagatttgcaggctacctgcagatgtgactttttcaaatgtactcaaagacaagctgactttggctaatgcagaaattaattaattcctctttttcagtaaactttatcctcctacacttagattgtctgtaagtacatctctggagttgagctcaactagaaagaagctgtctgcatttagttaataccagcattggatgcacacaatataatttgaataatgtagagcaacattttaatcatctctcataagcagtttccccatttgcaacttcctgggaaatcttacattatgaaatgttcattagaactcccattttaaaaccctgctgccattttgtgagtgggcagaagaaaggctggagatgagatttgtctgtctcaaatgattcactccttcatttctggttcactccacagggagcttaaggacatgtgcgtttcatagacatgcctttcttttccttttatcaccttgttaaatcttaagattgaacatacaattcagcctgtaatcatatcaattcccatgaaaaatattttccttattcactgcctctatttgtgcttatacatctgatcatctttttcctttactttacaattagtttctatgaacagaagaatctgaaagatttaaagactagttagcacagcagcaatttataaatcattaatttgggtactgtctatacatttaatgtgttctttttcatagtcctatgtgaaatacatatacatatatatatattccactgtttataaacaatattcagttttatttgcataactcaatatattttatattaacagctccgtttttagtgtcttaagacatcgagtctgtttttagagatacagtctatttgccttgattttagcctgttataatcagcttattattatctggccactcttaccagtgagtatcatcttgaggctgttcttgctcatttcaacttgtcacaggggatgttttttactctttggagtttaggtacaccaggttattaattatgctcctgattcatggtacttccatcatggggcatataaggtccctgtctttgttttattcccttctatcttcattcaccactctcatttcctctctctccactagaaatcattctcaggaatcaaattaatattattctggcttatatgtgtttttaaaaatctcatcgctttttatacatgtaattttaatttatgtaagagactttgtcctacagatttcattgtgtttcttctctttttcgcccagcactgtgtgttccatttctatccagtctactatgtgtacatcaagtccatcatttctaactgttgcatagttcatgatgcgaggcatcttccacattgtatcccaattccctaactggaatcccagttccctgctacctcacacaatgctccagtgaacagctggaaaatcatacaacccaaggaattattgaaagtgattatatcccagcaaaaggcccaggcccatcttacacttccaccccaagaaggtactgctacttttcgggaatggcctggtctccttggcgaaattggcatttgatctgttctcatcactgtcgtctggcatcagaagtgaccccacttgtcaggcactgtactcagtgctttccatgcactaactctgataacaatcttttttttttctttttttgagacagagtcttgctctgttgcccaggctggagtgcagttgtgtgatctcagctcactgcaacctccacctcccaaattcaagcgattctcctgcctcagcctccccagtagctgggactacaggcgtgcaccactacacctggctaatttttgtatttttagtagagatggggtttcaccatgttggccaggctggtcttgaaatcctgacctcaggtgatccacttgacctcccaaagtgctggaattgcaggcaagagccactgagcttggcctgataacaatcttgtgagcaggtgcttatgcagtattttagggatgtgaaagtaaggtccaaagcggtgaaataagagcctgtattctcttaacctccatcccgcaacatcttttatgtgtcagtccctgcactaagtctagggatactgtgctgagcaaaaactatcttcttgctttcacagagctcagtgtctggcagggggtcagactttcataatataaacccactaaatgagtgcatattgatggcggtcactgctgtgaagaagtgggaatggttagcatggaaacatagccccaatgggggcaactaagttctttcccatctcattctactatgtctactttcatctctacttttttcttttctgagctatcagctttcttgctctcaactatatttgatgtatttaaccagattttatatattgtattatgtattttataacatgtatatatatcatataacatacacatatacatacatacacacagccaattaagtctcaagttcaattacaatgcttctaagtttaggactattcattttcattttggcagagaaattatctggtaaaaaattcaagtagaaccaaaggtatacaatagatgggaagtttccttttcactctcacactctcatttccatccagggttctacaattcatctccttccaagcaattcctattgccagcttttcttataccctttcagaaatacacacacacacacacacacatatatacacacacacacacacacccttacatgtgtttgtacattatctctctttttacaaaattggcagtgattctttgtcctgtttctgccactactcaaaaattttaaaacaaattacacacctataaacatacaatttaaagaaaagagtgaaagtgaaaatctaaggacccagcacatggttaagatgagagcatgatgggttcaatggaaagcctttgtgtacctttctcctttgcctccgttccctctccaatagagtcaaccacgttggaggttatagcacttccttctttatgtccccccatctcccatctggtatggtattctcttttactgcagatggacattttggcagacatatgtagttgcttctctttggtatttacctaggagttgaagtgctgggtcacagggtgtatgtatatttcactttagtagatactgctgttgtaggactttctccttagtttagctaaagatggggtccttgtcccaaggccatgaaaaattaggctcgcagacaatttgaaaggtgagaataatggaacttattgggaaaaaagggaaacagggactccccacaaagccagggtcctgctagcatgcttcctgccttgcagattgaatcccaggtaccacccaggaagaggaggggccaggctcctccccactgtgaatggtgtgaccgtctgtggctccccagtgtgcactcctcccagtgtgcaggccggttggagtttctctggggtcttcttcccacttggctgtctcactgccaaactcccaaagtgcttataccagtttactctcccatcagtggtgtatgtatttgcttcatttctttgccaatactgatactgtcttattaactttcctcattctaatgtatacagtcttgtgttatttgtggtttaatttccctgagaaccaattatgttgagtaccttttcataggtttaccagctacagaagtcctcttgtgaagtgcctttgcaagtcttttgtctttttaattttttgcatctttgtatattctaggtataaatcctttgatacatatatcacaaataacttcctagtctatggcaaatcctatgttggataaacgtactgcaaatagtttcccagtctgtggctagcttctgtgtctgtgtcttgctttgtcactttcttactgatatcttttgatgaacagaagtacttagttttaaagtagttaaagttttctttatgttttatactttttatgcattttaaagaaattttttgttactccaaggtcatacaggttaaataaattcttactccaagaacattcttttaaagttttgctttttttcatttaaatgaaatccatatgaaagtgaactttgttatcaagtaacatatacaatttcttttatttttctgcacggagaccaagttgtcccatcaccatttattgagtggtctatcctttcctcactgattacagtgccagttttgatatgtcatgtttccatagatgaagaatattttggggctctctatctgtaccttcctttttaaaaaatataaatagtggtgatactatgaacaattttgtttgtattattgttttttgcacttaaaatttgtcttggagatcttttcattttggcacatacggatacacccctatttttttttccattttcctagatgtggggtatccattggacatatgtaccgtactgaatttaatatagaatgtcataaattacaagatgtaacattattttatacactgagatggagaatcaaactgcaacgcagtacttccctgatcatcctgagtgattcatgagttagttatactagcctcttatttctttgaggtgtacgttttctgagggaatctgccatttctcctgccatgagttgcattgcttggctcgtgataggcatttttatttttgcatgtaattttgtaacaaatgctaacactgctttatcttctttttgtttttgtttattgagacggagtcttgctctgtttcccaggctggagtgcagtggtgcaatctcggctcactgcaacctctgtctcccaggttcaagcgattctcctgcctcagcctcctgagtagctgggattacaggcatgtgccaccatgctcggctactttttgtattttttgtagagatggggtttcaccatgttggtcaggcttgtcttgaactcctgacctcaggtgatctgccccactcagcctcccaaagtgctgggattacaggtgtgagccaccagccagctttatctttttaaaggtttcttcctattgtgggtttcattagagggcttggttgttgctttgcaagaaaacattgacttgcttttgtttaatagtcttataaatatttgtttcactaacatcaaatacatgccatgctcctgcttttgtgcttttctgtgcagtaacttttcttctcagtgctaaatcataagtttttaaagacatttaacatggcacactcaacatgtgtcaccaatgcccatagccactggaagtatcatcagtgtcaacagctatgacgtttggcaatgacagctttgccataactgctgcttagccaataacaattgtggaatgctgagtccagatctcaaacatgttaaaggtaaaaaaaaaaaaaaaaaaagatattttcgagtctgtaaaacatggtagcgtatccggaattggtgggttcttggtctcactgacttcaagaatgaagccatggaccctcgcggtaagtgttacagttcttaaaggtgtcgtgtctggagtttgttccttctgatgttcagatgtgttcggagtttcttccttctggtaggttcgtggtctcgttggctcaggagtgaagctgcggacctttgcggtgagtgttgcagctcttaaggcggcatgtctggagttgttcgttccttgcggtgggttcgtggtctcgctggcttcaggagtgaagctgcagaccttcccagtgagtgttacagctcataaaggcagtgtggacccaaagagtgagcagcagcaagatttactgcaaagagcgagagaacaaagcttccacagtatggaaggggaccccagcaggttgccactgctggctcaggcagcctgcttttattctcttatctggccccacccacatcctgctgattggtccattttacagagagctgattggtctgttttgtcagggtgctgattggtgcatttacaatccctgagctagacacaaaagttctccacctccccactggattagctagataaagagtgttgattgatgtatttacaaaccctgagctagacacagagtgctgactggtgcatttacaaaccttgagctagatacagagcgccgattggtgtatttacaatctcttagccagacgtaaagattctccaagtccccactagactcaggagcccagctggcttcacccagtgtatcttgcaccagggctgcaggtggagctgcctgccagtcccgcgccgtgcacccgcactcctcagccctcgggctgttgatgggaccaggcactgtggagtgggggtggcactcgtcagggagactcaggccgcacaggatcccacagcggtggcggggggcgggaggctcaggcatggcaggctgcaggtcccgagccctgccctgcagggaggcagctaaggcctggcgagaaatctggcccggcgagaaatctagcgcggcgccggtgggccagcactgctgggggacccggtgcaccctccgcagctgctggcctgggtgctaagcccctcactgcccggggctggcagggccagccggtcgctccgaatgcggggcctgccaagcccactcccacccggaactccagctggcccacaagcaccatgcgcagcccgggttcccgcccatgcctctccctccacacctccctgcaagctgagggagccagctccggccttggccagcccagagaatggctcccacagtgcagcggcaggctgaagggctcctcaagcgcggtcagaatgggcgccgaggccgaggaggcaccgagagcgagtgagggctgggagggctgccagcactgtcatctctcagtagcataatttatataaccagtctcttgttgattaaccattatattattgatacaacaaatataagaactgttactagtaaattgagtaaagcaggaaaattaaatttggtctcttactgatcaaccattattagattgttgataacaacggttataatgttgatcaaccgttatattgttgatacaattatatttgatgtatttaaccagattttatatattatattctatattttataacatgtatatgtatcatataacatacacatatacatacacacacacagccaatataatttcactctcagtttcttgttaatcaactattatattgttgatacaacaaatataagaactgttactagtaaattgaataaagcaggaaaattacatttgggagccttaaagatgtaggttttcttcaagaaatttatgttatagttatatcccctgttgcatgtgaagacatacattcaaggatacttactgcagctcacacaatttgctgataggttggatgtgggtgtgagagaagagatgctgttttccttttgggcgatggcaactggatagtaatcagttactaagatggagaagaatgagaaagaagtctttttttgtttgtttgttggagtgatatgggtagaataaagagttaaaacagtcatgcatgtaggtactatagatgtgaaagtctattattcaggggagagtttggaatttaagggatagattcttgtctttaagcataaaaatgcctttgaaggtgagaaactagattacatctttaaggggagaactgtagatagagatgaaaagaaggcaaggactaacccctggggcaggtcagcatttagaagaaagggagtttgtaaaatgctaagctgtctgagaagtagcagcctgcaaggtagaaagaaaaacaagagaggtttagtggactggaaaccaagtgaacctggaaaccacaagcagctgtggcaaatcctgccacagtgagatgaggcctgagaactgagtattggatttgtcaatgtggaaggccttggtgatcttgataagcatgtgttagtagggtggtggggttgcagtgtttgggatttgagagagaatgagagaatgggtagctgtgatgctgaatatgtata[450 bp omitted]gcctagtcaactgagccaaactggatataaccacaaggtcaaaggcaggagccagtgaggagatcttggttttgaggtcattcctggtgcgataataaccatcctgtagcattttcttgtcacttagagaaggcattagcaaactttttttgtaatggtcttaatagtaaatatttttgactttgtaggctatatagctactcacctctgcttttatagtacaaaagcagccatagacaattcataaataaatgaacatgttccaataaaagcaataaaaacaggcagcagtctgaagtttgtcgactcctgatttggaatcattccagaaagtgaaataaaagcatggcttcttttttttttttgagacaaggtcctgctctgtcacccaggctggagtacagtggtgtcatcatagctcactacagctttgacctgctgggctcaagtaatcctcccacctcagcctcctgagtgtctaggattacaggcatgtgacatcacacctggctgatttttaaattttttgtattgatggggtcttgctatgttgccaaggctcacctcaaactcctggtctcaagtgattctcctgccccaggattcccaaagtgctggaattaaaggtgggggccactgtgcccagccaaagcatggcctttctaagggtgactcactgtagcacctcctgagtactttcctatcaagtatcctggaccactttttaaataattcattctaaaatccatatttaggattgattccaaatttgccaacctgtatttcccaaataactggcatgataattcttgtctttttcccaaatgctcattttccactcttcaaacgttgagtgttgactgaagttctgtggtcatgtttacagtcatttttatgctctttgtattgtacatatggaatgtatttaccatttctgttagcaatgatttcttgcaaaaacaataacacttgctagttttgcgtgcttaaaaatatcgagccctggcgctctctacatattatctaatgtaatccttatattaaccctgtgagtagtcattatcacttcttttacacaggaggaagttagagaagagtgttaagtgttcttttagtcttttccactttgtctttagttttctcttagctgttcttttaaattctaaggtcattcttatctaaaaacttaaaagagttgatcagcctttttatcaagtgttaaatttataccatcttttttctttgaacagggctggcaaataaacctggatttatcccttagccctgttacagcaagtctcagaaaatttggacttcagcttccccagtgatacattttcaaatgcctatgtatggattgcctattagtttattggctagaactaaaggaaatcaggcaagagacaaaggacattttctctagggtgtcagtcaatgcaaaatgttaggactagcatcagatttttttttttttacaaatgaaaataattgaagtgtggtagaagttcctctagttctggcagtcctaaatattgttaactgaagaatgatggggctcataaatttggaaaggagagagaggggaaaagagaacgggaatttatgctgagcagggtggctaagtatatatattcaacaggctataggaggagctattagtattcacgaaggggtggcacacacatacatagtaggctaacgtgtatgcagcatgcatcacaagtcactttggggtggagccttaacatttaatgtattacagttagggcctatacatcaaaaggtgaagcagaggacacgaaagccctctgtgttcagcctctgtagactggccagaaccactctgtggtcagaggtctcttatcaggaaagaattcttgttgttgtgttgaaactgcaaaagggaggggcagtgtcaggcaggtggttgataccagtctttcagaagcactggtttctgtttaacttttagagaagaaagcttaattggagtgttactggaaagggataccagtctagaccacaagagaggattcttggatctcacacaagaaagaattcagggtgagtccacagagtaagatcaaatcaagtttattagagaagtagagaaagaaaagaatggctgctccataagcagagcagcactgaaggcttctggttggctatttttatggttatttcttgattatatgctaagcaaggggtggattattcatgagttttcctggaaaggggtggggaattcccagaactgagggtttctctttcttttagaccatatagggtaagttctggatgttgccatggcatttgtaaactgccatggcactggtgggaatgtcttttagcatgctaatgcattataaatagcctaagataagctgtgaggatgaccagaggtcaatttcctcaccatcttagttttggctggcttctttactgcttcctgttttttcagtgggttctttgtgacctgtatctgtcttgtaatgtcctatctcatcctgtaactaagaatgcctgacctcttaggaatggagcacaggtggtctcagctcattttatctatcccctattcaagatggagttgctctggtttaaatagttctgacatattttccccaatacccccaaagggacccttaatcccaaaatttgcagacagatgaagatccatcttctgtagcttcttctggctgaatacaggtgatgatatttttgcgtaactattcagggtagagaggagctcagtgagaaagcatcagtatggtgaaggccattcctaactcccgagttctcacaaaaggtgatatctggaagattaataagtgttcaatttaagaaaacgttgagtagtcttatcctgcattgctacacaaagagtaccacagcaatatattctacaacagtaaagcaaaataagtataattatcccaactaaactaaataataagcctttccatgaactaggcagttgttggaaccaagcttatatggggttgctagccaattccaacacatgttcagaattaaaatactgatccagatatttatgttacccttctgtttcttctgagcagcagctagagatcactggttggttcataggaacaaacagggtcaatctaaatggcagaaaaaactcgaaacaatgaatgggactagagttgaataacaagtataccatagtttctgaaacataatttttctctctccagtctcccatttctattgaaaacaaatcatggtaggactgatttgtttgcacagtaagctttagtcttattatgcttggcctggttatttgtataaagcatagcaataataattatttgccacgtaggctttttaaaaattgactttgatgtaactttgttccataagaaatctcagattagactttctaaagccttgagctgagacacagatttatctgtgcctgcaaatacttgtatgagttgtgtgaattctccttttgagatcccaagataactggagctcctaggcctgtcagaaagtgacattctttacttaccacaggtcaggaaccctgtaaaggaattgaatagacaaggtatgaggccagcttttcccagaggctttcatcagttctgtaagtcaactttgattccttaaagcaatctgtttatatttgaaagaatgccattccagtcaaagccctggtaaaacaggcagtgtctctaattgtgtcctgttacaaaggaaaacagatttttattgcacatatgcaaattactatgctgccataagttaagaatactcacaaatagttttcaaattcttgagaaatcaggtagaaagaaatatgctccaaagttttctcataggagtataatttactcaatttttaacaactgtaaatagctcaaaaaaaaaggtttcttgactctgaaaaatgaaacaaaggatcagcaacattttaagcaaaaagtcactagaaggttattttgttcttttattagtttagtccatgctgttaattcctgtttgctcaatatttatgaacatattggtttcccaagggagactcttgaaagtttttttcctctctatcttaatggcacactttacaaaatttttcagaaacctgcatttaagagccctctatctgattataaaccatcttttaaagaggatcaaaacaagacaacaattttctgtggataacataaagtcttaggaaagccgtggttaaagacacaattgactagaaattttggttacttctgtggcatacaacaattttacataacagttataattattactgataacataaactaagtcatatcagaatttaggagtttcccataattttggagcacataccaataacatatttatacaaatacaactcaaagaaagctaaacaccatttcatatttgacagtgcttcctgtatgattttaatataccaagtaagccaaatatgtcatttttggacttaaggggacctcatatctaaagtattgaccagatcaggaaaaggcataatatagaatttgattttggaaagtttgtcaaatatcaaagatttaaaacacttgatattataaaatcgaatcccaggtcactgtaannnnnnnnnnnnnnnnnnnnnnnnnnnnnnnnnnnnnnnnnnnnnnnnnnnnnnnnnnnnnnnnnnnnnnnnnnnnnnnnnnnnnnnnnnnnnnnnnnnnnnnnnnnnnnnnnnnnnnnnnnnnnnnnnnnnnnnnnnnnnnnnnnnnnnnnnnnnnnnnnnnnnnnnnnnnnnnnnnnnnnnnnnnnnnnnnnnnnnnnnnnnnnnnnnnnnnnnnnnnnnnnnnnnnnnnnntttttttttttttttttttgagacgagtctggctctgtcgcccagctgggagttcagtggcgccatctcggctcactgcaagctccgtctcccgggttcacaccattctcctgcctcagcctccggggtagctgggactacaggcacccgccactacgcttggctaatttttttgtgtttttagtagagacggggtttcaccatgttagccaggatggtctccatcttctgacctcgtgatccacccgcctcagcctcccaaagtgctggtattacaggcgtgagccactgcgcccagcaagcaaaatcctttactcattgatagagggaagacagctttccaaacaatgtctcactttttcttctttattttgttgtttattcaaaaggcaaacaaaaatcttccatgatcttttaatattacatgaaaattttgttcaagagagaaagccaaatttcatctttgcattaatgaatgtcaaatccaattcttaagaaaaccttgtagacaaattattcaatcttaatcaattttaccatgagataagattctcataaaccttttgtagtcctttacaatttttttttgttgttgttaaagagcagattaatgctctaagaaaaccctgttgtgcttttattccaatgttctatttatggaaaaactgaataataccctttaactttagctaatattttaacacacagaatttcttttacaagattaattttcactgacctcccacaacttactcaaacctttagctttatcctatgtaacttaaaacagtcttttaactctgtaaactaggcaataagaccacattcccatgccttcttataatcttttaccaaaaacacattctattttccttacacgccttgcaggtaacactgtttctctggtagcctcaattacatgtgctacaatgttaactcttagcaacttttatatttggtgaaaagtctgataaataagtggttttaattatgtaccaggtgtggagcctaggacgccagacagaagtgcagataaggtctgagtctttccagcatagctagggggcatggccaactccacatgtccccaggccctacctagaatctaatggctccaaagcaggtgagttgaacaattatcaagttaaagaagcagtttatggcattgaagcattcagcaaatctaatttaatctgacctaatttagaccagatgtctaaattttgaagacatttttattttaccaatatatttgattctctttatttcccaaagattattaaagtcccatgaattaaaaggtgttaaagtttttatttttctgacaaaatattcaatttaagtgcttatttttcaagccaattaattagagctcttttctatgcatatcacacatacaacacacaaaaatacacagacagaagacccagtagctgttaattttttcatttgccagcttttaagaatcttaattggattactggcttcagggtggagcaacgtgtggggacagagccgggaaaacatgcagtttctggggcctaataaacaggtgcagttagaaggcaaaacagattccccaaaattacagatctcatttttatattggattctggatcccaaaaagagggaatcagcccatcccctctgggagttttggaaggtgtagaagaatgtttccataccttctaggtggccaagagcatgcttctctgatccaaacgtgcacagagtggggtattcccctataactgctattagccttcccttaaagcatatttcctgcctagttattacacaccaaggttaaaagctctcccataatgcaaagtaatttctgatacccctacaagtaaaaaacattaggtaacacaatgcaaatcagagcaatgccttggattttgagagggatttgcttgccttcaattcctggggttccatgaggaaaacagatttttcccaaaatggagcctgtggtgctccctcagttttttctaaggaagcccaggctgttagaaatgatcttaggtcctctcaatgtgggcatcaagagtggcaagaaaacaaaatgagaaaaacaattcagttgactgagaagaaaaaacttttatctagaaaaaaatcaatataaaacctgccagatagatagatagatagataatcttggacatcacttttaattaagctgacttttaaccaaatctcttattatcagactctagccaggacaaacagctaatatttctggcttttgaactttaccaaaagtaacctcccaggtgaaaccaataagccttaactaaggttatgatttaaccacaggtgtgggaggtattttcaaagaggtggtaagcagtttttacaagatctggaacctccaaacatagctcagagaaaggaagattcaagacagggagtcagaagttgttcatgaggggaagataattaataaatggcaaaggtcacatagatatcaaaccagaaaggactcattcccgaagctaggaattgaatccaggccaccactgtgaaatagcaaagccttagttactgagctgcagtactgcacagtctccattgctcctccgagaaggagcctagagcagccaattttgagcttgcaaaggcttttaactgctcaagataatttttaggactaattgacaggaaccccaaaattcacaccctctggatggcagagatcaggagaaagtacccccacgtggttacaaggtcaagctttcaaggacataaaacaagacgagagggaaacttcatccagtttttgtttcagggacctgcagaaaagtttgtaactgaccagtttgcgggccagcttgaagaccagatttgtaggattcctaggcctgcattctatcctgtggctagctagggctgccataatagaatattacagactaggcagcttcaaccacaggtgtttattttctcactgctccaaagtctagaagtccaagatgagggtgcctgtaaagctgatttctggtaagagctctcctggcttgtagatggccaccttctccctatgtcctctctgggcctttcctctatctggccaagggagctatctctggtgtcttttcctcttcttataaggacagcaggcctatggattaaggcctcactttcatgtcttcatttaagtttaattacctctttaaaggcccgatgtccaaatacagtcacaccgtgggttaggatttcaacataggaattttagggacacaattcaacccataataggagggcattggaaggagagtgttccaggcagaggaagtagtgcagtagagcatatggaagtaggaaagtgaggagcaatggaaggggttcagtatggtttgagcgtggggtgtgtagagggtgaaggctatttcacccagtgcagtaagctctatcatccacaccggggttttacagtgggagaaaggagggtgtttatttgcaggtcaagaagcaaacagaatcagggagctcatgcttaagacctgaactccacagtggcttacatgtaaggtgcagaggttacaggcaaaggcatcaatcaacacatggaagccatatattggtttggcctaaaaaggtgggatatcctgaagtaggggcttacaggttacaggtaaatccaaatattttctgatttgcacattgtttaaggaaggggatatttgtctaaagatgggatcagcaggccaggtgtggtggctcatgcttgtaacctcagcactttgaaaggctgaagaaggagggtaacttgaggccaggatttcaagaccagcctagtcaacatggcaagactctgtctctaaaaaaaataaaaaagaaaaaaagaaaaagaaaaaaaataaagatggaatcagcagaaaggaatgttaggtctggcccatgggcggacttcctccagacttctcagaaagaaatttaagacaaagaatggtgccaggcgtggtagttcacgcctgtaatcccagcactttgggaggctgaggagggtggatcacttgaggtcagggatttgagaccagcctggccaacatggtgaaaccccatctctactaaaaatacaaaaactagccgggtgtggtggtgcacgcctgtaatcccagctcctcaggaggctgaggcaggagaatcgnnnnnnnnnnnnnnnnnnnnnnnnnnnnnnnnnnnnnnnnnnnnnnnnnnnnnnnnnnnnnnnnnnnnnnnnnnnnnnnnnnnnnnnnnnnnnnnnnnnnnnnnnnnnnnnnnnnnnnnncctgggcaagagagcgagacttgagactccatctaaaaaaacaaaatggaaaacaaagaatggtgataattcagtcctcaattccttttcttttttttttctttctttttttttttttttaactgctcctgcggagcagggctacctcatagccagtatgtccagagttgtctcagttccctcgttatctgtggtctggaggatccatatgatggtgatccaggttctgaaaaacaactctggaacatctgttaagatgttatctttagtttctataggaaaccaaacatcttctgactctgacctccttggtgattattttaagctactgtttccctttttgcttatcgagttgctcatttacttctcaaggctagcaggatgactggactttctcttgaaggaactcaagctgttcctttatttttatgctcaggggcggggggcactcagcaggtccctaagaggtatccctgctgtgtctcactatgggtgaaggctcagcgggaagaaagctagataccagttggaactctcttaaagtaaggagatcttgggtactttattaatatttttttcaagctttggtaaagtatgaaataactctggattaagaggagaagaactagaacttaataaccatgacatttgggcaaattgtttgaagcctcagtttcctcaacctaaaaataggaattataactttttgaattgttctgttgtatgagataatgacagtgaaatattttggagccaaaaagcaatgcatactattgggggttattattattttttgatctttcagcaagccagctatagtagcttttcctatataaacacagtatgaattcagtgccctcgctttactgaccctcacagcattcaagccctgtatggaccgctgagctctcccttgaagcaccccttagtccagtattctttactattttcccctttaacaatttaaacttctttcaaaacaactggcagtagttttttaaaaaagaaaacaggctactcttcaaattaaaaaaaaattgtcttgctttaggaaaaatgttcttctgtcttttccaattatcttatttcttctgcctctcatctgccttgcctaggcagaattattctcaagcctgcacatgctgctgtgcctctctggcttctaggccaaaacataggctaatagtactcttctcagctcactgagctctttcctgccgtcattcaaatcacctctgaaatcctgccttttgataaagtaatttctgactgatcagaggaaagtgatgattttctctgtgacatgtctttttattttccatcacactcagtgtcttgtccttctgtgcaacatatccatgtatttaaaaacccttgtatatgtatttgccatgtatttgtgaggtatagctcgtgaagtaaaaaaagtctttatttttttaaacacatcatcatttcagcttcaaagtcaatgtggtctcttgagaagttaaatatgctgcatttgaaattttatgtttctcatttttcatgtttttttttaaagccccttttaattcctcatgtatttgaatattccaggaagctagtagagtaaaaagccaaagtgttaaagtgtttataaggaatgtgactcatcgaaattgactcacacaattcatcagctattgtcatccatatgttctcattatttacgtggcttttgctttatttaatcagatgactgaacttatcatcgtgggattttgcttgtagttgtttaatattatataataaaatactcttgtgtgaaacaagttaattgactttttttaattaaaaaaaatttatgtgagagtcaggagttacatgtgcaagtttgttacatgggtatatgttgtgatacaaagattttagcttctaaggatctcattgcccaagtagtgaacgtagtacactataggtagtatttctaaacacttttcccctccccctcttttggaatccctagtgtttattgttcccatctttgtgtctatatgtatctaatgcttagctctcacttataagtgcggacgtgtgatattttggttttctgtttctgtgttaattcatttaggatagagagactccagctgcagctgtgttgctacaaatgacatgagttcattcttttttatggctgcatagtattccatggtttatatgtatcacattttctttattcagtccaccattgatggtcacctgggttgattccatgtctttgttattgtggacagggctgtgataaacatatgagtgcagttacctttttttgtataacagttcataataaaatactcttaacagtagcacagaatttagattgcttttcaggctagaagggataattgaaacatagaaaaaaataatgactcctaagcatagaaacagacccaatcataaagctctcttcctctctttctgcctagtgttagatcttattcattgtcttaaagcactgtgaccattttcagtgaaatcacagttttattcatgaaaagacaatgaattggtgtaagtaatcatttgaggatgaaggtgactagtctgtgatcaacaccagtacttgaagtacttgtaaaacatgaattgaccttggttaaattgcagaaaataaagtattagtatacataaacacattttctctcagcattgaaaagttatagtctataatttacctgcttgctaagaataaaaatattacttagaggtttatcaagaccttttttctacaaatggatttaatgtacagaattattccattttctatctgtgctctgtatactaccacctagtggaataaaatgcaaatttacctgtcaaaatcaggagaagaaaatgaaccaggggaaatttatttcaggaaaaaattttcataacacgttattgttacttcttttagtataatgtagtttgcataaaatacattagtttggagtgaaaaaagtcccagccatttttgtgatagctattaaaatgctattagtttgtccacaaataagctattctattcagaaacttagaagctaggtaaattattgagatgatgccagcatattatatctctaaattatgttaagaagcttctctaaattcctcatcactagggtgtattagtccattttcacactgctataaagaactacctgagactgggtaatttatgaagaaaagaggtttaattgactcacagttctgcaggcttaacaggaagcatgactgggagacctcaggaaacatacagtggaagaaggtgaaagggaagcaaggaccttctcatggcagcaggagagggagagcacaggggaagtgccacacacttttaaaccatcagatctcaggagaactcactcactctcacaagcacagcagggaggaaattcacccccacgatcctatcatctcacactgggcccctcctccaatttgacatgagatatgggcagggacacaaatccaaaccgtatcataggatttgttaaaaaaatctaacatgttctgcttcaaggcacccatgaaatgaaggtgtcatttcttaactgagaggttaaataaaagtgcagagataagatggttaagttttatcgtagctgggaagaaaagcgggtgtgtgtattatgcttaggtttttcctcccaaacaatgaaacccaaaaaggcaaatgaagctttaaggcgctttatcctttactggtaggatggtcctcctttaatcttcagtctccgttaaagaacaaacacaagctaacaatcaaaacctgttgttgcttgctgacggatttctctaacatagtcttccatcaaccatcataggtttgttgtggccacccaggccctttggtcgtcatgttcccatggaatgctaatgaaattaccttcccatttcctaaggtgacatgcctttcagatggcattggtgtgtgcttgtgtaaacacatttttttgtgctcatgaatattttacctgcctgattttggtgatctgagtgttgagcagtgggtgagggatggtggggcaatgggtagtaaggggaagtttaattgaagttcagataaaaatatccctccagaaacattacaaagccacaaaatcagctgaagttgagtcttctattgtaaagattctctttcttctcctgacagatccccattcctatccaggtagaccaggctctagtgaagattggacacaagtggtttatatcccgaagctcttaacctaagagtcctgccttgtttttttacttcatgtggtcttgaattgctgaggatagcccagtgatcatttctaccttaatatgtagccttcaaaacgttgggtctctcagttttcttccttaataaacaatgaaccctaattatttataactgctcttgtgatggaggaattggcatgattttgcattgtgggcttctggctttacagtgtttgtgggaaagatggtcttctatctttgttatttataagtcattcattccctgtttttttgaagatattgttaaataaaaaaacttcagctgaattaaatttaaaagtttttaattgagcaaagaaccattctcaattcgggcagccttcccatccagagtagtccctgtgacttcagtgcagccacatggtggaagaggatttatggacagaggaaggaaagtgacatacaggaaacagaaaagagattcagaaacagctgaattggttataactcagcgtttgccttatttgaacatggtttgaacagttggccacgtttgattggccaaaactcagtaattggcacaagagtaggctaccatctgtttataatgtccacttaggttatagttcatgatgtgcaaagaaacctttaagctgagcttaaaatgtaatgaggcagctgtaggctaaacttgatttaacagtacttatccctctgttgaaattgcactcttgctacctgctagttgatgtgggcaggtgtgctaatgacacattcgcctgcacctaccacctgctgaagaccctgccatgtcctgaagcagtcacttaggctatgaaacagaaggatgagttagagaagtaaatattatattttaccccccaaagcctaaaaccatgtctaggttctcccctttctcaattcccaatcatgcaaccttgaaaggtgttatatagatagttgttagaaatatgtctgtcctccaaaaccctactaacacgcaaaaatggacaaatctagcttttttgctaaaatcctaacaactcagaaagcaaagcaaaatgaaatgtatgtactccattctcaggatttccttcttaaaaaccactaggctttgtgtaactcaattttaaaagtatggtaatagctcctgtaattcgatggcttcttctgggagacagatataaatctattctagactttaagactggtgtccacattttaagttacagttgtatgtacttctactttgttgcagccttctcttggagtcaagaagcctaccaaagccctgctctttgtactcttgagcccagtgggaccttatttttcaagtggaacctttaatccagtgtccctgtgggccaatcccaagtatgtaagagcctggaaaggtggaactggggactgcaagatgggagggtaagtaaatctgtgtctctgtctaaaggaaagacaccttcatgaccatttagttagtgccatttcacttcagtatgaacacatataatacttttcaaactttaatgctcattgtgtttcatggttaattttcagtttaatctttcagcaagccagctgtagtagcttttcctatataaacgcagtatgaattcagtgccctcgcttttagatgtgctagtttaaaggatagcccatggccctttgtaagggagaaacactggatatgatatctagggaagaactgaagtaagaaactacaacaagcatcacatcggtgctttggataaacttcccctgggcgctggtctctggctgcaggctgacggctggcattaaaaagcatctggtcctgggacccaggctctcagttggctccagggagtcatgtctggggaaggtgcccgcttcactgaagtgctgtcttcattgccacagattgtggccacacctgctgccaactggctgcgggacagccctgctttggctctgtcaggccagtctcataggccatatgtagctggcaggaaataaaagagcatttgaaaagtgttggacgatttcaggggtggacttggccatgagttgggaatgcccctatgggtgaacgagaataactggtttaagcagcatgggttcttgctttgcatgtatcaaatggtgctgtttgcatactcagggcagcagctgtcctagaaggtgactccatggcagtcttgtgggccctggtaggacatttaggtccaggaggcaggggagagtcacatgacgtgctgctggggtattagaggcaatgaccactggctttgacccctctgtagtcttgctgtatttcctttttcttttctctcctcacctacccaaattaaaaaagaacggttataaaagtcatccccactggcaactttagcaactgcattccctcaatgggtagagaaatccaaatggagtgcattaaaactaggaagtctattctccttctggcttagagcacaccttcctgtgtcctaggctagccaggttgaaaactcctttttttgactcttgatttctttttttactggttcaaacttcttcgcagagcatgtgcctatgtaccactgcataccatatatataccatatatagagagtaaataaacagtcttgatgaaaagtaataaggaaaaagtttccctgtttaaaatattgctttctagctcccccacctgtttaggaaaaagataacctggggacacagaaattgcagggcaatctttattaaccggtatttgggcaggttgtaatttattttgtaaacaatgatttaatgcactattgcagaatacatgatcactgtaggccagttaaaaattaatgttttcagtaccacacagagtgaaccctaatgtaaactgtggacttgtggaccacactaatgcaagatgataataagaagaaaaactgagagggtgttcgggaaggggtataataggggaattctgttaccttttgctcaatttctctgtgaatctaaaagtactctaaaataataaaatctattataaaaatatttgattcattaggctcaggtggactatgatccatggaaattgacttgaaatctcttaggaaaggaagagaccggagaagaaagtattgaactcataaattaaaaatggcaagagggaaggtggtaaccaaaaggatgggcatttaacctatatgcctatcacttccaaaaagttctagggccgtctcctcctatgcttctgacctggagaggtacaaggggaacaaaatattccgcatttaatattatcctgttgagttggcaaagacatttggagtcaactttagttttgtgtattattacatctgtaaacctaattaagtcaacagttacccttgacacctgtagtcaactggtattattaaataactattgagtctcataaagtcaagaactttctgctttctatctaagtgaatctagggcagagactgagcatcaggattctttagcatgcagccaagcttgagaagcactgagctagagaaaggtcttgcactgtagaaacagctttagttccaggtgattccttggttaatttgggaggaataaggctttctgtcactctctctctctttctctctttttctctctctcttgcacatgcacacgtgcacacacacacacaaattatctctcttagttttttcttttttccttgcattctgattctgcatttaagagtacaagctttgaagtcagaaagacctggcttaaaaacctaactgtcataatggtgcgtaaatgtcgttatagatttgtccaaacccatagaatgtacaccaggaatgaacactaatgaaaactctagacttcaggtgataatggtatgtcaatgtggttcattaatttcagcaaatgtaccactctggtgtgaggcattggtaatggtagaaactattcatttggatggggagaaagggatatgggaaatctttgtacttgcctttcagttttggtgggaacctaaaactgctctgaaaaaaacctgaagtctttaaaaacaaaccaacctaattgccttgggcatgttacttaactgctctatgtatcagtttcctcatttttaaagttgaggcaataataccttgcacagattaagtgagataatagaaagtgcctaggatagtacttggcatatagaaagctctcagcaaatgcagtatgataacctaatggttaaaagcttgggtttaggagtcaaatgtctgggagttacacacttaactatctgtgagatcttctacaactgaatcctctctccaagtcttccaaagaacaataaagtctagggttgtttttagatgactcaatgaaataatgtagttaagtacttagtacccagtctggcaggtatgggttgcatatctcttatctgaaatgcttgggaccagatgtgttttggatttcaaattttggagtatttctctttgggcatccctaatccaaaaaattcgaaatccaaattgagcatcatgttggcaccgaaaaagttttagattttagagcatttcaaagttttaaattagggatcctcaacctgtagtaaactctcacagtcactgatgttgtgaggttttctcactttctcatttcatttcctggactctctttatcttagaagaaatcagttaaattttacataatagaatttattcttttggagggatgtatttaatatgtctattctcccagataacctatttaaaaccatattgaaatgtttctatgtcaacagctttcttactttttcatttttctgtttcctccaagaacatgtttctcttatgaatattggcagcacatgggcgggaacccaactatattaccatggtatcagttatcctgtggacattaataatacagcttacacctgtgagagaactctgggaaaattaaaacttgtttgggggaataaagaccatctacagaatataataatacatcaatcaatcaattaaaacttaaacataaaaaacccttttcttttcagtgcattgaaatagtcactgtctttaatcctctttccttgctcagtgcttcatgaagctgaggagccatggttttaattcagctacactttcagaaatgtgtatgcatttgtatttagaagcttctttgaaaggctaaatattcatcctgtaagaattctctatgtgttttttaatacagtctaaagggcattttgtatatgaaaaaataatttattttcaggtagggtaaaacttcactgcttcactacttcgtagttgtgtctacgaatgagaaaaaattcaaataaaatagttattattattagtttttagagatgcagtcttgctgtgttgcccaggctggtctgggacttctggcctcaagccatcctcctgcctcggtgtcctgagtcactgggattacaggcatgagccaccacaccccactgaaatagttattttttaaaaaacttaatttcattaggatgtaacagtctcatgtaactcatcctttggcttttattgttattatttattttttccaagcaacccaatgagatatataaagcagatatttttatctgccagataattaaatgagggaaaaataaggactaacttgcttaagttcacatataccaaatagtggaaatgcaagagctgtcctcaggtctgttaacaacaaacctgtggtctttctaccagacgtcccctgcaatctggtttatactcattattaaaaagcatttgtaatttaactcagttatctatttactatcagttatgaataaggattatttgactttttatggtcattaaacaatagcttcctatctgttgtctttgtctttttaatttttatttattttattgtttttttaatagcttcctatctgtataccagacttgcttcatctccacattgaccaagaatttatattttgtcatctgtatttagaagcatatgttttaagcgtcttttaatggctctttttttttttttgctgggaggggacagtctcgctctgtctcctaggctggagtgcagtggcaccatctcagctcactgcaacctccgcctccctggtgcgagtggtgctcctgcctcagcctcccgagtaggtgggattacaggcgtggtccaccaaacccagctagttttttatatttttggtagagacagggtttcaccatgttagccaggctggtctggaactcctgacctcaagtaacttgcccacctcagcctcccaaagtgctgagattacaggtatgagccactgtgcctggcccttttaaggactctttttttttttttttttttttttgagacagtctcactctgtcgctcagactggagtgcagtggcgcgatctcggctcactgcaagctccacctcccgggttcacgccattctcctgcctcagcctcccgagtagctgggactacaggcgccagccaccacgcccggataatttttagtatttttagtagagacgaggtttcaccgtgttagccaggatggtctcaatctcctgacctcatgatccggccgtctcgcctcccaaagtgctgggattacaggcgtgagccaccgcgcctggcccttttaaggactcttaacattaccttggtgtgagtcaacctcatcgtgctccaatcgcaatcaccatagtatgatgtctattttccacagcttactggaatatttcagctattagtcaatattctttcagttgcaagtcagaaaaccaacttgaaattattatttatttatttatttatttttttgagacggaattttgctcttgttgcccaggctggagtgccatggcacaatctcggctcactgcaacctccgcctcccgagttcaagcaattctcctgcctcagcctccagagtagctgggattacaggcatgggccaccactcccggctaatttttttgttatttttagtagagacggggtttctccatgttggtcaggatggtctcaaactcccaacctcaggtgatctgcccacctcagcctcccaaagtgctgggattacaggcatgagccaccgtgcccggcctggaaatgatcttaagcagacaagggcttatgaaactaggatgctaggggctaaagcaattatttccaagtttcttgtgtcctttgcacatccccctttttcttcccttcttcctctgcctctggtcagagcttctggctccatgttggcctagggctctcccacttcagacgctttcttctgtgaagtgtggtgatcatggacacagccgaccccagttttacagcataccaagtaagcaaccccagaagggagaaaatgcctgtatttcaggttatagacattaaaatgagtgaatgcacccaaaaaaggaatcatgtgactgtcttaggttatatgcccaccctttaactcagctgcagcagggcaagatgctatattgtcatcagttgtggtagggcaagatgctatattatcagtccaagcagaatgacatagctctatagaaagactatgtttttataagagtatggaatatagtgcagatgaaaacagtagatatacactaacatgtggctctaatgtttaatttttattttttttgagacagagtctcactgtgtcacccaggctggagtgcagtggtgctatcttggctcactgcaacttttgcctcccgagttaaaatgattctcctccctcagcctccctagcagctgagattataggcacccgccaccacgcccagctaattcttgtattttcagtagagacatggtttcaccatgttggccgggctggtctcgaactcctgacctcagtgatccgcccatcttaggctcctaaagtgctaggattacagacataagccaccgcgcctggcctcatgctcaacttttatttagacaacagtacaaattgtaattttacccagatgtaaaagagtctaagagacctaaatagatattttgtggtagattacattaatgtaatgtaatgtaggagttttacattactacatttgtagttgttttagttgtttttcattgtttgtttctgtgtatttctggggatttcatggtgcaacaggaggactagagtttattcccgatccctgactgtcttacggcagtacttctcagacctactgagttatacaaccaggggtgtagggaggcaagcagtcatcacatttatttgaggactctcatgttttgtctaaaatattcatccctattttataatatactccataattttcccatataagtttagataaaagatgataccttaaaagtattataacactaaattgtcattccgggaaaatgtgctgtgttcctttcattttaaataatctgagatgaatggtgcaggctgagaaaaataggcttttgaaatactttttggtcaacatcgagacttttaacatttgtcctatcttttaggggaatttagacattgggcattatgtattccttggatacattaaaaggtgttagataagagcgctcacacttgctgctcttctattgcaacttgacagaagttacttctctaaaccttagtttctcatctgaacaatggaaataatgatagtgtctatctcatagtattggtgtgagatttaaatgaaataattcatgtaaaattgcttggtgtgtggaaacatagtaacttttaactgttctcattaacttggctatttacctgtgttcttctatcattacatttcaagttaaaatttcaaggtttcacgttgttctctctccaatgaatgcagttaaatcacttagattttctaatgagttttcctttaatgttatgcagttgactagagagtgtatatatattaagaacataataccttcactatgtccacatgtgaattaagagcttgaggctatcagagggtagaagatgagggagtggggatgaagtatgtttgtaacctgtgtattttctctttcttaaaggaattacggctcatctctttttgcccaatgtgaagcagtagataatgggtgtcagcaggtcctgtggctctatggagaggaccatcagatcactgaagtgggaactatgaatctttttctttactggataaatgaagatggaggtaatccactcagatttcactgtgtgcatttctcagtcattttcaacaggaccagaaagacaagagctagaaacttagtacaagggagtaagtagcacagttccaaaggctaagtaaggactactgtgcttttgctgcccaaatagacacaagtttcttttttttctttctttcttttttaaagaggtggagtctcactatgtcacccaggctgcagtgcaatggtgtgatctcagctcactgcaccctggttcaagcaattctcctgcctcagcctcccgagtagctgggattgcaggagcctgccaccatgcccagctaatttttgtatttttttttttagtagagatagggtttcaccatgttggtcaggctggtcttgaactcctgacctcaggtgatccaccggccttggcctcccaaagtgctgggattacaggtgtgagccactgcacccggccgagtttcgatttaaagaagctctagaggttttttgtttttcgttttttgtttttctggctctagatgtactgattattgagatactgagatgtcacattaagggatttaagttaccatgattggaagatttgcttccttatcccttctgcagttccccaacaattttcctatctgaacaccttgcattgagacacaggtctcagatcaggtcaatggtcattcaccatataccgtatataaaatgctagagtaataaatgcagtgtactgattctactggaaggattttgtgtactctctggctgtaattgttttaacaattgttgccttttctacatattttgaaaatgtatcacaatctctccaaatttactctagaactcaatctgattaaagagcaccattttaaaagataaatcaatgtatcttgggattgtaactagatcctggttcattcaagacaatttcatatatccactatagatatcaatatttctctattatctttaatatcctgagtactcattacttttctttgctgtttttttttattagttggcagagaccataggggttcagtgaagtgttggcaacgtgtatgatattgaattaaatggccaacggtgggagaaaaacaggcatttatttctattagaattttgataatcataccaaatttagaagcgtatttttagacttgtttacattcttaggttgttcatttcacagtagtaattatagagactagaaatataaatgatgtttccaaatacttatgaagtctcagtgttagtagtttcaattaaattttttaaaatgcagtttatatttgaaagtagctacagtagcctctcttgctctaatgttatttggctacaaaaagaggaaaatggtaatttagatgtggctgaattcagagctaagtactaattttagtgttagttgcagagactaacaagatgagtcttatactgcagtcagaggtagaataaacagaagatatggtgagtaagccttgtcctgggcttggccattggtagtccttggcatatgaaaaaccagatacagatcattctcatccttccattcctgctgtttgtacttggcactgtttgaaaataaaatttatacaggaatatttatgatttataaatttgagttactgtatgtgacatataacaaaagctacacttggaagattgtagccagtgttgacctctgcacttagaagataataggccgattcaacccttcttcccatctgcccactcttacccccaccccaaactccaccaaaaaaccacacagctcaaaacaaaaacagttacatcattcagaggtggtaccatcattatttttatggatgggagatgtcagaatttaagtacactctgaatcagagctacatgatttaaccagaaacaccagaaactgtcctggtggaaaattgttctttatccaaacaataatcatgaaacatttccaccatggcttttaaaggtcagaatagaaatgagtgagtttgtcttctgcctcttgcaaaatatacaagaccttaagactgttagttactattcagattatggttgcctgggataactttagttttaatatactccttcactttggggatgttcatctaacagaacaaataaaattcagaataaggagaaaggaaatagaatatatatttgaagtaaatagaatgttaggaaaaacctttgggctaaaaaaaaagacatgcaattctgaagtaactttgatttatatcatatgattttaagaaaatacaatgaacaaacgagttgaaaatcagcacaatactgattttcacaaacgttaccgataggaggtataaacagagttctttcggtaatagcctgccgtcttttcatgagcgcccacacacactgctcctgttggttgagatggctggtgcaggaaggtggatggggtggtggatagtgtgtgttcaaagcacagtgctgtgcacagtcactatgtgtggcactcagcttgtaactcatgggagttttgatttcagtaacagcacccatggtggcaagatcacacatcatcactctgttgatgagtaatttaacccatacgcttgctattcaccatttgaacaaagcattgtatcatatcctggaccctggagataccctgaaaaataagacccaggccttgtggttgagttcacagtcactttgggaaaacaaccacagcagtgaatctcggtattgctcaggccacatcatgagtcttctcggacacgtcaggcgtgtatacggactcgacttggagcactcttcctcagatgtctgtaccgcttgctctttgacatcctccaaatctttgcttacaaatcccattctcagtctggctttccttgagctcttaatcaaaatcataaactccatttcccatttctcctcagcattccagcattctccattgcttttccttctttatttccccctgtgtagtctaacatactatcaacacaataaatgtttacctgtgtctattagaaagtaagcagggagatatgtcagttttgttcactgctgtattcatagagcttaaaacggtaaacagcactcaatatgtatttgtagaataaatggctaattgtgctgatggtgtttagggcacttatgcagacctacattcctggtttccattagtgtttgactttgggaagtcacagatgaatcctgctgttattgcttctaaattcctcatctcctaaaaatgacttctttgtcaaaaacaagctgcatttgtaggttctgttttcctcatgttgggcaatctggagtgatttctggctcttgtaagtatgtttgtggttgcagaggaaaatgaatatttctcacccaaatgttgtcatgtcatcatctctgtctggcaaccagagaagcagatgttctgttccttgacctcaggctagtggttacagttctgggtgttaaacatgtttcacaaaacagcacttgcacatgcggggctgctgttttcatttaacttcatgtagtctcagggctcagcaagctttaggaaaggtccggtttgggggcactggaagtgtgtgtgtgtgtgtacatatatatacacacacaaatagatccatacatttatgtatctagttggctagctattgcaaaacacatgtttattttgagatcatcaacacttctaaacatgacaaagagtagccctaagaacattgccaagaacaaattttctcctttccagaaagcaattttcagcagatgattttcagaaacaaaattcaaaaaagccatactgctgtatcctagcaaagataacttattcgtttattttttactcaaaaacatttattatatacactctgggctaggcacaatgcccagttttgaggatagaaggatgaagatagagtttggtattccagatagagcttgattgttgggcatgtctgatgtaaccccagtggagtgggcgagcctagaaccaccatgtattgagggagagggtggtggcctcagtgtcaggactcactagattcagactcctgggtgtcagaagtggggaggaaagggagatgctgagtgccagagggtactgtaaggagagcttgtgcagctgatggatcatgcatgatgcctgtgaacaattgtcctactagacctcacagtagttagggatgtctgcagtcatctcacagtagagcagtagctcagctttggagttttgtttcttgaatgtcttcttttttaaccgtacacgtgcttgagctcactctgataagcccattacatttgaatctcagagagcaaaggcagcatctccatacttgttgctgatgctccaccaggtttgaaaatcactaaagatagactgttaggctgggtgcggtggctcacatctgtaatctcagcactttgggaggccgaggtgggcagatcatctgagctcaggagttcgagaccagcctgaccaacatggtgaaaccccgtctctactaaaaatacaaaaattagccaggcgtggtggcgcgtacctgtaatcccagctactcaggaggctgaggcaggagaatcacttgaccctgggaggcagagggtgcagtgagctgagatggtgccactgcactccagcctgggtaacctaaaaaaaaaaaaaaaaaaaaaaaattagactttccaagggcagcgtggaagcagtgaccagcctgagtaggcacgcacacttcttggggatagcctcctccatagcattcttagaaggtttggtaatgaccagtttttctgagtaagaccctatctacattattctaattagtaaccacctttcatctgctaaggtaaattttcacttcagaatattcctcttaagaccatgcaataactcttactgtttgttggtggaaaaccatctcattattttactggttaagggtaaactgaagatgattagataactttccttccttccctccccccttcctcccttccttctgtttcttccttccttccttcctttctccctccctccctccctctctctttctttccttctctctttcttttctttctttttttctttctttctttcttttttctttcttccttccttcgttccttccttcctccctccctctctctctttctttctgttttctttctttctttctttctttctttctttctttctttctttctttctctctttcttttctttctttctttctctttctctttccctccttccttcctttctttctctctctctccttccttccttcctctttccttccttccttccttctttccttccttccttctttccttccttccttctttcttctttttttaaataagggtctacctgaagtgtgaactgatttgggaaatttgatcatgcagaacagtaaaattttctttatgtttgttgctagcaaaattgtgatggttttttaaaaaaatggctattgataataaggcatgcctaatgtagtgaaagtttgaaaatgtcccaatttctgattgacagaagaagaactggcaactcctccactagatggcatcattcttccaggagtgacaaggcggtgcattctggacctggcacatcagtgggtgggtgcctttgatatgaacaacttttgtaagcctgaaataaaaaataatcaaaataagcccagcctagtgttgaaataatatcctgtggttccaaccaatgttatctaatctttaaattctaacgtgaatgaaaagtattcttctagaagggctttcttggcaagactattaaaataagtattgttgatagcaagggcagagagaaaccagtttagcaagatgtcatagtggagaagtattctagtagtagtctcagtctaccaggtatctcccaccaacttttgtctggttcatacctgatgtgcttccatccagacattccttaacttcccaagtctgtgttgcttccaaatggcaatgatacttcttcctttcctttatttataccagtgtaaccatgcttgccgtagaaatgaaataatttcactgacatataaatgtttactaatataacattattggtttgactgccttctttttctctctgtcctacccccatcctccaaaattcatatacatgcctattttaaaatcagaacatgcaagcaaatgtaaagttgttttcagtagactttcaaattcgtgtgacacaggcaagcatattaaacaatttggtggaccgggtgcagtggttcatgcctataattctagcattttgggaggccaaggcaggaggatcacttaagcccaggaattcgagaccagcctgggcaacatagtgagaccccgaatctacaaaaaaatcaaaaacattagctgaacatggtggtacatgcctgtagtcccagctacttggaggggctgaggtgggaggatggcataagatctggaggtcaaggtcgcagtgagctatgatcaagccactgcactacagcctgaatacagggtgagaccatgtctctaaaagtaaattaaataaataaataaataaataaataaataaataaataaataaaataaaatttaaaaaggtttggttttggaaatgacgtaatgtattcaagacaaattattgaatgaattgggtgtctggtaaaggttcttggatggaacttttgacccaggtgttaaaatggtctccaaagaacatgaaaaggctttgagcttactgtggtcaaagagtactagtagtaataggacaaatgtttagaaacacacacgttatctaggagcataccagcatggtttctctggaaaagactttcaaaatagatgaaatgtgctataaataattctacaaaaccctgaagtagacaagacccaactgctacatgctggctggcgcattgggcatgacatttacaaaccgttggtataattttcaaacagcttgccctgtcctaaatatgtttgcaattggaaagatatttttgaagctcagtaatttttgttttattaaagaaaaatatcaaccaagtacagaaggttcgacgacaagttgcaagtggaaatactttcccacactaatgatttgctagcatgaaaaataggttattatggaggaaattttttcttgacttcatagctgtaatttattttaaaagctattttaaaacatgagacgtgaaatgccaagaggcatgtagggggtcaccactatttgccagataggggaaattgtccaaagataagtaagggtgagcagagcaaaaacaattctgcttatttacaaaagagttttcttttcttttctttttcaggacacagaactcagcttgttttcaattaatttgcctgattttctgcagttcatttacttttgaacaacataattgcaattgtagactgagagaaattgaaactttcaaagagccatatttctattgcagatatattttcctgctcttccaaatctacttacagcatgagttcttcttttaaatattcaaatattttgaatattgccaagagctttgatttccatttttatctcttgtgggtttataaattaagaaaaaatactcatcttatttttttaaacctctctatttttattgccctttattcaaataacttgttgacaaactttgaacttgaaccactgaggtaaaagaacaagaattaaacagatagtttaaacacatagcttaaaaggatctttttcccatttcctatccttgagcaaagaatatattcaaacactttggcagaagtcaatgatgttataccactaattccatgatgaaaatcaactgaatgtgatactgaaagagaaggaagagaattgtcactgtaaagtcaactgttagtcatattaggaaaaaaaatacatacaatacaatttctcaaataaagtccaaatatacattcaacgtttaaaaataatgagtatttcagatatttgaactcagtctgttctttattccataaaagatataggtaagccgtgcacagtggctcacaactataatcccagcactttggcactttgggaggctgaggtgggaggatcacatgagcccagcctgggcaacatagggagacccctatctttacaaaataaaatataaaatataaaacctagttgggcatggcagcatacacctgtagtcccaggtgctcaggagactgagacaggaggatcacttgggcctgggaggtcgaggctgcaatgagccaagattatgccactgcattccagcctgggtgacagggcaagaccctgtcttaaaaaaaaaaaaaaaagaaagagacaaacgtagaaagagtaccaaatttggagccaatcagatcagacctgggttcaaattgagtttctgtcacttacttcctttgtggccctggagatgcccttcaacctccttgaaccttagtttcctcatctgtaaaatggggatgatagtactcacccttaaaattacagaacttggcataatagcgggtgcttgataaatggtagctataattattaatattatataatacattgttctcctttatggtaaagtaggttttaagacactgatttttttgttttgttttgtttttggagacagagtctcactccgtcacccaggctggactgcagtgacgtgatcttggttcactgcaacctctgcctcctgagttcaagcgattctcctgcctcagcctcctgagtagctgggattacaggcacccgccaccatgcctggctaatttttgtatttttagtagagacagggttttaccaggttggccaggctggtctcaaactcctgacctcaagtaatctgcctgcctcagcctccccaaatgcagagattacaggcatgagccaccgtgcccggcctaagacactgttaacacggagcatgcatcaagcagcatttgggatgcatcaattttgtgagactttatacaagttaacaaataagaaggcaaaaaagaaggcatatgttaaagtataccatgtgtcttgtggtgataatcttatattttatattctgataatctcatatataaatctgtgaccttgaagtaggttacttaacacctcgatgtgttcaccagtaagatggtgtgccacttccagctttcccttaaaggatgattgtgaccttgtctaagtgcaatcagaatgttaagcagaacagtaagtattgcaattgttttgcatgccttttcctttaaaatatacttgttattttttatattccatgcagggtgaatttaaggtgtcagagagatacctcaccatggatgacttgacaacagccctggaggggaacagagtgagagagatgtttggctctggtacagcctgtgttgtttgcccagtttctgatatactgtacaaaggcgaggtacgacaagtatttcctcatttcctatcatttccaatcacattaaattacatttaatttaagtgtatgaataaaattgtatctggacccagacccaagatgcaaaagttttgtcgttgttgttgtttttctttattttaaagagatggagtctcgctgtgttgcccaggctggagtgcagtggctattcactggtgtgatcatagctcactgcagcctcaaactcctgggctcacgcaatccttctgcttcagcctcctgagttgctgggattacaggagtgcgccaccgcaccatgctaggtcttttttgttgttgtttttgttttttaacttggcactacaaaaaaaataactgggacagtttatccagatgaaactgtattagcatatatctactatgtttccagtgatttcatgtaagcttaaacatggtgggaagttagttttgtccttggacacgtgtaagatctgtcttacctacatgtcgggattggagctatgccgacagtcttctactcttctctcttccttcctaccagctcactagggaaggctctataggtagttacatttcagtttctggttaaccaaaagtacttccaaactactggattaggaatggcaaatagttatggaaaatgcattcgagtggtcaatcccttgaattttttttactattaatgctgttatcattaatagtaagtagaccactttacaagaattattcattggcaaacctggtgcatttactaaaatcttacaaaaggaatttgaggatttggttggaagaaatgttctcctcttagtaaattagtctgattttatatgtgccatacttttgttttcttgtcaaattgttttgcttttcactttataacaaagctccaatacttatgattaacattggtatctaactttataacttaaaggcatgtaagtattagtcttataatgtgaactggcttaagttattcatattatagcagatccttgaacaacacagggattaggggtgtcaacccccatgcagttgaaaaatccacatacaactttttttgtttgtttgtttttttaaacggggtctttctctgtcacctgtactggagtgcaggggcacaatctcggctcactgcaacctccgcctcccaagctcaagcgatcctcccacctcagtctcccaagtagctgggaccacaggtgtgcaccaccacacccagctaattttagcattttttgtagagacggggtttcaagatgtttcacaggctggtctcaaactcttgagttcaagtgattcacctgccttgacctcccaaagtgctggtattacaggcgtgagtcaccatgcccggcccacatgtaacttttgacttcccaaaaacttaactactagtagcctgctgttcaccggaagccttatcaacaacaaaaacagtcgattggcacatattttgtatgttatgtatgttatatatgtattcttacaataaagtaagttacgaaaatcatggggaagggaaaatatatttactattcattacatggaagtggatcatcataaaggtcttcatcctcattgtccatcatgttgagtaggctgaggaggaggaggaggaggagggattggtcttgctgttttaggagtggcagaggcagaagaaagtccacgtataagtgaacttgtgtagttcaaacccgtgttgttcaagtgtcaaccgtaaatgcaaactccactggttttcaaattttactttagagttattttccctcagctgattggagttttgctcaactcctctgactttaataatggctgcttcatttgttgaggttttagaacttgcttttaagggattgctcttgacataattgcatcaacagatagactgtttcatgggagaagaattgttctgtttcatgtcaatacttacattgataataatgcatcaaggtaatgtgatccatccactgaagttgtcattaggccagattttttttaagttgaattattatttcacttctagaaataagaagtttataaagtttagcataattttaatgatccaggcttaggaagcatttacagccaaaaagtaagtatatataattatcatattatactaaagggcataatatgaaaagtgtttgagagcacagactatctcctaaaatcaaactatcaaaacctgcaagccagcaaggcatgagtaggcatgactcagatacaaattagaagcatgaaatctctttcagccatgcatttaatcatgctatccaatattgtggaggtagtggcccctggaagtttaccttgggccagagataggtatagaagccccttttatgaagtcatagacttgctttaatttatgctcccagaatgacttgcattaaactgtggcaaaatatctttgcgttctcatattagccagagggttaatatgtagaagacaatcattcatccttacagattctcagaatcttggaagaggtaaggttctttaagtttagccactattttaggtaactgtagctcctccttggttcttcaaatgatcctgaaggctggtatacaaaccagttatgccctaaaattaattggtaggtaggcaatgtataacctgtcattggctagtttttattcaaattttggatatgaaagtctttggcataaggtgctagcactcagagtcagtaggttttagtgctattccttaacttcagtggaattgccttagtatagcagaattgcttgagtgtcttatctgttatcaccatatacatgagtaccctcaaattatctcatttccctttcttttgtagacaatacacattccaactatggagaatggtcctaagctggcaagccgcatcttgagcaaattaactgatatccaggtaaagcttttcttttcttttcttttctttccttttcttttcttttttttatgtcaccttatttctgtcagagcttacaactaaattatatttcaatgaagaggattaaataatacaatttgagatcaataagttaaatttaaggaagatattcccaacacaatgtgtgggcatgagcaaagcagaaatgggaaagaagatgtatgttttaaaaaaagaaagaaaatattgttcaggactccacattacttaacattaaaaaatagatgtaatttttggtaacatttaaaaatctcattaagaaggataacataacttttgttaaaaaaaggaagaaaaaatttgaaagtagaagcaacttcaggaagaaaattacagtgcatgtgattccaacactgagatataatcactgttaattttttatgtctttttatttttgagctggagtttcactcttgttgcccaggctggagtacgatggcacgatcttggctcactgcaacctctgcctcccgggttcaagcaattttcctacctcagcctcccgagtagctgggattataggtgtgcgccaccatgcccagctaatttttgtgtttttagtagagatgggatttcaccatgttggccaggctggtcttgaactcctgacctaaggtaatccacctgccttggcctcctaaattgttgggattacaggcatgaaccactgtgccctgccattttttgatgtcttaaccttcaatattttgtaagcatttatatactttatttatttatttacttatttatttttgagactaagtctcgctgtgtcacccaggctggagaacagtggcatgatctcagctcactacaacctccacctcctgggttcaagcgattcttctgcctcagcctcccgagtagctgggattacaggtctcatgccaccgttcccggctaatttttgtatttttagtagagatgaggttttgccctgttggccaggctggtcttgaactcttgacctcaggtgatccacccgccttggcttcccaaagtgctgggattacagccgtgagccaccatgcccagccagtatacttttagatagttattttttcctaacaaaatgggatcatattgtacataattttgttacatgttttttcactgaataaatgctttgcttttttatatcaataagtagttttctccaacaccatttataaagtttaattgaattccattatattgatgtaccataatttttttaaaaaattatattattgaacatttatgttgttggcaatttttttttcactagtatggacagtacatcctcgattacttcctaaggataaatctgggatcaaagagtatacacgtctattttttcatactgctaactttgttttgcctattttttttctgagcaataatctacagtaatgcctcatcaggcagttaagcaggcatgctaaataccagataacactgggctactcagaaaagagattatcctgtaatttgcaagcatttcacaagttagaagactttgttgaagccagttactatccttgtcaattagtaaaaatatccaagagggcctgagacttacattgaaaagtaaaataaagtttgatcatttgagtgatgtcggatggcattaagtcatgaaactaagtgaaacttaaaggtggctgagaatgcaacaggcctccagagagcaatggaggtccttgggtagtgataaaaatggcatttctggctgggtgcagtggctcacacctataatcccaacactatgggaggccaagacaggaggatcgcttgaggccaggtgttcaagactagcctaggcaacatagtgagaaccttcctctaaaaaaagggaaataaaataaaaataaaagtttaaaagagagtttaaaaggcagttttaaaagagacttactcagcaagttttctgccaaatttacagtattaaaaagaaagaaagtgtgtttttgtttctgtttgtttttttgagacagagtcttactctgttgctcaggctggggtgcagtggtgcaatctcagctcactgcaacccctgcctcctgggttcaagtgattcttgtgcctcagcctcccacacagcagggattacgggcatgcaccatcatgcctggctaatttttgtatttttagtagagtcgaggtttcgccatgttggccaggctggtctcaaactcctagcctcaagtgatttgcccaccttagcctcccaaagtgctgagattacaggcatgagccaccgcaccctggccttgattgtggttttttaatcaatgagctgccatacttctgctctccagcaaaggttttctatgagaattttctgtaagctaagtaaaggaatatcttaatattggaagaaataaaatttagtcagagttgttttctacctttgtacacagcaacacttacaagtaatttgaagagtagctaataaaaatttctgcatggatggcttaggcattttaatttttttaaggttgcctgagtaaatctgaaaataataaattattacagttttgctcaaataaagaacacaaatagaacaaaaaatacataactggctagattacatgaaagcctttttccaaaacagaggtttagaggccagggcaaataggcaggaaaaataaataaagggcatccaaattggaaaagaagaagttaaattagctttcttagcagatgacattatcttacacctagaaaaacctaaagactccctcaaaaaacctgtagaactgataaatgaattcagtaaagttgcaggatataaaatcaacatataaaaatcagtagaatttatatatgctaacagtgaacaatctgaaaaagaaatcaagaaagcaatcccatttataatagccacaaaaagtataaaatacctaggaatcaatctaaccaaagacatgagagatctatacaaggaaaagtataaaactatgatttaaaaaattgaagaaaacacacaaaggtggaaagatattccatattcatggattggaagaattaattttgttaaaatgactatactacacaaagcaatttacagattcaatgcaatccctattaaaatactgatgactttcttcacagaaatagaaaaaacaatcctaaaatgtatatggagctaaaaagaccccaaatagccaaagcaatcttgagcaaaaagaacaaagttagaatcaccacactaccttacttcaaaatttattataaaactataataaccaaaacagcatagtacagatataaaaacagacatagtagaccagtgggacagaatagagaacccagatgcctaagtccacatgtttacaaccaactcatctttgacaaaggtgccaagaactgtaacggggaagacagtcttttcaataaatggtgctgggaaaattggataattatatgcagaagaatgaaactagattcgcttctcttaccatacacagaaatcaaatgaaagtatattaatgacttgaatcttagacctgaaactatgaaattacttgaagaaaacattaaggaaatgcttcaggacattggtctaagcaaagatctcattctgtcactcaggctggagtgtagtggcatgaacctggctcattgtggcattgacctcctgggctcaagcaattctcccaccttggctttccatgtagctagaaccacaggtgcatgccaccacattccactaatttttaaattttttgtagagatggagtctcaccatcttgcccaggctggtctcgaactcctgaactcaagggatcctcctgtctcagcctcccaaagtgctgagattactagcataagccactgtccctggccagcgaagatttcttatgtaagacctgaaaaagcataggctatcaaagcaaaaataggcaattgggattatgtcaagctggaaagcttctccacagcaaagaaaacaatccacaaagggaatagattacccaaagaatggatgaaaatatttgcaaactatcaatctgacaagggattaataaccagagtctataaggagctcaaacaactgtataggaaaaatctagtaatctggttttaaaatgggcatgagacctgattagaaaactcaacagaaaaaaaaatttgattaaaaatggattaaagatctgaatggacatttctcaaaagaagacagacaaatggccagaaggtacatgaaaaaatgcgcaacatcactaattatcagagaaatgcaaaacaaaaccacaatgtaaaatccacttgccctagttaaaatggcttgtattaaaaaaaaaaaaaaaacaggcaataacagatgctgggaggatgtggagaaagggaaccatcatatattgttggttgaaatataaatagtacagccactatggagaacagtatggagggtcctccaaaaataaaagtagaactagaacttccgtgtgatccagcaattctaccaccgggtatatatccaaaagaaaaaaattagtatatcaaagagatatctgcactcccatgtttattgcaatagtattcacaatagccaagatatggaattaacctaaatgtctgtcaacagataaatggataaagagaatgtggcataaagatatatatatatatacacacacacacacacacacacacacacaatgtggtactattcagccataaaaaagaatgaaatcctgtcatttgcagcaacatgtatggaactggaggccattttgttaagtgaaataagccagggaccgaaagacaaacatcacatgttctcatgcaggtgctaaaaaagtagatcctatgaagacagagagtagattagaggttaccagaggccgagaaggggagtgggaagtagaggataaaggaaaaaaacaagaatataaatgtatttattaccattaaactgaacatttaaaaattgtaaagatggtaaattatatatgtgtattttatcttaattaaaattttaaaaatcaggagtttagaaatttttaagagaagtgtgcccatagtgataagaaagaaagacccttttggaaaattttcttgaacaaattatacagtattttcttaaacaaattgtacattctgtagcagttaatacaccaaataagatttcagggttacctcttggagattgtatgaaataaaaacatttaggtgggcatgatggctcattcctgtaatcctaaaactttgggaggctgatgcaggaacaatacttgaggctagtacttcaagaccagcctaggcaacatagtaagacccagtctccacaaaacaaccaaaaaaattagcaagtgtggtggcacacacctgtagttccagctactcaggaggctgaggcaggaggaacacttgaggccaggaatgtgagactgcagtgggctatgattgtgccacagcactccactccagccttcactgtagaaagagaccctgtctcgaaaggaaggagggagggagggagggagggagggagggagggaatgaaggaaggaaggaaggaaggaaggaaggaaggaaatgtaaactcatttgatttggctgtaaaggattaatagaaaaggaaaacgtagtcactaggctgagaaaaattgaactctattgaattggtataaagatctaagtggaggtgtttggcagacatgatcatgaagctttcactgaggaaggaaactctaggaggcaaaagcagaaatgcaactcatcaaaattgaaatggtgacaaaatatgtgcattcaaacctgaaagtgactgaaagagaagcccaaacacacaattttggggtaagatgggaaaccattaccaaagttctcagaaagagcatttttaaaagtaagattatagaagccaaaaggatatgtagtagtctgttctcacactgctgtaacgaactacctgagactgggtagtttgtaaagaaaagaggttttattgacgctcagttctgcaggccatacaggagacatggctggggaggcctcaggaaacttacagtcatggcggaaggcaaaggggaagccagtacatattacatggtgggaacaggaggaggagagggagggtgggaggtgccactcactttttaaaacaaacagatctccttagaactcactcactatcatgagaacagcaagggggaggtttgctcccatgatgcaattacctgacaccaggcccttcctccaacatgggggattacaattccacatgagatttgggtggggacacaaattcaaaccatatcagaatgttagtgactaaagtaaatgttcttgattaactctttaatgtgtatattgagtgcaagccatatgcaggggctattctaggtactggtggtttactcaagaaaaagggggcaaaaaaatgaagaaggtggccaggcatggtggcttacgcctgtaatcccaacactttgggacactgagacgtgagaattgcttgagcccaggagtttgagatcagcctggtaacatggcaaatccctgtctctacaaaaaaatgcaaacaaacaaacaaattaatcgggcatggtgtcacatgtctgtagtcccagctacaggttgaggtgggaagatgccttaagcctagggaggttgaggctgcagtcagccatgatagcaccactgcactccagcctgggcaacagagtgagaccccatctgaaaaaaaaagaagtcaaaacaaatgaaaaaaaaaaaaagtcaaaacaaatattcagtgtaaatgtgagaccatgtaaaaaagtttaaaagtaaaatatatagtttaagcagaggatgggagacggggaaaaaaccttttctccctaactttatatactccctctataaattagtgcttatggccaataagaaatgaataatttcttttttcaccgttggtagtaaagtataatggtagttaacacaaaaaactaaatgatatattcagaacctcatactaaacaaagaaacaaaggcatgcaatcacaggacaggtggaaacagtggttctgaactaaccacaaaccagaactaccaaatgtgctacaaattgtttagtaacaaaggaccatcccttcagaatcgaagagcacgtctcagttatctcatgcctatgtgcatggaacttaaagtctcaaaattactcttacaagatggcaaattgaggctgtcagctaagctcctagattgtctgtttctccaagaaaaataaatttcagtaattattaaggaaaaagcatagaattgcatcatgttttacatttcattacttttggcatgacatgggagcatggatgttttctacaaagtgctctgataaattgaagaagaggccaacaacagccaccgaaaaaaccttcaagattcttgccagtatggctcaggggaaaaattccctcataaccacagatttgacttttcaacttctgtacttctgcatatgagtaataatctctgaggttaagtattcatcccatttagctaattgtccacataactccctgggtcttagattgctctataaatacctcctaagagaagaatttttcaaatgacagtttcgtttttcctttttcttcttttaaagcaacaaagaaaagcacgtctgtgtttatatttaaccaaacttaaacttggagagcattggccgtgttgtcgacgtgtttcttttctctactgttaaattccttactgttccagttactcaccatcatactcacctttgcctctgccacttggggtcctctgttctgcagttgtgttctgctctctgatgcctccaggttttgctgcaccttctagaaattgctcacctggataaggccttggctgtcctttatgactcatctcgttcagaagccttttgaatctctcttgaagaatattccctttgctcagtccaaatacacattcactcacttgaatgctgcttcttcctccagtttcacagtgctggggatgatcccgtaaggcctttaaattacattataattagtcatgcacttctctctgctctggggctgtttgaatcgttcactctctttatacctccagtgttcagcacagagcctagggtataatgcgtatgcagtaatgtttcttgaaggagtgaatgggcaagtgaaacaccaaacaaatactaaagagcaaaacatgtattgctcttgtatattaacacattccgagaagagatgggaggaaggtcttgaataatatcaaattatttcttaagagatcttgatttagatttttttcaaaatgagatacatgttgacactgctgtcaacaaataatcacataaaagctagagcctggcttttaagtatcagggggagcatgtgtgaataatcagcattgctgctgttgaagctccataaagtgggaagcagcgactgcaaagatccagagatggacatctgaagcataggaaaggggcagcttgaatgagataggagcaggatctgtattgattgcaggtcaccagatagaattaaaaaaatctatgttctcactagtggctacagttttcaaggacaaatgactattagtggttattgtatttttcttgttttcaatggagcagctccatgacttagttacataagaagttaaaggctccacccccttccctaccaatgtcttaagctgtcctccgtgtgcatacaaactttgtttccagactgccctcgtgtgactcagtccctggaccagcttcccagccccttctgtttccagcacatcctcctccacgtgttacaggattacaaagctttgcacagcctttcaatagggtttagagcaagaatgacagattgctacctggtaggcagcactgactatatttttattggcgttgcgtagagtgactgcatgacacgcaggttgtgcttttgttttgccaggaatttaaaggcatttagcaaaggccgtatgaaattatctgccttatgtacctcgaatgtgaggtaatgaacttgtcattagtcgtgttttagtttagtgttctcgctggaatttgcaaaagattaaaattctgcacatttcattaagtcttccacatgggctcaaaataccatcccgcaggctcgacctgacttgccacgttgctttgacaccatctctgattccagtgaacaaaactaagtaagtgtgacttacagccgccctaccaaacattgaaggtgtgagcctgcactgttgttttgtaatgacaatgacaagagtataatgacaagagtataatgacatcctagtccatgaagacatgttttctcttttccctccctctatgtatacttactcactcttaaggaaataatataatttctatttctgcttaaatctgccatctctacttagaattattttcccttgaaaaattaaattgcattatccatcagccaaatggaaaatctgattactaaatgcctacttctagacattatgaattacctgtaatatcacatttcttgggcacttctcagaatgctatgattttacataaaagcataaattacagaatgagaagagtaaagcttagtgcatattatgcaggttcgcagagtgatatgtggcctacgactgtcattgtaatcaaaattgatttttgatcatttataaaactaaaacaactaattgaaagcaaatttactttaactgatgaaattcaagatgaagtgacagtagtcatgaatcacagttctgtagatctgctaaaatgccaatgatctgttattaatggtgaaagtgtttaatatattaatgggaatccaagtaaggaaaataaaacacatattttgcccttaccttaagtcatgttgacatcatacataaatcaggtagaatttgaagatgtttcatccagcattcatcatgaagcaacagagtcaatagcgggcagttacagtctgtaggcaatgctttctggtgtggattatgcaaaaaacttacagtcatttggcttcctttattcccctttgcatgtaaactaccaggtggtaggtagacccattcttggctgccagtatttttaccacttggatagattctgctctctgaggtctttaagacaaacacagcacatgtacattgtgatataggagaaagaacatcagacagaggcagagaactgggcttgtcaaaattaagggtgacctagagccttagtgtccttatatgtaagatgagaagcttggattaaaattcattgctccttacacttgatttttatgcagcagaactttcttcaaaagagatcactcctggaatcccaatatacaaaatggataaaagtaggattgttctgaagtaaagaagtaaaatccagagccccacttatttgagtcatctcctaccttttagatggttattaacattgtttctagttcagaaattctggtgttttatattaatttaaactaaagttaaattaggactagaagagccatttcgtgtgaaaatagacatagtctgagtgatttaggcaaacccatagtgacagatttagtggcctgatacactggcttggaaagatctgttccaagtcagtctcaatacacaaggctcggtgaacacatggagagcagtcttggtggtggtcaagaacatggaatttgctgtgagagagagcttggttagggtctgggctcttccatctgttaactgcaaacttgagcaagttattcaatctccctaatattcagttttctcattcataaaatggattgataatggtaccttctatgtacagttactgtgggtattaaatgaggtaataagcctgtaaaactcctggcatgatgacattggcctacattaattgctcacagagtgagaacttattataaacacaggcatttttgttgaatgactgactgattgaatgaatgaatatagaactagctttctatttgtgatgtatggaatatctctatttcatttaatttcattttgaatattaaaattcaggcttgcttttaaaccaaagtatttgctgatgcaaagaatgaaattctgactatgatacagttacataacttttgaagaaataagaaaaatgctaacacagcatgaacaactttgatttagagaacagagtctctgttaaaatccatgggacttgtcaacttcatatttttgtttatgagcataaaacactctttagtgcatgtcggaatcatttgatgcttgctgaatcacaggttgctggaacccatccccagattctgattcagtctgagatgaggtctgggaatttgcatttttaacttgttgtctggtgatgctgatgctagtggtctgagaatacactttgaggatcactttttcacagtaaaagtcacagtcattaagcaagttaactcaatgagaaatgataatgaaaaggcatgtacctaaatagataaaggacctataccagctatgaatttgagttcagcaataattgtaaaatttgtaattcttttcaggtatttggtttttaaaaaactccctatgtatgcttttatcttatgttttatatggtgtccctcttttcctctctttctctctaatccagtttttaatgtgaacatgtttaatgtgaaaatgttgttcaaagcagaagcgaaccttttgtgtaaccttggcggtattaagtttgtttgtaagctatttctgccctgttagcttctgtactgaaacacgttttcttgcttttgttgcagtatggaagagaagagagcgactggacaattgtgctatcctgaatggaaaatagaggatacaatggaaaatagaggataccaactgtatgctactgggacagactgttgcatttgaattgtgatagatttctttggctacctgtgcataatgtagtttgtagtatcaatgtgttacaagagtgattgtttcttcatgccagagaaaatgaattgcaatcatcaaatggtgtttcataacttggtagtagtaacttaccttaccttacctagaaaaatattaatgtaagccatataacatgggattttcctcaatgattttagtgcctccttttgtacttcactcagatactaaatagtagtttattctttaatataagttacattctgctcctcaaccaaatgcaattttttgtgtgtgtttgaaagctaatttgagaaaatttcataggttacatttcctgcagcctatctttatccacagaaagtgttttcttttttttaaatcaagacttttaaaactggatttcctcccatcactgttttttgaaggtcctccaagtccgtgttaaggtaaatatctgttttcttcctgatgtcacagcctgagcatactctgtgcattaggaagacctgagtgcatttcccaccattgtcctttccacattatgttgtagctggctggctgtcaggcgactacaagactgagggtcttgtgccttatagatctttgtatcccccatggctgacacatagtaggtactcagtaaatggttttataatgaatcagtgaacattttgcttctatagaagtgtaccttctttgtttctatattatgaaacctctttattagaatttgtgattgattctgacagtgtatagatttaccttatattgtctttattttccatgagctactaagtcattagagatactctgaagcatagttagtttaggaaatcacttcatattgattgtattagaattatcttggaattgaagatatatccctagagcaggggaccccaacccccaggccatgggccacacagcaggaagaggtgagtggtgggccattgaggagcttcatctgtatttatggctacttcccatcactcgaattaccacctgaactccacctcttgtcagctcagtggcagcattagattctcatagaagcacaaatcctattgtgaactctgcatgcaagggatctaggctatgcgctccttatgagaatctaatgcctgatgacctgaggtggaacagtttcatcctgaaaccacccttcaccctgcagtctgtggaaaaattgtcttccacaaaactggtccctggtgccaaaaatgttggggaccgctgctctagagagaggtcatgatatcataccaaccaaatggaaatgacaaatgttttatgtcaagtgttaattgcagaaataaatcttttttttttttttttggtagaaaacaaagaggcatactctgatttttatactctgtttttgcaggtgctcttttctttgaatggagatttgatgagcaagtggttaggatgcagggagagctactatgggtgatattttccttgtttaggagctgtgagttaaaattgtatcctttctggtttatctaaggaaagtcaaatcttgacagaaaacatttttccttggaaggtcaactctcagacattgtattttggtttccctcagtcctcataacttccttcttgctgaacatattttattctcttttcagagaaggaaaataaaaaggattctaaaagtttgatgcattggaaaaatttccttgaggcatttagcaacacatagaaaatgggctttgattcttttccaaaacttttagccatagggtcttttatagacagggatagtaaaatgaaaattgagaaatataagatgaaaaggaatggtaaaaatatcttttagggggcttttaattggtgatctgaaatcttgggagaagctgttcttttcaggcctgaggtgctcttgactgtcgcctgcgcactgtgtaccccgagcaacattctaagggtgtgctttcgccttggctaactcctttgacctcattcttcatatagtagtctaggaaaaagttgcaggtaatttaaactgtctagtggtacatagtaactgaatttctattcctatgagaaatgagaattatttatttgccatcaacacattttatactttgcatctccaaatttattgcggcgagacttgtccattgtgaaagttagagaacattatgtttgtatcatttctttcataaaacctcaagagcatttttaagcccttttcatcagacccagtgaaaactaaggatagatgtttaaaaactggaggtctcctgataaggagaacacaatccaccattgtcatttaagtaataagacaggaaattgaccttgacgctttcttgttaaatagatttaacaggaacatctgcacatcttttttccttgtgcactatttgtttaattgcagtggattaatacagcaagagtgccacattataactaggcaattatccattcttcaagacttagttattgtcacactaattgatcgtttaaggcataagatggtctagcattaggaacatgtgaagctaatctgctcaaaaagatcaacaaattaatattgttgctgatatttgcataattggctgcaattatttaatgtttaattgggttgatcaaatgagattcagcaattcacaagtgcattaatataaacagaactggtggcacttaaaatgataatgattaacttatattgcatgttctcttcctttcacttttttcagtgtctacatttcagaccgagtttgtcagcttttttgaaaacacatcagtagaaaccaagattttaaaatgaagtgtcaagacgaaggcaaaacctgagcagttcctaaaaagatttgctgttagaaattttctttgtggcagtcatttattaaggattcaactcgtgatacaccaaaagaagagttgacttcagagatgtgttccatgctctctagcacaggaatgaataaatttataacacctgctttagcctttgttttcaaaagcacaaaggaaaagtgaaagggaaagagaaacaagtgactgagaagtcttgttaaggaatcaggttttttctacctggtaaacattctctattcttttctcaaaagattgttgtaagaaaaaatgtaagacaaaaaaaaaaaaaaaaaaaaacagaggcagaggcaggcagtagcaagaaagcagagcgtaacatcagctagatggtaacatgcaatgtcagctctcttgaagacatgggaaacctaagttacaccttgggttaaaattcttcaccgtattagttttgttgcttcataaaatttacctaagcaagtggtcttgcttgcctcaaatccaagcagtcttgaacacttggaggcaattaatgagtatatcttagtcaaaagaattgttggagctttttattaaagctgcagtttcagttctgcttttggggaattgtgctatgaaagcagctgccaaaataagctcatttattttcttcaatcccactcagtgctcagtcactatattctgtttccttttttttttttcaagttgcatatttggtttccccttatgattgggaaagatgaattttcagcagaaaacagtgtttgttcactttcaaagagtgatagtttctaaaacatttagagcaataaatattcatcagaggtaccaagtaagccagcagaagagttaagggttagagaaatcccttatttcatgtcttgactctaaaatgatcaaagtacttttccttgtaatgtggatttcttcttatgcggatatgcaaaaacttcagttatacgtagtaatgctagcaggtaattttagtggacattttataacaactgtcactttgttttgccacatgtagagtttgttcagctattttccagatatctccccacaaaaggaggcaaagggtaccagcttttcaatgagcattacctattacttggcaaagatgatgaagactctattaatagttcatttgataaatgttgacataaccaacaatagagattaggaagttagttttaagaaatcaatagcatatagacattaccctcatggagtttgtattctactacttgaactgattgtagctataaaagcatagttagatagctgaatagttagatcataagcaaagaaggccagaacacatctcttatcaagaaatcaatgaatagtttatctcatttttaaagcaactttatccttctttaattccttcctttcttctagtgcaaaactacttaataaggttggtgtttaggttagtgttcacaccattcctcatctggtgtgaattaccttctctttctttactatttactaccaacctagtacatgtgttgactgaattcttttcaaacaatgttgagttatcatggtgcacctaataaattaacaccacagattacagcatccttgctgattttctcagcaaagccagattagatggaaataaacaaagaaaatgatcctagagtgaatttttctagaaaatatctattatgaaccatgctgtttaaagtattagcttgaaggtgatggatccagctattcagaaaataactttcatataaccatgattttgcacagtatgaggtcttaaatgtgtggaaagagataaattttttatcattaccacaaaccccttttaaagattcaaaggtggaagaaagtgatttattttttctcttcagcatacatatataaaagacttgtcagatgtttaatttggggaggttgataatgaaacatatcaacagagtatagtagttatagtagtgtttgtgggtaaataatttcctggggtcagacatatataaacatatttgcttcaaaatgataaaggcatgaaatcagtcttaaaaattgaaatgggggtgatgggggagaaaaagaagaacaaatttgaagtgccctttcaaatctgctggatacaagtattgaagttttaagtcatcttattctgtctgaaagtgtatttttcattctacaatagacccaatcaacaagacgtataacttgagttgcatgatgttcagtttatgtaatctactgttgggatggtaagaattgatgtaggctgtggtgtaagaatgaattaaaatatagtttcactggcttttctctacatatccactatcacaatggctaggtttcctgttgctcactgttggattctggagaaaaatttaatgaaagatgatatcagaggaagaataagtggaggtagagaagaaaggagtgatagaggaggggaaaaaaacaaaacatatttttgtgttatccaaaggagctttttccttattctgtcaagcattgagatcttcttcagctttcaatgtagttgctaaatacaaataatgctactaggtagtgactaaatatagcaaacacttcatcagatattagaattaggtcacactattgaggttataatctgaaggttgtgttacatagaaaccactttagattattatcaacttggactaggctttattttataatagcatagtaagtaatatctattgtgtcatttcttcaaccattttattctaagatccatgaagcttcttgaggccaaataaaataataagtttagacaagaagtagattgtgactttttttcccttagagatactatttactatctcctatcctgataggtggaaggtttactgaattggaaattggttgactattagtttttaactaaaatgtgcaataacacattgcagtttcctcaaactagtttcctatgatcattaaactcattctcagggttaagaaaggaatgtaaatttctgcctcaatttgtacttcatcaataagtttttgaagagtgcagatttttagtcaggtcttaaaaataaactcacaaatctggatgcatttctaaattctgcaaatgtttcctggggtgacttaacaaggaataatcccacaatatacctagctacctaatacatggagctggggctcaacccactgtttttaaggatttgcgcttacttgtggctgaggaaaaataagtagttcgaggaagtagtttttaaatgtgagcttatagatagaaacagaatatcaacttaattatgaaattgttagaacctgttctcttgtatctgaatctgattgcaattactattgtactgatagactccagccattgcaagtctcagatatcttagctgtgtagtgattcttgaaattctttttaagaaaaattgagtagaaagaaataaaccctttgtaaatgaggcttggcttttgtgaaagatcatccgcaggctatgttaaaaggattttagctcactaaaagtgtaataatggaaatgtggaaaatatcgtaggtaaaggaaactacctcatgctctgaaggttttgtagaagcacaattaaacatctaaaatggctttgttacaccagagccatctggtgtgaagaactctatatttgtatgttgagagggcatggaataattgtattttgctggcaatagacacattctttattatttgcagattcctcatcaaatctgtaattatgcacagtttctgttatcaataaaacaaaagaatcctgtttgtgtggtttcatgaaatcagcattgttgaatgcatgaagtaataatgctaaattaacatttttatgatgtgtcaaggtttctggtcaagggaagtaaatgtaggatagtatttttacaccaaaatgacacagagagaattgagcacaccagaaagaccagaaaccacaccactggatagagattcaatatgtttctttttcaaacatttggacaagaaaaaaatgggcatttaaaaattcttccttcccctggttatggatttatctgtagtaaaacttagctttgtcgtttgagatttgcacagaatggggggagtagattacctcttcccattcattgtcataatggatctacatcactgataaacaccatacttctatatgtggttaactagctttagaataaaagacactttaaaaagtaaaaggcctagagatcttcaatgaagtgtcccttttagccaaaccaggccttgcagaaattgtcctcaaaagcaccaagggagaacaaagccaagtgcagaattacccaagggtcacacattttgtattcattttcttataatttgcccaaatgatttgaagtacagcaaaacctgaagttttgcaaagagttactgtaaactgaacttaaaaatgtcagagtgctcggtgacccacttctccagaccctgtcaacctgtgaaaatattggcctttattcagatctctcaagaagttacgtgcagagtttggaaggtctaggcaaaggttattagtcaagtgttcttacagtgtcaacgctcaactcccacaagcgtgagaaggagagacctgtcattcctgagggtgatgacatacatttactggagcttatataatttatcagataagacagcagtctccttcagggtagaaagtgtgttttctacattgatttagtacaaaacaaaaagaaaaggggatatttcaaattttataattatttttctgctaagctgattcagtgtgatttaagcatatttttcaaatcatgaatctgattccatatacatatgtgccttatattgtgataatttatttttaagtgaaatatgctatcatagcctgactttatgtatagtggcgacaacttgcaggatcgcatttctgtaaccaaacggccgacagctgaggtgtagatgcttcctatggtctgtagaataatcactgggcttgttctctagctatgtctgtatgcaatcgcgacagtgttgatcaaaacccatgatcattctctccaaaggtctttgtcactaagccactagggattctgaaaagttcgtgagctgaaacaaataaattgagttggaagattcatgttgactgtttgtatcccaaatgcaatataccagtttttgaagctgaactgattacattaaaaagggatcaagctgcatttgttttaaagatagttacatgaccaaaagttgctcaacatcattggtcattagatatgtgcaatcaaacctgcaatgagatatcacttcaccccagttaaaatggcctatatccaaaatacaggtaataacaaatgctggtaagggtgcagagaaaagggaaccctcttacactgttgttgggaatgtaaattcatacaaccactatggagaacagttggaggttcctcagaaaactaaacattgaggtatgatatgatccagcaatcccactgctaggtatgcatccaaaagaaaggaactcattacatcaaaaagatatctgcaattctatttttgttacagcactgtttacaatagctatgatttggaagcaacctaagtgtccatcaatagatgaatggatgaagaaaatgtggtacatgtacacaatggagtactattcagccagaaaaaagaatgagatcctgtcatttgcaacaacttgaatggaactggaggtcattatgctaagtgaaataagccaggcacagaaagacaaactttgcatgttctcacttatttgtgggatctaaaagaactattgaactcatggagatagagcgtagaatggttacaagaggctgggaagggtaatgttggtggggaggacagaggaagtgggaatggttaatgagtacaaaaaaatagaatgaataagacctcctatttgatatcacaacaaagttactatagtcaataataacctaattgtacattttgaaataacttagagaataattggattatttgtaactcaaaggataaacacatgaggggatgcataccccattctccacgaagtgcttatttcacatttcatgcctgtgtcaaaacatctcatgtaccccataaatatatacacctactatgtacccacagaaattaaaaatataaaaaagatagttacataatctagtaaacacttctcatgaaaaatttgtttgtgataatgataagcaaaggtgatgcatactttaatctctggcttcttccaagccattgtaggatgccacaaaacagctttcttaacatgcaagtagcctaataattaacaggatggttaagggccattggctgatcctgtgatcttgagtaagtttcttaaattggcaaaaaaaaaaaaaaaaaaaaaggagatcataaacataccaatcttggccaggcgcagtggctcatgcctgtaattccagcactttgggaggctgaggtgggcggatcacctgaggtctggagttcaagaccagcctgaccaacatggagaaaccccgtctctactaaaaatacaaaattagctggacgtggtggcacatgcctgtaatcccagctacaagggaggctgtggcaggagaattgcttgaacccggaaggcggaggttgcagtgagccaagatcgcaccgttgcactccagcttgggcaacaagagcaaaactccatctcaaaaaaaaaaaaatagtaccaatcttattggttataaggattagtgagaatataaataccttacaacagttcatgtgtaaaatgtaaactgatggaattttattaaaaatgaatgaacccaaagacagaaaggggctaatagctcacaaaagtcctgtgtgaagaagctgtggtgacaacttgcaggatcacatttctgtaaccaaacagcccacagccgagatgtagacgcttcttatgtctgtagaataatcactgggcttgttttctagctatgtatgtatgcaacaaggacagtgttgatcgaaacccatgatcattcctctccacccagtggaggtggtaaatgttcctaggttcagagcacagctgcttgggacagggggataatctagcattcccagactgcttagagtgagttaaaaatgtgtgatttactcaagtctggaggtaaaaaccagggctggattaaacaatgatgatcgattattgaaaaatagacgtttttcgtttttacaaatataagttctatgctccccatgaatacaacagtgatgattcatttcatgcgtcaacttaactaggctacggtgccctcttgattggtaaaacactaacctaaatgttgctgtgaagttatcttttagatgtgattaatatttaaatcagtagactgagaaaagcagatcaccctccataatgtgagaaagtgagtgggcctcatccgatccattgaaggccttaagagcaaagacaggaggaatttggccttaaaactgcaaatggaaattctgcctgaatttccaacctgcttggcctgccctgcagatttcagactcaagatcataacgtcaactcttacctgaatttccaaccagttggcttgctgtacagaatgtggactggtcagcctccacaattttatgagacagttgaattccttagaaaaaattaatctctctattcatgtatatatgtaggtagatagatatagatagcagtacagtgcctatttattctttatagaatcctgacaaatacaacaacaaacagcatttttacttacagtttcctctactaagtaaaaaaatcacgtcctctattgttctctttggactcaggcaagcctattctttcagaaaattgttcatcacataaggcactagtgatagtgtactctaatcataaacatagtacctaagaaaaaaataagaattccaggatgggcaacgttgcacaacccaaagtaactaaatgagggcggacatcaaaagtgtattttcaggcatcaatgggagaaatagttctgagtgttaggccatgaaatgccttaaattattgttattattattgtgtttagggcctgaatctatgccccgagaatgcaacatggccaaaagtagacagaaaaagcttttttggtataattgaaggatgggatgattttgtcatgtaagagccattttaacgataaaagtcagcttcatagttttactaaaatgtgtggctgcagtgatcaccatgggtgtcacccagacctcctgtctacacagtatgacaaccaggttcaaccccagacttactggtgctcccactaccaggtacaagttaggaaacatctctgtagtcatttcaactttcatatctctgtattccacatctattaaagttatcttttgcaagtcagtttttgtaaactcctgaataaagagaacaaattgatctgcatctgcagtgagatttgacaaggcaacttaaaaggcagtaaggagctgaacaaggttaagttagggagatggggattatccacagcagctcctcaccagtttggttct

SEQ ID NO: 11 - DNA, 2773 bp, Homo sapiens
agtgtcttcctgctgatgcaatccgctaggtcgcgagtctccgccgcgagagggccggtctgcaatccagcccgccacgtgtactcgccgccgcctcgggcactgccccaggtcttgctgcagccgggaccgcgctctgcagccgcagacccggtccacacggccaggggctacgacccttgggatctgccctccgctcagctcgagcttccctcgtggccgacggaacaatgaaggattgcagtaacggatgctccgcagagtgtaccggagaaggaggatcaaaagaggtggtggggacttttaaggctaaagacctaatagtcacaccagctaccattttaaaggaaaaaccagaccccaataatctggtttttggaactgtgttcacggatcatatgctgacggtggagtggtcctcagagtttggatgggagaaacctcatatcaagcctcttcagaacctgtcattgcaccctggctcatcagctttgcactatgcagtggaattatttgaaggattgaaggcatttcgaggagtagataataaaattcgactgtttcagccaaacctcaacatggatagaatgtatcgctctgctgtgagggcaactctgccggtatttgacaaagaagagctcttagagtgtattcaacagcttgtgaaattggatcaagaatgggtcccatattcaacatctgctagtctgtatattcgtcctacattcattggaactgagccttctcttggagtcaagaagcctaccaaagccctgctctttgtactcttgagcccagtgggaccttatttttcaagtggaacctttaatccagtgtccctgtgggccaatcccaagtatgtaagagcctggaaaggtggaactggggactgcaagatgggagggaattacggctcatctctttttgcccaatgtgaagcagtagataatgggtgtcagcaggtcctgtggctctatggagaggaccatcagatcactgaagtgggaactatgaatctttttctttactggataaatgaagatggagaagaagaactggcaactcctccactagatggcatcattcttccaggagtgacaaggcggtgcattctggacctggcacatcagtggggtgaatttaaggtgtcagagagatacctcaccatggatgacttgacaacagccctggaggggaacagagtgagagagatgtttggctctggtacagcctgtgttgtttgcccagtttctgatatactgtacaaaggcgagacaatacacattccaactatggagaatggtcctaagctggcaagccgcatcttgagcaaattaactgatatccagtatggaagagaagagagcgactggacaattgtgctatcctgaatggaaaatagaggatacaatggaaaatagaggataccaactgtatgctactgggacagactgttgcatttgaattgtgatagatttctttggctacctgtgcataatgtagtttgtagtatcaatgtgttacaagagtgattgtttcttcatgccagagaaaatgaattgcaatcatcaaatggtgtttcataacttggtagtagtaacttaccttaccttacctagaaaaatattaatgtaagccatataacatgggattttcctcaatgattttagtgcctccttttgtacttcactcagatactaaatagtagtttattctttaatataagttacattctgctcctcaaccaaatgcaattttttgtgtgtgtttgaaagctaatttgagaaaatttcataggttacatttcctgcagcctatctttatccacagaaagtgttttcttttttttaaatcaagacttttaaaactggatttcctcccatcactgttttttgaaggtcctccaagtccgtgttaaggtaaatatctgttttcttcctgatgtcacagcctgagcatactctgtgcattaggaagacctgagtgcatttcccaccattgtcctttccacattatgttgtagctggctggctgtcaggcgactacaagactgagggtcttgtgccttatagatctttgtatcccccatggctgacacatagtaggtactcagtaaatggttttataatgaatcagtgaacattttgcttctatagaagtgtaccttctttgtttctatattatgaaacctctttattagaatttgtgattgattctgacagtgtatagatttaccttatattgtctttattttccatgagctactaagtcattagagatactctgaagcatagttagtttaggaaatcacttcatattgattgtattagaattatcttggaattgaagatatatccctagagcaggggaccccaacccccaggccatgggccacacagcaggaagaggtgagtggtgggccattgaggagcttcatctgtatttatggctacttcccatcactcgaattaccacctgaactccacctcttgtcagctcagtggcagcattagattctcatagaagcacaaatcctattgtgaactctgcatgcaagggatctaggctatgcgctccttatgagaatctaatgcctgatgacctgaggtggaacagtttcatcctgaaaccacccttcaccctgcagtctgtggaaaaattgtcttccacaaaactggtccctggtgccaaaaatgttggggaccgctgctctagagagaggtcatgatatcataccaaccaaatggaaatgacaaatgttttatgtcaagtg

SEQ ID NO: 12 - protein, 384 aa, Homo sapiens
MKDCSNGCSAECTGEGGSKEVVGTFKAKDLIVTPATILKEKPDPNNLVFGTVFTDHMLTVEWSSEFGWEKPHIKPLQNLSLHPGSSALHYAVELFEGLKAFRGVDNKIRLFQPNLNMDRMYRSAVRATLPVFDKEELLECIQQLVKLDQEWVPYSTSASLYIRPTFIGTEPSLGVKKPTKALLFVLLSPVGPYFSSGTFNPVSLWANPKYVRAWKGGTGDCKMGGNYGSSLFAQCEAVDNGCQQVLWLYGEDHQITEVGTMNLFLYWINEDGEEELATPPLDGIILPGVTRRCILDLAHQWGEFKVSYLTMDDLTTALEGNRVREMFGSGTACVVCPVSDILYKGETIHIPTMENGPKLASRILSKLTDIQYGREESDWTIVLS

SEQ ID NO: 13 - DNA, 2613 bp, Homo sapiens
tgcagccccgcgtccccgcagcctccccatggccagcccgcttcgctccgctgcggcccttgcccgccaggattgcagtaacggatgctccgcagagtgtaccggagaaggaggatcaaaagaggtggtggggacttttaaggctaaagacctaatagtcacaccagctaccattttaaaggaaaaaccagaccccaataatctggtttttggaactgtgttcacggatcatatgctgacggtggagtggtcctcagagtttggatgggagaaacctcatatcaagcctcttcagaacctgtcattgcaccctggctcatcagctttgcactatgcagtggaattatttgaaggattgaaggcatttcgaggagtagataataaaattcgactgtttcagccaaacctcaacatggatagaatgtatcgctctgctgtgagggcaactctgccggtatttgacaaagaagagctcttagagtgtattcaacagcttgtgaaattggatcaagaatgggtcccatattcaacatctgctagtctgtatattcgtcctacattcattggaactgagccttctcttggagtcaagaagcctaccaaagccctgctctttgtactcttgagcccagtgggaccttatttttcaagtggaacctttaatccagtgtccctgtgggccaatcccaagtatgtaagagcctggaaaggtggaactggggactgcaagatgggagggaattacggctcatctctttttgcccaatgtgaagcagtagataatgggtgtcagcaggtcctgtggctctatggagaggaccatcagatcactgaagtgggaactatgaatctttttctttactggataaatgaagatggagaagaagaactggcaactcctccactagatggcatcattcttccaggagtgacaaggcggtgcattctggacctggcacatcagtggggtgaatttaaggtgtcagagagatacctcaccatggatgacttgacaacagccctggaggggaacagagtgagagagatgtttggctctggtacagcctgtgttgtttgcccagtttctgatatactgtacaaaggcgagacaatacacattccaactatggagaatggtcctaagctggcaagccgcatcttgagcaaattaactgatatccaggtaaagtatggaagagaagagagcgactggacaattgtgctatcctgaatggaaaatagaggatacaatggaaaatagaggataccaactgtatgctactgggacagactgttgcatttgaattgtgatagatttctttggctacctgtgcataatgtagtttgtagtatcaatgtgttacaagagtgattgtttcttcatgccagagaaaatgaattgcaatcatcaaatggtgtttcataacttggtagtagtaacttaccttaccttacctagaaaaatattaatgtaagccatataacatgggattttcctcaatgattttagtgcctccttttgtacttcactcagatactaaatagtagtttattctttaatataagttacattctgctcctcaaccaaatgcaattttttgtgtgtgtttgaaagctaatttgagaaaatttcataggttacatttcctgcagcctatctttatccacagaaagtgttttcttttttttaaatcaagacttttaaaactggatttcctcccatcactgttttttgaaggtcctccaagtccgtgttaaggtaaatatctgttttcttcctgatgtcacagcctgagcatactctgtgcattaggaagacctgagtgcatttcccaccattgtcctttccacattatgttgtagctggctggctgtcaggcgactacaagactgagggtcttgtgccttatagatctttgtatcccccatggctgacacatagtaggtactcagtaaatggttttataatgaatcagtgaacattttgcttctatagaagtgtaccttctttgtttctatattatgaaacctctttattagaatttgtgattgattctgacagtgtatagatttaccttatattgtctttattttccatgagctactaagtcattagagatactctgaagcatagttagtttaggaaatcacttcatattgattgtattagaattatcttggaattgaagatatatccctagagcaggggaccccaacccccaggccatgggccacacagcaggaagaggtgagtggtgggccattgaggagcttcatctgtatttatggctacttcccatcactcgaattaccacctgaactccacctcttgtcagctcagtggcagcattagattctcatagaagcacaaatcctattgtgaactctgcatgcaagggatctaggctatgcgctccttatgagaatctaatgcctgatgacctgaggtggaacagtttcatcctgaaaccacccttcaccctgcagtctgtggaaaaattgtcttccacaaaactggtccctggtgccaaaaatgttggggaccgctgctctagagagaggtcatgatatcataccaaccaaatggaaatgacaaatgttttatgtcaagtg

SEQ ID NO: 14 - protein, 394 aa, Homo sapiens
MDLRSAAARQDCSNGCSAECTGEGGSKEVVGTFKAKDLIVTPATILKEKPDPNNLVFGTVFTDHMLTVEWSSEFGWEKPHIKPLQNLSLHPGSSALHYAVELFEGLKAFRGVDNKIRLFQPNLNMDRMYRSAVRATLPVFDKEELLECIQQLVKLDQEWVPYSTSASLYIRPTFIGTEPSLGVKKPTKALLFVLLSPVGPYFSSGTFNPVSLWANPKYVRAWKGGTGDCKMGGNYGSSLFAQCEAVDNGCQQVLWLYGEDHQITEVGTMNLFLYWINEDGEEELATPPLDGIILPGVTRRCILDLAHQWGEFKVSYLTMDDLTTALEGNRVREMFGSGTACVVCPVSDILYKGETIHIPTMENGPKLASRILSKLTDIQVKYGREESDWTIVLS

SEQ ID NO: 15 - DNA, 21457 bp, Mus musculus
  misc_feature (1)...(21457): n = A,T,C or G
ttcagtgtcggagttctaggcatatgctgccacacccaactttttaagtgggtgctgtcaatcaaactcgggccctcccttttctcccactttcatctcccagacccttctcttcttttccctgagaaaaagctcatgtgtgcttagacctgcttcctgtccaacgaaagctgggttccactttcaccctgaacgtttcccagtcctttggcatccagctttctgcagctttgtctaatataatattcttttaaaaccttatgggctttctgtgactgcatcttgaacccatgtgtgcactaaatgccacacccatgattaatttcagaaagattctacgtaggctgctgaatctttaatattctcggaagcccctctgttgagctcaaagagtctgcaaaacaccatgaaatacttcctggggttttcccaaaggccctgcagccacgctcttggtttaatctttcctttaggccattttcttactttgagaatccagtccctcacaggctgagcatgagggacagttttattttccaaagcacaaactgggcaggacctacttagctagtcccaccccaccccccaccccacactgccacaccctttcaatagtcacacagctagaagcatccaaatgtcactttcagcactctttctagattcctttagaactcacaacttcattaaagcactgcctgaccacgtggtggtaatacacacctttaagcactcgggatcccctgcagaggcaaatggatctctgagttggagaccagcctggtctatagagtaagacaggacagccaggaccatacagagagaccctgtctaaaaaaaagcggggaggggggagaaggaagaggagggagcaaaggaggaagaggaagaagaggaggaggggtatagtagtttgaataaaaatggcctccacaggcccatagggagtggcactattatgaggtgccctgttagaggaagtgtgtctctggggatgggcttttggggtttcagaagctcaagtcaggcctggtggctctctcttcctgctgcctgtagatccagatgcagaactctcagctccttctccagcaccacgggctgcttcctgctgccatgctcccgccacgatgataatggaccaaaccttaaaacctcaagccagtcccaattaaatgttttcctttataagagttgccgtggtcatggtgtctcttcacagcaatattgttgcggtcatgaaagaccttaaccaaaagcaatctggggaggaaagggtgtggtgtgctttgttttctcatagttccatgtatctgttcatcttcaaaagcagtgagggcaggaactcaagcagagtaggaacctgcaggcaggagctgatgcagaagccatggaggggtgctgcttaaaggcttgcgccccatggcttgcccagtgtgctttcttatggaacctgggaccaccagcttaggggtgacaccacccataatggactgggcccttccacatcaatcactaattaagaaaatgtccttcaggcctaactacagcctgcttttatagaagcatttcctcaattgagtttccatcttctctgatgactctaacttgtggcaaactgacttaaaactacccagggcagccagcctgagctgcacagttcagaaaaaagaaaagagggtttcttgaggtgggtctttggctcaaggtgcttgccacaaaacttgatgacccgagtttaacccctgggtgccacatggtaggaaagaaccaacttctgcaaattgtcctctgatcaccacacatgggccatggcatgcaaaaggacatacacgaacatacacaataaagtgtaaagaaaaaaattatcttagcctgtgttctattgctgtgaagagacatcatgaccaaatcaactcttacaacagaaaacatttcgttggggctggtttgccatttcagaggtttagtccattatcatcatgacagggagcaaggcagcacactgccagatatgatgctggagaaggagctgagagttctgcatctggatctacaggcagcaggaagagagagacatcaggcctgacttgggcttttgaaacctcaaagcccacccccagtgacacactccttccaacaaggccacacctcctagtccttctcaagtagtgccactccaatgaccaagcattcaaatatatgagtcgatgggaccattcctatccacaccaccatatacttaaattcaagggggtttttggttggttggttggttagttttggtttagcaaaaaagaaaaactagaagaaaagagatgtgtttatctcactgatttggaatatgaagcccaaggttgtagacccatctgtcagtatctggtaggacccttccttccagctgcttctggggagtttgtagaagactcacaaggaagaaagatcacacggagtggaagcaaaaatgagatgagactaatccagtccttcattaacccactcatgaagatgcaacccttgtggccaaattaccttccaccttttaagagtaccaccatattcatacaggtgtactggggaccgagcttctagagtggatgtctgggagagtcacacacatctaaaccacagcaggtctcctgtcccctaggtcaccacacccaatgtttttccaactgtgtaaccactacatagcacaagcactcttgttccagacaccctgtaatttccttagtaagaaagcttgggaccaatcaggtagctacagaacaggcaggctttttccttatgggccccaggagagaatgttccagcaaatcagagacaaaatgcatggctctctaatagtcatatgcaggaatctcttggcatcacctctgcatgacctgttgactgaagtaatcagaagcccctagatagcccagaagggaacacacagggctgtggtggcacacactgtatgctcagcacttgggaggtacaaacaggacagtcagaattcaaagtcatcctcagctctatagcaagttagagacagagagattctctctctctctctctctctctctctctctctctctctcactcacacacacacacacacacacacacacacacacacacacacacacacacaccagggtctccctatgtctagtcttcacttctttttggttggttggttggctgggtttttttttttattttatttatttatttatttatttatttatttatttatttatttatttatttaatgtattatgagtgttctatctgcatgtacacctgcataccagaagaggcatcaggtcccattacagatggttgtgagccaccatgtggttgctgggacttgaactcaggacctctggtagagcaagcagtcaatgctctaaaccactgaaccttcatccctccagcaccccagacttcatttcttagtgaagaaatatacaataatttgcatctatgttttagaatcaacatgggctgacctggggtataccgtttgttgtttgttttgagaaattcattcattcattcattcattcattgttggtttggggggataaggtctcatatatgccaggctggtctcaagctctctatgtagccaaacattgccttgaactcctgaccctcctgcctctaattcctgggttctgggatttcagacatgtagcaccatacctggtttagcccctaggattcatgcatactgggtaaacattctacccactgggctacatccccagcctcccttctattgtacattgaatcacaattacacatacttttatggtcatataatacccaaaatgtcacctgggagctgtctgagctaggcaatcccaaatggtgactcacagtcagttctgagctaaacaatcccaaatggtgactcacagtcagttctccacatatgtagctcagacttcttcacactgacactaatttccaagaaagcaactgccaacacaaaaacagtgcttaggcatgtgtttgcatcacaccaagtttgtcacctggccacacctagaactggtatagatgctgaaggcttaattctttgggggctacaaatgtggcaacctaccacccatgagcaactctggttcatctttaaagacacagtacacacctgctgcgaccacttcaggaagaagaaaaggaatggatgattctgccaacactctaatagcatttatgaaatgtggtggtttgaatgaaaatggccccccgacagacgcattaggaattacattattggaggcatggccttgttggaggacgttggaggtgtgatctttgaggtttcagaagctcaagccaggcccagtagcttgctgcctgtagatccagatgtagactgtcagctaactctccagcaccatgtctgtgtgccaccatgcttcctgccatgataaaggcctagacctctgaactatatgccaggtgccaggcccaattaaatgttttcctttctaagagttgttgtggtcatggtgtctcagaacaacaataaaaccctaactaagacaaaaatcctacatggttatatttatatgactatacagggtgactgccctctgggttgttctaaagaaaagtatttttgctgttgttttaatcttgagttttcctacccatgtgtcccaagctagagctactggagacaaaggagagggacccacctgggaccaacaagaggccatcttaccttgattcaattctttccagctttcagcttccgacttgtccattcggaaatgggagacttttagtctcctctgtctccatccatcatccctttccgaatccttggttgtcttctttgagcctttgattctaaccgactggagaggttgctcaagcagatacaaagttgcaagctctcaacaggccaggctcccctccccttcctgaaggcagaatgcctggggacccagaaagtaggccagggcctggaaaccttggcaaaatagcacagctaggcctggtatgggcatgcagagcagcatccagggcctcaggctgcctgagccctgacatatctaacagccctctgagtagtccgggcctgccccaaaataaaagaaccaaccagctcccaggctgtgggaggagaaagtgtcaaactaaagcaatagtaaagatccctgaagctgattcaaaagccactaagcaggaaggaacacacagcagttcggggacagaagactacagcatacatggagtgagaaagacaagaggctgagtgaatgagaaagaatggggttctgggtgagcagctgaggccagggcacctggggactttagaaattcccctatgcatttctaagaacccgcccagtaaagctgtaaaggggattcatctgtgaagggggtggtctttagggcccctgttccttagaacccaagccccggggaactttgcataaagtggcttaccagaaagatagcccccactcctgttagaatgtcccattgtctccagcactggggaagcacatagctctccaagggaggggactgaaattgcatctgcaggcccagggatggcttccaacagtgccatttactgtattgaaagcttcagtgaccgtgccagggccaacttctatgaagaaacaggagactgggcaggcagatggctgagaggcagagccaggccacaagactctccacccagaattcagagaccgggaaccaaactagcctttaaaaaacataagtacaggagccagcaagatggctcagtgggtaaaggtgcctaccagcaagcctgacagcctgagttcagtccccacgaactacgtggtaggagaggaccaaccaactctggaaatctgttctgcaaacacatgctcacacacacacacacaaatagtataaacaattttaaatttcatttaaaaataatttgtaaacaaaatcattagcacaggttttagaaagagcctcttggtgacatcaagttgatgctgtagatggggtatcattcctgaggacccaaaaccgggtctcagcctttccccattctgagagttctctcttttctcagccactagctgaagagtagagtggctcagcactgggctcttgagttcccaagtcctacaactggtcagcctgactactaaccagccatgaagaaacaaggagtggatgggctgagtctgctgggatgggagtggagttagtaagtggccatggatgtaatgaccccagcaatgctggctagaaggcatgcctcctttccttgtctggagacggaacgggatcatcttgtactcacagaagggagaacattctagctggttgggccaaaatgtgcaagttcacctggaggtggtggtgcatgcttttaactccagtactcaggaggcagggccaggtggatctctgtgagttcaagaccagcctgcactatggagagagttttgggacagccagagttacacagaaaaatcctggtggaaaatctgaaagaaagagagaaagaaagaaagaaagaaagaaagaaagaaagaaagaaagaaagaaagaaagaaagaaagaaaggaagaaagaaagaaagagtggcaggcaggcaggcaggaggaaggaaggaaggaaggaaggaaggaaggaaggaaggaaggaaggaaggaaggaaggaaaataggtgcgacttcaagatccggagttacaagcagaatgcactgtttccctaacagggccaagtgttttgagtaactgaaggtgggcatgatgcctgggaagcagaaacaagccaggcagatgcaccccttgccttgcttccgaagggctgcagtagcatggaaaacatggaaaacaaccaatccattccctttgctgatataacaggctccaaagccaaaacctgtcactggaggctcaagaaccagatctccagccaagaggcaaaggannnnnnnnnnnnnnnnnnnnnnnnnnnnnnnnnnnnnnnnnnnnnnnnnnnnnnnnnnnnnnnnnnnnnnnnnnnnnnnnnnnnnnnnnnnnnnnnnnnnnnnnnnnnnnnnnnnnnnnnnnnnnnnnnnnnnnnnnnnnnnnnnnnnnnnnnnnnnnnnnnnnnnnnnnnnnnnnnnnnnnnnnnnnnnnnnnnnnnnnnnnnnnnnnnnnnnnnnnnnnnnnnnnnnnnnnnnnnnnnnnnnnnnnnnnnnnnnnnnnnnnnnnnnnnnnnnnnnnnnnnnnnnnnnnnnnnnnnnnnnnnnnnnnnnnnnnnnnnnnnnnnnnnnnnnnnnnnnnnnnnnnnnnnnnnnnnnnnnnnnnnnnnnnnnnnnnnnnnnnnnnnnnnncctcgccgaccaccccaccccctccatccttttccctcagcctccgattggctgaatctagagtccctccctgctcccccctctctccccacccctggtgaaaactgcgggcttcagcgctgggtgcagcaactggaggcgttggcgcaccaggaggaggctgcagctaggggagtccaggtgagagcaggccgacgggagggacccgcacatgcaaggaccgccgcagggcgaggatgcaagccttccccagctacagttttgggaaaggataccagggcgctcctatatgggggcgcgggaactggggaaagaaggtgctcccaggtcgaggtgggagaggaaggcagtgcggggtcacgggctttctccctgctaacggacgctttcgaagagtgggtgccggaggagaaccatgaggaaggacatcaaggacagcctttggtccccaagctcaaatcgctttagtggtgcgaatagagggaggaggtgggtggcaaactggagggagtccccagcgggtgacctcgtggctggctgggtgcggggcaccgcaggtaagaaaaccgcaatgttgcgggaggggactgggtggcaggcgcgggggaggggaaagctagaaaggatgcgagggagcggaggggggagggagcgggagaatctcaactggtagaggaagattaaaatgaggaaatagcatcagggtggggttagccaagccgggcctcagggaaagggcgcaaagtttgtctgggtgtgggcttaggtgggctgggtatgagattcggggcgccgaaaacactgctgcgcctctgccaaatcacgctacccctgtatctagttctgccaggcttctccagccccagccccaattcttttctctagtgttcccccttccctcccctgaatctcaagcccacactccctcctccataacccactgttatcaaatctaagtcatttgccacccaacaaccatcaggaggcggaagcagacgggaggagtttgagatcaacttgggctacatcacgagttccaggctcaccaaggcttcttaaggagaccttgtctctaaaattaattaattaattaattaatagtcccctttctctgccacagaaccttgggatctggctcctggtcgcagctccccccaccccaggctgacattcactgccatagcccatccggaaatcctagtctatttccccatggatcttgaactgcagagagaatggcagagtggcccgccctgtgcaaaggatgttcctagcctaggtggagctcgcgaactcgcagactgtgcctctcttgggcaaggacaggctagacagcctgccggtgtgttgagctagggcactgtggggaaggcagagaacctgtgcagggcagcaatgaacacaggaccagaaaactgcagccctaggaacactcaagagctggccatttgcaagcatctctggcctccgtgcttctcactcatgtcccatgtcttatacaggcctctgtggcacctcgcttgcctgatctcatccctagccgttaagctttctgcatgacttatcacttggggcataatgctggatacctaccattttcttagaccccatcaaaatcctatttgagtgtacggttcggagaacctcatttatccggtaaatgtcttttactctgctctcagggagctgaggcaggacatcctgagatacattgggagaggagatacagtttcaataaaataataggttgggtggaggtacatgcctataatgccaccactcaggaaatggtggcagcttcgtgagtttgaggccaacccaagaaacatagtgaaaccctgtcagtaaataagtaagcaagtatttgagtatctactatatgctagggctgacctggacattaggggtcatcttctgaacaaactagtgcttgagggaggtatttggggtttttgtttgtttaatggatctgaatgagttccagagactggctacacagcgatatgactgagcttaacacccctaaagcatacagtcagaccaattagacaataaaaggtatgtatagcttaccaaataaaaaaattgtattttcaagagagtgtctgtctgtgtagccctggctgttcttgaactcactctgtagaccaggctggcctggaaatccatctgcctgcctctgcctctctgcctctctgcctctctgcctctctctctgcctctctctgcctctctctgcccctctctgcccctctctgcccctctctgccgccctctgccttttgccctctgccctctgttctctggcctctgccctctgccctctggcctctggcctctgcctctgcctcttgagtgctggaatcaaaggtgtgagctctgtaggtcttaagttccagaagaaagtaatgaagtcacccagcagggaggtgctcagggacagcacagacacacacccaggacataggctcccacttccttggctttctctgagtggcaaaggaccttaggcagtgtcactccctaagagaaggggataaagagaggggctgaggtattcatcatgtgctccgtggatctcaagccctcaaggtaaatggggacccacctgtcctaccagctggctgacctgtagctttccccaccacagaatccaagtcggaactcttggcaccatgaacccagccatcagcgtcgctctcctgctctcaggtactgggcaagggtcagggctggcattctaaggaatctggcttcctcccatcccgggaagtagcctctttgccatagtctcaggggcacaggtggttgggaggtgcgggggtggggagtggggaggagcctcaacctcaccagtggtggtctttgacatattagaaactccataatggatctaggaactcctcttgctgggtggtggtggttgtggtacacacctttaatctcagcactcaggaggcagagtcaggtggatctgttagtctgaagccagcctggtctacagagcaaattccaggacagccagagctattctcaagatagagaatccctttcttgaaaaaaccatttaaaaacaaaaacaaaagcaacacactcctcttgatctcctgttcttgaaacacattgttgggacccagaacttcagtagattgatggaagttggagtctgcaagtggtggaacatcccaccaatacctcaagggcgagtgcaaaccccacatccccccagctcaagtctacttttcctgcaggtgggaggccccgggtctgtgtctccccaaattcagagaaggcactgctgtgccagtcttgcaggtgtcccgagggcagaaggtgaccagcctgacagcctgcctggtgaaccaaaaccttcgcctggactgccgccatgagaataacaccaaggataactccatccagcatgagttcagcctgacccgagagaagaggaagcacgtgctctcaggcacccttgggatacccgagcacacgtaccgctcccgcgtcaccctctccaaccagccctatatcaaggtccttaccctagccaacttcaccaccaaggatgagggcgactacttttgtgagcttcaagtctcgggcgcgaatcccatgagctccaataaaagtatcagtgtgtatagaggtgagactggttcccagaaagataaaatgtccaggttagccaggctggggtagccaataaaaaaaaaaaaaaaacaggcacctccattacccttcccctaactgctggtctcctgggaaactgctgctgtctatgtgagtggggcaagattaggggccagaaagggggagcttgtagtaaaagcacagttgaggaaactaaatgggaaaggcagtacagtggtgattcttgtggtgtggaggttctgttacagcatccggtggagccgctaagatgagaaagcgccagctagctgccttgaacagctgacacctgtctttgcccgcctgagtcctgatctcccctcctcccggcaccccttctctatccacagacaagctggtcaagtgtggcggcataagcctgctggttcagaacacatcctggatgctgctgctgctgctttccctctccctcctccaagccctggacttcatttctctgtgactggttgggcccaaggagaaacaggagccctcgaggtccttcctctgcagaggtcttgcttctcccggtcagctgactccctccccaagtccttcaaatatctcagaacatggggagaaacggggaccttgtccctcctaaggaaccccagtgctgcatgccatcatcccccccaccctcgcccccacccccgccacttctccctccatgcataccactagctgtcattttgtactctgtatttattccagggctgcttctgattatttagtttgttctttccctggagacctgttagaacataagggcgtatggtgggtaggggaggcaggatatcagtccctggggcgagttcctccctgccaaccaagccagatgcctgaaagagatatggatgagggaagttggactgtgcctgtacctggtacagtcatactctgttgaaagaatcatcggggaggggggggggctcaagaggggagagctctgctgagcctttgtggaccatccaatgaggatgagggcttagattctaccaggtcattctcagccaccacacacaagcgctctgccatcactgaagaagccccctagggctcttgggccagggcacactcagtaaagatgcaggttcagtcagggaatgatggggaaaggggtaggaggtgggggagggatcaccccctcctctaaaacacgagcctgctgtctccaaaggcctctgcctgtagtgagggtggcagaagaagacaaggagccagaactctgactccaggatctaagtccgtgcaggaaggggatcctagaaccatctggttggacccagcttaccaagggagagcctttattcttctttcccttgcccctctgtgccagcccctcttgctgtccctgatcccccagacagcgagagtcttgcaacctgcctcttccaagacctcctaatctcaggggcaggcggtggagtgagatccggcgtgcacactttttggaagatagctttcccaaggatcctctcccccactggcagctctgcctgtcccatcaccatgtataataccaccactgctacagcatctcaccgaggaaagaaaactgcacaataaaaccaagcctctggagtgtgtcctggtgtctgtctcttctgtgtcctggcgtctgtctcttctgtgttcttccaaggtcagaaacaaaaaccacacacttcaacctggatggctcggctgagcacttctgtgtgcagaaggtccaaccagactctggggtaccccggccctccctattcccttgcctcctgtctcccgctttttatagctccctatgctgggcttctctggagagtgaaatctttgcccaaatcaatgcgcattctctctgctgagtcatctggcgacagcagttgagttcacccgccaacacatgggcccagctatgtagccgaaccctggctctggaagtgccagggactttgtgcataagtatgtaccatgcccttttttcacagtcctagctctgcagaagtgcagcctgaaggcctgtctgctgagaggacatgccctggagccctgaaacaggcacagtgggaggaggaacggaggatgacaggcatcaggccctcagtccaaaagcaaccacttgagaatgggctggagtacgaaacatggggtcccgtccctggatccctcctcaaagagtaataagtaaaatataaacaggtaccccaggccgttctgggtttgggttgtaatgggatccatttgcagagaactattgagacagcccagccgtactgtgacaggcaatgtgggggaggaggttgaatcacttggtatttagcatgaatagaataattccctgaacatttttcttaaacatccatatctaaattaccaccactcgctcccagtcttcctgcctttgcgccagcctcctgtctggccatgcctgaagaaggctggagaagccacccacctcaggccatgacactgccagccacttggcaggtgcagccaaacctgagctgtcccagaaagggacattctcaagacccaggcaccctgatcagcactgacttggagctacaagtgtcatgccagaaaagtctctaagaaaaccttttcagggaaaagggggtgactcaacaccgggcaagtttgggaagccccacccttcgagtgatggaagagcagataggaagcctcagaagagagacaccggcacccaggtaacgttcctcatgtggtctctgtcacactaggtgctcttccctggacatctccgtgaccacactctcagttcttagggagatgcgggtgctctctgaggctatctcagagttgcagattctgaggcctagagtgactacagtcagcctaggaagccacagaggactgtggaccaggagggcagaagaggagaagggaagaaaaaccatcagataggacttgcaatgaaactaacccaagacaatcataatgcagacaggaatgttaaaggcgttcagcagctggccatgacacccatctgtccctctggccaagtcagcaagcctggaagacctgggactcctgcccatatgtcctaagctccccacccacccactcgttcactgtccttattctctctctaccttcagccacttagtttcctaccttaagtcctagaattcttgctcaagagcatcaaatgcccctgccttggagctggtgggatggctcagtgggtaaatcacttgccaccaagtctgatggcctgagttcaatccctgacatgcacattggtagaaagagagaaccaaacactaaaagctatcctgagctcttcacttggaccatggcatacttgtatgcatgcctgtgaaggcacgcacacacgcacgtgcacacacgcacactcacacacaactgttcttcagaaagtttatttaaaatgtactttactacccctctgtgtactctgcatccaaatggtgttacccactgagacagagtacacaggccatcactgtagctgtctccctgacatccggagctctgttgggaaggccaagaggatttccatgaaatgggggaagaggagggtggatcactggccaacagggaatacacatcacagatgtgacatgcatcttcctgccttcttggcacaaaatacaactcctgcctgagcatatagcttttgtgttgtggagcatgtacatcttcccataaacactcctgatagaacacgaggctgggttccttctgagtactagcatggacatctctggccctctcctgctcagtacacaaggtactcagggtaacaatggtacagctgtcctcaccaaggcccactgttcttggtctccagagactatgtagccccaaatctttcctcattcttggacttaaagtacctcttgcctggcagatggaagatccagggccaatgggaaaccaaggggtagaaacttacccctgcaagcccagtaactggcagctaaagcaaaagaagtgccatggtttgggggccagaatgggcgatatagtgaggctagcctggactgaagagtgggctgctgtcttggggagaggggagttagatattgcagtagtccaaagtgaggatggtgcctcggacagaagctgcagaggagaaaataaagggaagtggggacttcttggaaagctgcttagagttataacagagggctggtgaaaccagaacaaaacctgtgaactttggcagaatctgtccccactttgctactggactggttatacaagctgctaccactgggggaaaccaagtcacaggtatataagacctctaacctcccatctcaagagtacaacggccaccggatcctctggacctgaagttacagatgtttgtgagctgccatctggtgccaggaattgaacccatgtcctcgggaagaacagcaggtactcttaagccctgagccatctctccagcctcccttgtactatctttatcatttgaccctctcagggtcggagtaatcttttcttttccattatattcatcctttaaattgctacaaagatttaatgaaaagacacatgcgggctggtgagatggctcagtgggtaagagcacccgactgctcttccaaaggtccggagttcaaatcccagcaaccacatggtggctcacaaccatccataatgagatctgacgccctcttctggtgtgtctgaagacagctacagtgtacttacatataataaataaataaattttaaaaaaaaagaaaagacacatgcacacacccgcacgcacatacccacaggcacatacacacacgcacacgcacacacacatgcacacaccctagcatagtggctggagtatgtgagaagtgaatttctgtcacttgtttgtaagccatcctgtctatggtatttgttacagcagatagaatggactaagataacattaaatactgtcttaaccaaaagtcacagcaaagctgtatggggaagaggggaatgcgaattagcagcaggtacaaggggcacagctttaaccccagcactcaggagacagaggcaagcagatctctcagagtttgaggccaccttagtctacatagtgagttctagggcagcaaggactatagagtaagaccctgtctcaagaaaaataataaggaataagagataggatgaaggagaaaggggaggaagaggagaaggaggaggaaaaggaggaagaggaagaggaggagaggtatctcagtgagttagagtgcttgctgtgaaggtcttgagttcaaattctcagcactcatgtgaaggccaagtgtagctcccagcattggggagcagagacaggcaaattccagtacctgtatctagccagcctagctgaaatggctagaaccaagtttgattaaaaacaaacaaacaaaacacacacacacacacacacacacacacacaaacttgtctaaaaaaaaaagtggagaggaatagagaaagacactgaacatcctcctctggcttccgtgtgtgtgtgtgtgtgtgtgtgtgtgtgtgtgtgtgtgtgtgtgtgtgtatgtgtgtgtgtgtgtgtgtgtagatagatagatagatagatagatagatagatagatagatagataataaatatttttaggaatattttagggaataaataaatgagttaaatgtaatcttagtgatgaaatcagaagttcaatgtcatccttagctatgtagtgagttcaaggcctgactgggcctgtgagactctgaatcaaataaataaataaataaataaataaataaataaataaatagggaactggatttggctaggcaggaattgagcctacaaacgagcttaaagctgagaccaaaagataactcagtaggaaaaggtgcctgtcacactgcatgccaacctgagtcccatctccagaggcacactcacacacatataacaaacacgtaaacaagcttaaaagcaatagggaacacaacatcaatttttaaagtgtttgtacatactagaaaattttaaatatacaagcatcctggttggttttcatgtcagtttgccacaaattagtcaccttagtggggagactcacctgaaggactgtcctgatccccttaattgatatggggagagtcactgggattgtgggcgacaccttctggtagcagcagagataaaagggagattgcagaaggaagcctccctcctgctgctgagttgactagtcctgaagctgtttcgatgatgatgatgatggtggtggtggtggtggtggtgatgatggtggtggtggtgatggtggtggtggtggtggtaaggaggaggaaaaggaagatgaagaagaaggaggaagaggaggaggaggtggaggaggtgatgtccagcactccccaacttttattgagcaatagctgtttccaggaaacttccatgtctgatatcaaacccaaaccaatgaggcaccctgccttgcagactgagtaactacctattgccactctctggcagggagaaacagttattctagcactactctggctatcaaggctccagccttaaggatcaagtaactaccaggtactcagctctcaggtgtgcccccactgttatccaaaagctgacttactaaattctgatataaagattacacataaaacaagcaaatagaagagctgagtaattaagatggctacttaggggaataagaccctaggatggagaaatggactgctttaaacctaataataacttttgtctctataagaaataatatgcttaaagaattctattacaggctggtaggatggctcagtgggtaagagcacccgactgctcttccaaaggtccagagttcaaatcccagcaaccacatggtggctcacaaccatccgtaacaagatctggtgccctcttctggagtgtctgaagacagctacagtgtacttacatataataaataaataaataaataaataaataaataaataaataaataaatcttaaaaaaaaaaaaattctattactagtgggggaggggaaaagaaaaaaaaaagaattctattactgccctgccagttctatttgaggatttgcctactaatggccatttttatcttagggaggggttgagaggaagtgagaaggaatctcaatnnnnnnnnnnnnnnnnnnnnctggtaggatggctcagtgggtaagagcacccgactgctcttccaaaggtccagagttcaaatcccagcaaccacatggtggctcacaaccatccgtaacaagatctggtgccctcttctggagtgtctgaagacagctacagtgtacttacatataataaataaataaataaataaataaataaatacttaatttggggaggggaaaagaaaaaaaaaagaattctattactgccctgccagttctatttgaggatttgcctactaatggccatttttatcttagggaggggttgagaggaagtgagaaggaatctcaatcttcaacaataacatcatatttgttaagatagaaaaagccaaggaagtgttgaggttgagagccagatatgagctgtttgttacgtcattggacagtcatgtgcaagtatggagaggagagctggatgtgggtgtggttctgcagacaagagtgcttgcctagcatgcataaagccctgggtttcatccccagcattatatacattgatcaggcatggtgacacatgcctataatcccaacactagggagatggaggcagatgaatcagtttaaagtcatcaactacacagcaagtaggaggcctatttgggatacatgaaaccctgccttttaaaaaaggatcaactaggttaactgctaataagattaaaataagaatcaagagtgttggctcgtgcctgtaacccaacacttcaggctaggacaggaagactgctgtgagatcaaggtcagcctgagctgagtgaatcggagagaagaaaagagagaggacaaagacaaacacagagtctataaatatgacttgtagctgggcttggtggcacttttaagagaccaaagcaggattccaagttcaaagaatgcctgggctacatagtaagatcttttcatggaaggaaggaaggaaggacaaaaggggaaggacaaaaaaggaaggaagaaggaaagacaaagaacggaaggaagaaaggacataaaaaggaaggagggaggaagggaggaaggagggagggcgggaggaaggacaaagaaaggaaggaaggaaggaaggaaaggaaagagaaaggaaggaaggacaaagagaggaacgaaggaaggaaggaaggaaggaaggaaggaaggaaggaaggaaggaaaaaaggagaaggaagaactaaggaaggaaggaagaactaaggaaggaaagaagaactaaggaagaaaggaaggaaggatggacaaaggaaggaaggaaggaggggcaagcatactggcatgcacccctttactttaatcctaaggaagcagaggcaggtggatctctgcttccagccagcctgggctacatagtgagacattgactcaaaacaacactaataacaataatgaagcaatattatggctgatgaccaggctgtttgtggctggagtagcaattctccaaagacagctgctaaatcacctcggcctgtgtgtaagcttcagttgcacatagcatggcctggtgtctcacctgcagtctctaaggtcatgcgctgtgccttccgaagttggatcatgagatacctgcgactggttctcctggaatgctgactccagggacactccctcttggaacccagcttccatacggagaaacccagtcatgcagatgtgtaggcatccattcatcaggaccagctaacttaagctccagccggcagccaccattacctgccagccattccatgagccacgagatgcccaagggcccagcttccaacaaccttatgatttggcaagagccaccttgggagatgtagtagcagcagccaggctgaagtgggtgagcaaaaatgaatgggagattgttcacttgtttttcagggagtgttgctgtgactggagtcagctggagtctggaggtttggtgtgttttaaagacaggcaatcatggggctggagagacggctaaatgattaggaacacttgttgctattgcagaggaccccacatggtagctcatcatctgttccagctccagggttctgcaaccaagtacacacattgctacacatgcaaacctttaaaaaaataatcagtactgccaagtggtggaggcacatgcctttagtgccagcacttgggaggcagaggcagatggatctctgagtttgaggccagcctggtctacagagtgagttccaggacaaccagggctacacagaaaaactctatctcaaaaaaaaaagtaagaataaaaaataattacaaataagggtaataaatactacatcatggttgtctgttgatgttttggttctgaagatcctaaagacagagaagactaaagagaagaaagtgaagaaaatagagtctttggaaaagcaacaggggagagacctagagctacaaataaagacaaggactaggtgtgatctacatacaatcccaacacttggtatgcgtagtcaggaagaccaagagttcaagaatctcatgtagacatagctagcttagtgacagcctgggctacatgagacccagccacacccacaaaaaagatggtgcataagcataggtttgtgaatttgaaggttcaaggcaccggccataagataatgatttgaatgtgtcctctaaaagttcacatatcagaaatgtaatctccaaattcataaaataatggtatttggaggtcaggctggtgataattagttttaattatcagcttgatataatctagaatcacctagaaaggaagtctcagtgaatgactgtctaaactaggttggcctgtaagcatgttcatgcaggattatcttgattacattaattgagatggaaagactgcccactatgggcaacaccattccctaggcttagggttctggataaaaaacagaaaggcacctgaccactaagcatgcatacattcactcttcctttgctgatgactgtggatgtgaccagcttcttcaagtttttgctgccttgacttccccgagtgatgggctataatctggcattgtgggctcagagaaagcttttcttcccctcagctgcctttctcaaggtattttgttgctaaaactataaactaataagacaggacctctgtgagttaattaagaaggctgtgaggatggggttttctcatgatggtactaatgcctttatataagaagcctgggtgtggatcagtggtacagcaacagccctggattccatccctaatatcataaatatatatatatcagaggaaagagacttaggcagcacatttgctcagtccttccattagaacctcctgtcc

SEQ ID NO: 16 - DNA, 489 bp, Mus musculus
atgaacccagccatcagcgtcgctctcctgctctcagtcttgcaggtgtcccgagggcagaaggtgaccagcctgacagcctgcctggtgaaccaaaaccttcgcctggactgccgccatgagaataacaccaaggataactccatccagcatgagttcagcctgacccgagagaagaggaagcacgtgctctcaggcacccttgggatacccgagcacacgtaccgctcccgcgtcaccctctccaaccagccctatatcaaggtccttaccctagccaacttcaccaccaaggatgagggcgactacttttgtgagcttcaagtctcgggcgcgaatcccatgagctccaataaaagtatcagtgtgtatagagacaagctggtcaagtgtggcggcataagcctgctggttcagaacacatcctggatgctgctgctgctgctttccctctccctcctccaagccctggacttcatttctctgtga

SEQ ID NO: 17 - protein, 158 aa, Mus musculus
MNPAISVLLSVLQVSRGQKVTSLTACLVNQNLRLDCRHENNTKDNSIQHEFSLTREKRKHVLSGTLGIPEHYSRVTLSNQPYIKVLTLANFTTKDEGDYFCELQVSGANPMSSNKSISVYRDKLVKCGGISLLVQNTSWMLLLLLSLSLLQALDFISL

SEQ ID NO: 18 - DNA, 24976 bp, Homo sapiens
agcagaaatgcctctatcataaagaaagtatttctgactttcttcctcttccctatctgggagttgaatttcccctcactttggagcagcccgacccagagtagctgcagcatgcttcatttgcattctgctactactaattgaagccagctggcaagggacgtttgggggaattgtcggcttctttggaaggtggtggggatgctacagctcgtatatcagggagcagcggcttgcttacaaagcacttttgctggtgatgggtcctggacagttgaggtggaagtggcctcggacaaccgtgggatctctgcttgtatattttttcttcaaaagacattaaaaaaaaaaaaagctaactcctcacattccacaaggatgagtcttgcttattccctaggcgtagctgtccctgccaaaaaaaaaaaaagctaattcattttctctttgctggagagactgaatcagtctcggggggctatcctcacctctcacacagccctgtctggctctcccttagcttggtgcacactgagaacagctgagctcagccaagccgaaaccacaaggttgaagctgacagtccgagcgccccacacctcatgcctggagtgtccatgccagatgctgctgcccagtcggcaggcacaaggaggatctcaccaggaggcaggccccggtttccacagaagacgctggccgtctctcagccaccctgcaacccacctcccaggccagcccctcgggagaagggaccctgtgggcctcaagcagccgctgctcatttacaaagctcctctttgctttgcagcctccatcttgtctccccactcactcctcaacccatgactatattaaccatgtcttttattttctctattatgacgttttaccatctgaggtgactgtccctcccacggttagccaattcatagagatcggagataactctcccacccaaccagtccagagagcacgctccaaacacctctattgactctcacactcagagccaccagccacctgccctgattgcccaaggccaggttccacacaactaggacagcccctatgcccagagcccactgcaattattcaacatagccaatcctaagcctgctcaccctgccttgcccatttgttcccttgaaaaccacaatgaaggtgcccgcccacaactgccccctccccctgtgcctcctgaccgacccagtgcttcccagtgacccccaccatgtggcgtgccccctactcgggatctacgagtttaacaaatcatcttttcaatggaggccgcctcctgccctgcggcccttgctgtacctaataataaaaactgtatcttgaaacaatgacttcagacctcagttaccactgttctgaaactgtcctcaccaggtgacctcctgttgccaaatctaatggataggatacatttttgtctgtacttcacaccgctgaccacaccctcactgaactcgcctgtttctgtggcttcgccctctcctcattctccatccttctggccacctcctcagactcctcagctgcaaccactcccttaagtgtcagcgctctttggggtcctgtcctgggttctgttttcttctaggtctacacatgctcccggggtgctcattaccacctacttgccaacaaccagcagttaacctctcctctcctccgacctcgctcctcagctctggcctgaacctctccatgtgcacatcccacaggctctcaagctcaacgtggccagcactgaatacatgatcttttgcactgaagctgcttcctctctctgatccttcagagtagccaaccccaaaatctcagagtccttgtgatgcctcccaaagacatccaggaaggcactgaacatcccctgacttgggtctctcccatctgccccaccttctccacctccactgctcctgccccatctcagaccctcatccccctcactgatgcagctcccaggtgcacttcacacctccacccttgtttctggggctccctctgtcaggaatgcctttcttcccctttccagaaaacaaccactgctttctcccaaacccttctttgaattccctccttcttgcctcatgggcagcacctatgatacttgaatgcccttactccttatatttatccaaaaatatttattgtgtgactctactttgtgccaggacctggaagcccctgagctacagcagcaaataagacggatatgggtcttgaccccaaggaagtgtgcgtcacatcaccctctctcccagaagccaccttccgcctccccacctctgcgctgagtgcaccgcagggcaaagaaccacaggcaggagaggattcatggggccctccagtcactcgccatgctgcccccacagtaatctttcttttttttttttaaatttttttttttttgagacagagtctcactctgtcgcccaggctggagtgcagtggtgcgatctcagctaactacaacctccgcctcccaggttcaagtgatccttgtgtctcagcctcccgagtagctgggactacaggcgcctgtcacctcaactggctaatgtttgtatttttaggagagatggggttttgccacattggccaggctggtctggaactcctgacctcaggtgatctgcccatctcagcctattgaagtgctgggattacaggcatgagccactgcacccaacctcccagagtaatccttctaaaaaatacacctatccagccatttcacactcttcctgtaagcctgtcatgatgcctcattatccaagtccagacagacaaggacttcctcgactgcctcttccccatttctccatcatcctctctcagccttcaccgccacgagaaataaaactgcctgttttttcctgcctctgctttgctttgctgtatttctgttcctttgctcacgctgcctcctctgtcttagatcctctcccctctcctcgcctggtttcttagttagctattgttctgtaacaaatcaccccaactagtaaccaaaggcagcttttctgtgggtcagcagtttggtcagggaacagctccatacgggatttgctgggctcactcctgcatgtgtggccaggtgacaagtgggctggacactgggtgatcctggaaaggctcactcagtgatgggcagctcccagattggggcgggggatggtagccacagcacttctgttcaggtctctccactgtgaccagctcgagcttcctcacagagccccggggtccttgcctaagatggcaagcactgaggaaatcgcttgcaccacgtttgctgaactcctgttggccaaaacatgtcttatggccaagccagagtcagtgtgaaagaggcatgactggctgagggcattaatgtggcactccaccacagtttgctctctactcctaaagatgctctgtcctcccacttgtaaaatacacccacccttcccaaagcacccaatcacgacatcaggctccaagaccatgatctcaaaatgtgcagtaggtctggctgtggctgagtctccttgggtacaactcctcaggggtggctcctcttcactcagggacctgtgagctaaaaagacaagaccacacgcccaatgtacaatggtgacacagggacaggataagctcaatagatactcccatcaaaacgggagaaatgagaggcacatagatagcaatcactagttcaaagcaattctgaaatccaggcaggcacatgtcatcaggatccctatgctagaggcagggaatgttacttgaacaggacccagttctccctggctcttagttacactctctgggctgttggttttgccttccaagagatccttcttttccctaagagaaggacctctgtataggggccagcttcctgcccatagaaagttggacgcccagaggcttcttttcattttgaactgtttcagttccttttactccaaactggcggagcttttgccaatacaatactccttaaaactttatgggttttctgtgaatattactggggtctacttcatgcacccaaagccacacacataattaatttcaaaaagactccatttcagctataggacaatgcgttttttttttttttttaggcagggccttgctctgttgcccatgttgcccaggctggggtgcctcactgaagcctcaacctctcaggctcaagagatcctcccacctcagtctcccaagtatctgggaccacaggcacgtgacaccacacccagctagttttttattttttgtagagatgaggtctcattatgttgcccaggctgatctcaaactcctgggttcaagtgattttcctgccttggcctctcaaagtgctgagattacaggcatgagccactgtgcctggcaaggacaatgtccttaacattcttagaaacccttctgtcttgtcaagaaggtctaatgaacaccatttaaatctcctggggtcttaacgaaggttgtaaaatcgtacccttgatttaatctctacctttaggccagttctagttttgagagcccattgcctgatactgaaactggcaatgagatctggttttcttttccacctaacaaactgagcaggtccttttgtagctcagctctcttgtaatactttatcatgccaactagaagcacccaaatgacacttggagcattctgtctccaggtccctttagccaaatctacaaattcattaagcacttcttctgttgtctaagttgccacgagaaattttgtttttgccagttgtttcaccactacctgagtcacccttgttccagccaccaaagagtccctccttacttgaaattgcctggagccaggcatggtggctgcaggtggatagccagatgttttccatgttggctccaagagtgagtgttctggcaaaaaggatagaagctatgtggccttctaaggcctcagtgcagaagtctcttagcatcacatctgtcctactctattagctgaagcagtcacaagcccactgagatttaagacaaggggacatagatgtcacctcttttttttttttttttttgagacggagtctcgctctgtcgcccaggctggagtgcagtggctgccatctcggctcactgcaacctctgcctcccaggttcacgccattctcctgcctcagcctcccgagtagctgggactacaggcacccgccatcacgcccggctaattttttatatttgtagtagagacggggtttcactgtattaaccaggatggtctcgatctcctgacctcatgatccgcccacctcagcctcctaaagtactcagattacaggcatgagccaccgcgcccggcctagatgtcacctcttgatgaaggaatgtcaaagaatttgtgtccacattttagaatcaccacggtagccttatctgggtggctcatttctcttctgtatggcatcacttggaattacacatgcttttgtggtcccatgacaggtcacatgcctgtgtggtcccatggcaggtcacaggcctgtgtggtcccatggcaggtcaactgggggctggcagatcccaaatggtgattgatgtaaactgagatagttcagactccctcaagtggcaactgaactccaaaaaagcaagctccaacgtacaaacatttcacaagcttctgctttcatcacatttgctgatggcccattggccaaagcaaggcacgtggccaagcccagaatcagcacggaagggattacacaaaagcatggacaccgggcgggggggggcatgactcactggaggccattgatgtgacagtctaccatacctgggcaactcccatttatctttaaaagctcagttcatgcctggcctccaagaagccctctctgacagattgggtcatcacctgtccctcctctggactcccacagtaccctttacacgtctctacctctgtgtctaccctcttttttctaattatctatgtatcatttctgtttcccccattggaacaagcctttgagatggtgttctactaatctttgtatacctagcgtctagccccgtgccttggaacattattggtaccaataatgtcttaattatttggtcaattaaaccatccatgaataaagtttttaaaataactatcaaagattaaagtgtctccattggtgccttctctcaacttctgccctgcattccaagaaataatgtttagtttgtatttgtcacattctccaaccaaatatgcagttcttcagggagctgaccttgctcaggaagttgacctcgactagaggttaggagaggtagcggagtgtagagcagcagttccaagatattttaatttcatagacttagtcacatttccaaagaagtgtgagggttaacaggaagttaccaattttcttttttttatatataaagtaggacattaaaaaccacacatacacacatatcaataccaccatctcttcagaaaaatggaaaggtataaccttagaatgaaagtataggaaaggcaggtgtatagtctcaattagtcaaagattagagctcagtattatggctgccttgatatcagggagacctcaaatggcctaattacaagatcccctccctactttgctgatgaggtcccccagccaaaccaccctccttattgtgggggccaggcacaatttctgcttaaccctgagtactgggcttcagcaccctgccagcccacagaattatgcaaacagccaatcacattctcttacaggaaacgggggcattccaccgttttgacattacaaagcctgcctcccacagctcctggtaatacctgtttctgagtgcaactcccatgaagcagttcatggcgtgcagtgttatcctcccaggtatgagcatatgtgactaataaactgctattgctctcattcgtccagtgttgaggtcatgtgatccccctaactttaggggatgggaatctctccctcatcaacagggtgaagaacataaaatcaaaacaaggtgataacctgacagctatgttcagagtaccccggactgtcctcgttttacttatttcaccgtgaaccagggaaatgagtctagcagagatctgagggtccgccctgggagcactggagagcacagtgggaacatggagtcaggagacttaagatctaatagtccagaccatgcttcaaaatatttgtctgaccttgacaaatcattacctttctcgggcctcaagtcccagctataaaatagtggggcaagccaggtgcagtggctcccacctgtaatcccagcattttgagaggccaggcgggaggattacttgagcccaggagttcaagatcagcctgggcaacatggtgagatcccatctctacaaaaaaaaaaaaaaaaaattaattagctgggcatagtgtcaagtgcctattgtcccagctactcaggaggctgaggtaggaggatcacttgagcccaggaggtcaaagcttcagtgagtggtgattgcaccactgcactctagcctaggcaacagagtgagaccctggctcaaaaataaaataaaataaaatttaaaagatgggaccactgtagtcacctctgtgattctagaaagacaatctgatgaaatgagggaatggctggcagtccctaggtcatgctaaaggactgtgtgtttttagaagagtttttatccccatatgtttctgggtgggaaaacaggagatggtgggaaaagagagatctaagagaccaacagggcagccgcagtcttctggcaggaagtcttgccttagctggattcctctaaagccttgctggtttcagcactccgatcctatccacagtaaatggagttttaaaatctcctccctccaccaccttgtgctctatcccctgacctcagatgtctaatcagagccattaattccatccaatcagagatcttgcttggcagacacagaattgccacaccttctacagtctatactcccctcccctgcctaaaagcaaggtgcttggggacccagaaattaggccaggtcctcataaccttatcaaaatagcactgctaggccttccacccagcaacactcagagacagggccaaagagtgggaaacggagcatccagggcctcagccagcagagcccagatgccttctgcagttaagatccctggactcagaatcagaaagctgttaagcaggaaggagtgcgctgccatgaagaggcagacagaagccagagccagtgtgtctggaatgcatcaggtagatgaatgggaagatggctgggatggagttggagggaggagggaagtcagcagccaggggccaggacattcatggccttaaaaagtatcctacaaacaagaagccaggttagctcacctatgaagagggacagtcttaccagatcatgtgttagagtccccagatcctggggagcgtgagaaaagtgcagactcagctggctctagtactagattaaggaggtcctaggtgggcaaggccagctgcatttttcataaaatgccctagaaacctctgcagtttaccaaagtgaatagctcctttggacttaaccatctgcaaggctcattccagttagagtgttccatcaccctaaatgctgggaaaccaagcgaatctcctcccacttgcaagcttccaacagtggcttccaacagtgccactgcagtatcagaaactgcagggaaggtgccagggctgacttccatgaagaaataggagaacaggcaggcagacattggggaggcccacagaatgtcgtgatcagaattcataaagaggctggcaggatacaaatcaatcaaataaacgttagttcaaaaaaattcactacacctgtgagtgagagaaagtcatcagcactgtctctaaaaatgagcctagggcttctggtgacatccaatcggtgggttatcaggagtgccccaggtgatcaggagttggcctcgactcagtcctttttgtgctgtctcctcctctttcccagagttcctctctctcttctcccactaggcagggatgagcaagaggaatggctcacccttgagagctggggtccatagcccaggtcagttctccagctctcccacttaccagccaagacaggaggtgaggattgagatgggatgaacccagcaggcggccatgggttaaaggtcgccatgaatgtaatgtgcccagcacagtgcctgctaaaaggcaacactcccttcctggtctgaagaccaaacaagcagactgtactcaggaaagccagaagaaccttccagctgtctggaccagaaggtgccagcccaggggctgaagaagacgtaatgcccagagcaaaaagcgcctgcagccccctgaagggctgggtgctctggaatagatgagggggcgaaatggggctggggaccagggacggacagggtgggtccagcacctgcctcgcttccgaagggctgctccaacactgaaaaacacccaaccagcttcctttcagaaagactggaatattccaaaacttctcactggaggctccggaggaggtgggctccagctgaaaaggaaatgtggaggcgtgggcgctcccggcctgcatcctgcacctcttacactttggttttcccacagactcctgaagaataggtcagaagaaagggttaaagccttaaaaggggaacaaccattgcggggctcagggaggaggataatgttctttgggctgccgcaccctgatccccggggtcccgaaccctcccgtccctggccaggcctgccagccacagggtgagggcccccttccgccgcaacctgccactctcacaccaatgcgggaccgccttctcttccttccccaccccccaccccaccctgccgtcctttctcccccaatctccgcctctgattggctgagcccccggctccccgctccccctctcctccatccccggtgaaaactgcgggctccgagctgggtgcagcaaccggaggcggcggcgcgtctggaggaggctgcagcagcggaagaccccagtccaggtgggaactggagccggtgggacctggggctcggggaccgccgtcaggcgcccatgcaagacttcccaacactaggcttcgggccacggtccgagggcgcccagggaagaagggcgcagagcttagggaggggcctgctttccaggcaggggcgggagggggatgcttctgcagggcaggggccgcgtggcaccctgatgtctttcggggaaggcgctcccgggctttcgcccgctgggggactggtgtctggggctggggcgctggagaacagggaggaagggcaccaaggacagcctgtgggtctacattccacccagacgtccccaaacccagctcgcagaggcggggaggaggacggatgaaactgcggggagaggatggaggatggcgagctagagggaatctgccgggtgacctcgcggcgggctgggtgcggggcaccggaggagaaggaagccgcagtgccgcaggcggggactgggtggaaggcgggcggacgggggaggggagagctggaaaaggatgagagagggggaagggggactcatttgggaaaggagaggattggaatacggaaatggattaaggatgaggcccgccgggggcttgagagggaggaagagcagaccttctctgggtctggagccgcctgaggacacagaccagaggaaatgaatacagactgcacctccccagccgctctccacccctcccctggctcttctaccctctccagccccagacccatttcttccctttcttgctctggccattgctcccccttcccctcctagatcccaagcccgcacaacatctcaaacaagagtcctcgattcaaaagccagatgccgaccccccttcctcctggatctggctcagggcagcagctccaccccgggacagagagagcattgattgtagctgcagccgccgcgggatcctagcctcacccgtcaaggggctgagcgccagggaccctgaactcgtctagtggtgcgccctgcgcacccgggcgcactcaaccgaggcaatgccctgcgcgctctcgcgggtgcacgccccttctgtggcctctcctgggcgagcactgctctgcagataggctagactaccggctccgcgtcgcctcgccaagggttggttcagccaaggctgcaaaaaacaaaaaaagaccaggcagacagcctatccagggtggctattgaaactgggctggaaaactgcagtcccaggaactccagagagctggacattgggaagcatccttggctcacatacaatcggagatcactatgtctttctctcctccaggaacacgattagcttgtgtcctatccagataggaatagatgctccctatctgggagcatccttagctatggtgaatggtatctagccatccactggggatggcgagtgacttagggatttgtgtctcacgtatatgaagcagtcatcgccagatgttggttgtttttcttaacccccatcataacccggtgggtatgtaagattcagagagattcattcattcattcacaataaatatctttggagtgtatgctatatgccagtaatctgcaaacggaaacggttttgagcattggggattttcttctgaacaggaaatgggaagtccctaaatggggagtctttgtttaacagatacagagttttactttgaaagacaaaaagagttccggagatgggctgcatagcaacgtgaatgtatccagcactgctgaatatactgaatttaagtactgaatttaaatggttaaaatagtaattattatgctttttgtattttaccacgattaaattttttttttaaatacgaagcctcagccctcataggtcttatattaccatacactatgttaatgtaagaagaggagaaagagtggtaaagttacttaaagtcacccagctagtaagtgctccatggccaagcgcagaaacacaccgtgactgggcttgttctccctccttccttgctttccctgagcaggaaagagccagtggcagtatcatgttcagtgagatgcagggacgagagggggaatggagagagggacttagatgactgccatagccactatgccatgttcccagggacccccagccctggtggtaagtgtggcacagcttggctgattcccatcctgttcccaccccagatccaggactgagatcccagaaccatgaacctggccatcagcatcgctctcctgctaacaggtacccggcatggggcaggactggggctccaggcgccctggcttccttccctccagagaagcagcttctccctcacagtctcagaaaagcgcaggtgacaaagagagggctctttttcatcctgaagtcagccaatccaccgcgctgatattctgacggcctgaggtggtttttgaaaacacagtttgctgagccctccttcacactattgaactagaatccccaactgagaacccggaaccagcatcaactccctaagatctcctgtccttgaaacacattgataggatccaaggctcaagcagagtggggagggaggctggggtctgcaaaggagaagtgggatccctggggtggggaaaggcactcagagagcagaccccggtcccctccctagccaggcccatctctccacttcaggtgggtgggaggcccctgtgccgcaggcccctccagtttgaaggaggcactgctggtgccagtcttgcaggtctcccgagggcagaaggtgaccagcctaacggcctgcctagtggaccagagccttcgtctggactgccgccatgagaataccagcagttcacccatccagtacgagttcagcctgacccgtgagacaaagaagcacgtgctctttggcactgtgggggtgcctgagcacacataccgctcccgaaccaacttcaccagcaaatacaacatgaaggtcctctacttatccgccttcactagcaaggacgagggcacctacacgtgtgcactccaccactctggccattccccacccatctcctcccagaacgtcacagtgctcagaggtgagacaagcccctaacaaggtcaagtgagctgggagagccaggctcggggacagcaggcagttcccttggctggactagagaggagaatagccccataacgctctcaccctctcccaactgctgcctggtcaactggggaaccattgccttcggtgtgaatggggtgaagagctcagggccagacaggcagagcagtgtggttccaccagaactgtgggcaaggcctttggcctccctaatcttccttctcccagcgggaaaacagggatgacaccacctccctcagccagttttcttgtcatgatgtttagtaaggttttcataagatgatatgtgtgcaagagatcagtaatctgcaaatgggaaagatggctggttctgtgagaccgggctgttcctggtcccagctaagacattgcagtacccacctcccaaagggagtacacccttgctttgggcctgtgcctgcctgagtcctgatccgtcttccttcctaccctgcccccggcccccttctctttctgcagacaaactggtcaagtgtgagggcatcagcctgctggctcagaacacctcgtggctgctgctgctcctgctctccctctccctcctccaggccacggatttcatgtccctgtgactggtggggcccatggaggagacaggaagcctcaagttccagtgcagagatcctacttctctgagtcagctgaccccctccccccaatccctcaaaccttgaggagaagtggggaccccacccctcatcaggagttccagtgctgcatgcgattatctacccacgtccacgcggccacctcaccctctccgcacacctctggctgtctttttgtactttttgttccagagctgcttctgtctggtttatttaggttttatccttccttttctttgagagttcgtgaagagggaagccaggattggggacctgatggagagtgagagcatgtgaggggtagtgggatggtggggtaccagccactggaggggtcatccttgcccatcgggaccagaaacctgggagagacttggatgaggagtggttgggctgtgcctgggcctagcacggacatggtctgtcctgacagcactcctcggcaggcatggctggtgcctgaagaccccagatgtgagggcaccaccaagaatttgtggcctaccttgtgagggagagaactgagcatctccagcattctcagccacaaccaaaaaaaaataaaaagggcagccctccttaccactgtggaagtccctcagaggccttggggcatgacccagtgaagatgcaggtttgaccaggaaagcagcgctagtggagggttggagaaggaggtaaaggatgagggttcatcatccctccctgcctaaggaagctaaaagcatggccctgctgcccctccctgcctccacccacagtggagagggctacaaaggaggacaagaccctctcaggctgtcccaagctcccaagagcttccagagctctgacccacagcctccaagtcaggtggggtggagtcccagagctgcacagggtttggcccaagtttctaagggaggcacttcctcccctcgcccatcagtgccagcccctgctggctggtgcctgagcccctcagacagccccctgccccgcaggcctgccttctcagggacttctgcggggcctgaggcaagccatggagtgagacccaggagccggacacttctcaggaaatggcttttcccaacccccagcccccacccggtggttcttcctgttctgtgactgtgtatagtgccaccacagcttatggcatctcattgaggacaaagaaaactgcacaataaaaccaagcctctggaatctgtcctcgtgtccacctggccttcgctcctccagcagtgcctgcctgcccccgcttcgctggggtctccacgggtgaggctggggaacgccacctcttcctcttccctgacttctccccaaccacttagtagcaacgctaccccaggggctaatgactgcacactgggcttcttttcagaatgaccctaacgagacacatttgcccaaataaacgaacatcccatgtctgctgactcacctggctggaacaacatgcttactgccaacatgtgggccgaaccacatggccctggctctggaatgcacaagtggctttgcgtgaatctgcgctaagctatgcagtctgctttttcttctcagctctggtagttcttcagaaatgtaccctccaggcacatccactattgcgagggtgagcacgaagggtgggagatgcccatgtcctcaaggcatcacttcctaaatccaaaagcatcggcaggagaaaggactggggacaaatactgtcccttcgggagtagggagggaacactgaggcccatccctggctccttccctaaaagtagagtaaaatggaagcgagcatcctgggattgggggcaagagggggaccgcagggtagctgtgggttccaactgctgtcagagtcagagaggcagccccaagccagcctccctgctttgccagggaatttgggggaggaaggtgacagctgcccagaggctgactcatctgatatttagcactgggtaggatgattgtttctgagcatttttcttaaaggcctcagatctaaattatgccaccggctcccactcttgctacctcccgtcaacttctctgccttgccttccacccctgtagttaccatacacagaggaggaggagctgtccttgtcccaggttgggaggctgacaaccccttagcaagatgctgccagcccagagctctccaaggggaggaacacccctgagactcaggcccctctccttcagccctgcttgggctgcaagcgccgtgccaaggaaaggcatcttggtgagaagagctgctgtgggggaagggagatcaaatgccagagaaatgtggggtgccccaccctcaggatagtaaaagagtatggaggtatttctggaaggaaatgagcggcactgtgtgaagcctcgcacctgtgtgacacttcctatggggtctttgtcacactctagtactatgtccctgaagagtttagcagccacactcttagaagggtgctgggagatggtgttgccctctgcagccatgtttaggggagcggaacctgaggcccacagtgggtgagattagctcaagaagccacagaggccaccagagggccacggacttcggaaaggagaagagaagaacagggcatcaggcctcacaacgcaaacctacccagagatgggcacagtggctcatgcctgtaatcccaccactttgggaagaggcggatcgcttgaggtcaggagttcgagactagcctcgaaaccctatctctactaaaaatacaaaaattagccaggcatggtggcctgcgcctgtaatcccagctactcaggaggctgaggcaggagaatcacttgaacccgggaggcggaggttgcagtgagccaagattgcaccactgcactccagcctgggagatagagtgagactccatctcaaaaaaataaaaaataaaataaacctacccggaatgaccatgctgaggactgggagcccgcagactttcagccacaggccgcgacagccgtgggtccctccctggtcaagtcagcaggccttgtggaggctgtggggtatctgtggtgactcaggtaattatagagggctggcccccagccctggttcctgtacacatgccccaaccccatccccatccactccctcgccagtcctaacctctttcctgggtccccccccttcagcacctaagtccatacctagggccgtggaattcccgctcaagagcaacagaagcccctctctgcacccccatttctggactggattgtccactgagacgcgcaatgtctgcatctctgacatctagaggcttcctcgggaagggcatggggatctccgtgagatgtggggactttcactggccaaccaagaaatctacacagcgtccggggacctgtgacacacatccctcccgcctcctcaacctgatgtccctctctgaatctgcagctttcgtgctgtgaaggtgtctttacatgtgaaacaaacaaacccaagtcaagagtaaatcatctcatttactagtgagaaaatgttggagctggagtccttcagagagtcctggccaggcaagagggccatcagctctcttctgctcaacaggggctctcagcctcaggacactctcaggcctggaatgtccccaacacactcaaggagaaacatgtcctgtgcagacccacaggaggcatctttgcccggcacaaggaagagctggggtcagtgggacctgtagatgtagacacatcatatggagggtgggtaggaccaatgtggcagcttcatggaggccaagtgtggctctgcaccaggaaggggctgtgatggctggaggtgcccagcagtgcaggcggggagtgcctggcagtggcgtggccaggtggaggccacctgtcaagtttgcaataaagcagtttcctgaatttggtgagaacatggactagaggactctagcctcttccccctttagggtttcacttcagtaagtcttaaaattagagtgtggtgactcacgcctgtaatcccagcactttgggaggccaaggcaggtggatcacttgaggtcaggagtttgagaccatcctggccaacatgcagaaaccctgtctctactaaaaaaaaaaaataagtaaataaataaaaattagccaggtgtggtggtgcacggctgtaatcccagctacttgggaggctgaggcaggagaatcacttgaacccaggaggcggaggttgtgggccgagatcatgccactgcactccagcctgggtggcagagtgagattcagtctcaaaaaaaaaaaaaaggattagagcttggtgcagtggcagccacctgtaatcccaacttcttgagaagctgagatgggaggccccccttgagcccagaagtttgaggccagcctaagcaacactgtgagaccttgtctcaaaaaaataataaaaacaataattcttaaaataagctgactgggctgaaatcatgtatttgtacaacaaacattaagcatctaaatgcacctggctctgtgctaagctataaaagacacaagcccctaactgaaggggtccacagtccaataagagggaggaatcaatttcagtgcagtgatcagcactatgaggaggggaagttgtggaagacaccagtgggggttccccaacatgcattatcctcttccttctcagcaatgggacccataaactagaactgaaatgtgtgatccagaagaaagactatttcccagttccattgcagtgagatgggcctatgtgattaagttctgtccaatgggatataagcacaaaatagtatgtgtaatttctgtgaagagctctaaaagagagaaagtgtgcctttctcccactttcaccttatgctagctggaatgtggaggtgatggctggaactggagcagctattttgtactatgagatagatggaagttgtgtgttacaaatgacaaagcacaagataggagcctgagtcctccatgatggtggagctgtcagggaagccgtggacaaccttatttaagtgactgttatttgggcttttctgcattcatcgctaactaaacctaaaactaccttaaaaagaaactgcaggcccggcacagtggctaacgcctgtaatctcagcactttgggaggctgtggcgggtggattgcttgagcccaggagttcaaggtgagcctgggcaaggtggcaaaaccccatctctacaaaaaatacaaaaattagctgggcatgatggcacatgtctgtagtctcagctactcaggtagctgaggtgggaggattgattgagcctgggagtttgaggcttcagtgagccaagatcacaccaccacactccagggtaacagaatgagaccctgtcttcaaaaaaaaaaaaaagctgctacttaacactgctgaatcttacacttaaaaatggttaagattgtaatttataactttttaaccacaactttttaaaagaagccaaaggtcaaattaatagagatagaaaatagaatggtggttgccaggagctgtggggaaagggaatggggagttattgtttaatgggcacagagttttggttttgcaagatgaaaacagttccatggatgggtggtggcgatggcagcacaacagtgcaaatgtacataatgccactgaaccgtatacttttttaaaaatagaggtggggtttcactatgttgcccaggctggtttcaaactcctgggctgaagtgatcctcccccctcagcctcccaaagtgctgggattgcaggtgtgagccaccacacccagcctgaatcgtacacttaaaggtggctgagatggtaaattttatattcagtgtattttatcacgatattaaagaaatagaagaagccaaggcaccaggaaactctttggagtggttacctttatcaaaactcatcaaactgtgcacttaaaataggtgaatttcattgaatataaattacaccttatcaaagtgctgtgggaacacatatgtagggcccttttgccaggcgacagcggcttcccagaggaggagtcatgagtaagagtgcaaaaagcagcctctactattttgcaaactaattgcaaaaaaagaaattttatgttatttcttctatactctgcaaaaccagggaaaagggagaggaagccatcgtgggttcagtctgaggacaggacttagctcctctctaggttaacacacaactgctggtggatataacagctcttagagcacacaggcccatcagaagaatccctgatccagtcaatatttattcaaacatttattaggtgcacactccatgccaggccttatgtggggtaatgagactagaacagtggatggtacagacaatctcttgttctataacatttatattctagtatgggagttggatattaagcaagtaaaccaatcaataaatcaaataattatagattgggatcatttatatatagaagataataaagaataataagtgacatagccaggcatagtggctcacgcctgtaatcctagaactttgagaggccaaggtgggagaattgcttgagcccaggagtttgaggcaagcctgggtgacatagtgagactttgtctctaaaaaataataacaatattaagtgacctattagttagggtgatgagggagagcccaagggagtgtcctttgagctgagacttcaaaggtgagaacaagccagccattggaagagctgcaggaagcacagccagatggagggaatggtaaggagtggtccatgatgttactgaagaggcagacaagagccggattcaataggagccttggaggtcatggtgaagagtttgaattttattgtaagggtaacagggaagtgttgaaggatgtgatctggtcatatttttataagatccctcttgctgctctgtagaaacataaaggagaatgacagtagaacaagaaatcaggaggacattgccatggtcctaaaatagatgacagcaactttgacaaaagttgtagtggttaagatagacagaagcggtgacttcaagatacgtttagagttaaaacagagaggactggggaaatctaaataaggtctgtggattttaccaatatcaatttccagttttgatactgtactccaattatacaaaatgttgccattgggggaaactgggtgaagggtacatgagacctctaacctctgcaccccaagggtacagacaagacctctctgtactatttatgcaatttcttgtaaacctataatttactttaaatatttttaaatattttaaattttcaacacaacccaaaaaaaaaaaaagatggcaaatatttaactccagagggaggagaaaagaatgctcataacaggttagatggatttactgtgaataatatttacgtagtcatactgatataaacattccctttggtctgaatgtttgtgtcactcaaaattcaaaattcatcttttgaaatcctaaaccccaaggtgatgatatttggaggtgggctctttgggaggtgattaggtcatcagggtgaacccctaatgaatgagattagtctccttataaaagaggccccacagagatcccatactccttccactacatgaggccacagcaagaagacgctgtctataaatcagaaagtgggccctcaacaggtactaagtctgcagcacctagagcttagacttcccagcctctagaactctgagaaataaatttctgttgtttataagctgcccagtctgtggtattttgtcatagcagtatgaatggactaaggtaacactaaatagggattttaaccaaaaattatgatgacgatatattggaggatgggaaaaggttaagtgtatgtatttggtgaaggagaaaatgggcatataagaaagctaaaaccacattttccatagttgaaagtcaacagaggctgggcatggtggttcacacctgtaatcccagcactttgagaggtcaaggcaggtggatcacttgaggtcaggtgtttgagaccagcctggccaacatggtgaaaccccatctctactaaaaatacaaaaattagctgggtgtggtggcacatgcctgtaatcccagctactcaggaggctgaggcaggagaatcacttgaacccgggagctttggttgcagtgagctgagaccatgccactgcactccagcctggacaacaagagcgaaactccacctcaaaaaaaaaaaaaaaagaaatgtcaatagatcctacttaacactgaaaaaaaaatcaagaaatagttctatatgtataaaatatactttatatacttttatatgttacatactttatatatatacactttatatatatatatacatatatatgagagaaatttttaaacatagaagtaaatagcagaagaaatagctagagttgagagggttgctttggggagtaagaatttaggatggggtaacagactgcttttatattataaaactagtaatacttttttgtcactataaatgtattggtttgctaaacaatataaatcaaatatatctaaagaaataccttaaatgtttggcaaaaaaaaaaaaaaccccacaggacttgcttactggtggtttggctgtttcagggatggattgagaggaagtgagaaggaatctaggatgatccttgggctcttgtttgaacaagtggatgatgacgacatctgttgagaaagaaaaggctggggaagcattgaggtgggaaagcagatatattaaatctgtgatgcccattagacatccaaatggaagcatcaagaaaacagctggatatcccagtcctgagcaagaggtaagaggtccaggctagaaacaaaagtatgctggaaattttatttggatggtagacatcgaccatgggacgagtaagatcatgcaggcagacatgacagaggaataattctataattctaggcccagagtagaatctgagacagtccaatatttaggcttttgagggtgcaaaagagattaaagagcagtcagtgaagaaagaggaaatccaggggtctgtggagccaaagaagggagagttttgaaaaacagtgatcaactgggtcaactgctatgaagtcaagtaagatgaggaccaatgcgctggtgactatggtagctagtctccaaagatggcctcctatgtaaactgggcccctgggtaatcccttctgttgaatctggcatggccttgtcttgcttatgaccaacagtatatagtagaagtcacatggcatgacttccaagcctggctcataagaagtcttgcagcttccacctggttctcctggaatgctcactcctgggacactccctcctggaacccagctgccattctgagaagcccaagccacacagagtggccacatataggcactcaagttgccagcacaagctaagctcccacccaacagccaccatccactgccagccatgtgagtgagccatcttggatgtccagctcagctgaggcttcagacgactccagtcccagctgttgactgcaacctcatgagaaacagaccccaagaagaatttcccagctgagcccagtcaaccacagaagtatgagacataataaattgttttttaaagatactaaattttgaggaggttattacacagcaataggtagccagaatagtgactttgacaagagtcacttttgacggtccagtggtaacaggagccaggttggaagtgggtgaatgaaagtgaatgaagagtgtagacttctttctcaggaagtgtggctgtgactgatgtgggaagtggagtccaggagagtccgtttatgttgaagatgggcaatcctggagtatggctgtatgttgatggcgatgatgcctggagacagggaaagactgatgaataagagggagaagaaagcgaagaattagagtctttggaaaggcaagagctagaattaaaggcaaagaaaggtgggtgcagcagctcatgcctataatcccagcactttgggaagttgagatgggatgatcacttgaggccagaagtttgagaccagcctgggcaacatagcaggaccacatctctaccaaaaaaaaaaaaaaaaaaaagttatttaaaaaaaagttaaagaagatgggtaaggaagtggaaattttgtgaagttgaagtttcttggctttgcatataagtgttctctcctttctcaaggaagtatatggcaaagtcatcagccgaatgagatggtgggaatatggagaggaggcgggggaaagtttgataaaaagagctaatataaaatagtcatatcagaaagtgggagtggtagcagaattctaaaaatagcctcctgagattccacatccaatgcatggaaactgaatgtgatgagattttacttccatgactgtgtttcgttatatggcatagctgatcctcagagacagagataagatgatctgggtagtcataattgaataacatgagcccttaaaagcagagaaacttctctggctaatggcagcagagggcctccgggaacatcaaggaaccaggcaaaaggtacccacggagccccttgagctccctgctttctcacagcttctggaggtcccagataagtccctcttggatttctgcctctgcaatttgcatcctgaactctctgaattcaagtaattttatttatgattggatccaagggttgacctggatgtttgacaggaactggattgtattcagtctacatctggaatccagactggaatccagaaatcaaactgggtgttcaacaggaactgaactggatctagctggagacctcaggaaagcacaattttaggacagaatttagattgtcagaatctaaggagtctaggactcctccatctagaactccagctaattttatgttcagaaattatgggcccagaacctgtgcctttctagagaaacaggtatacctcaggaagattagcagaatgacagcaaccacaatggggaagttttattctagatgagattttatttgggctgagtgcagtgactcatgcctgtaataccagcactttgggaggccgaggcaggtagatcgcttgagctcaggaatttgagaccagcctgggcaacatggtgaaaccctgtctctacaaaaaatacaaaaattagctggg

SEQ ID NO: 19 - DNA, 750 bp, Homo sapiens
ggctccgagctgggtgcagcaaccggaggcggcggcgcgtctggaggaggctgcagcagcggaagaccccagtccagatccaggactgagatcccagaaccatgaacctggccatcagcatcgctctcctgctaacagtcttgcaggtctcccgagggcagaaggtgaccagcctaacggcctgcctagtggaccagagccttcgtctggactgccgccatgagaataccagcagttcacccatccagtacgagttcagcctgacccgtgagacaaagaagcacgtgctctttggcactgtgggggtgcctgagcacacataccgctcccgaaccaacttcaccagcaaatacaacatgaaggtcctctacttatccgccttcactagcaaggacgagggcacctacacgtgtgcactccaccactctggccattccccacccatctcctcccagaacgtcacagtgctcagagacaaactggtcaagtgtgagggcatcagcctgctggctcagaacacctcgtggctgctgctgctcctgctctccctctccctcctccaggccacggatttcatgtccctgtgactggtggggcccatggaggagacaggaagcctcaagttccagtgcagagatcctaacttctcaggaaatggcttttcccaacccccagcccccacccggtggttcttcctgttctgtgactgtgtatagtgccaccacagcttatggcatctcattgaggaca

SEQ ID NO: 20 - protein, 159 aa, Homo sapiens
MNLAISIALLLTVLQVSRGQKVTSLTACLVDQSLRLDCRHENTSSSPIQYEFSLTRETKKHVLFGTVGVPEHYSRTNFTSKYNMKVLYLSAFTSKDEGTYTCALHHSGHSPPISSQNVTVLRDKLVKCEGISLLAQNTSWLLLLLLSLSLLQATDFMSL

SEQ ID NO: 21 - DNA, 37278 bp, Mus musculus
  misc_feature (1)...(37278): n = A,T,C or G
gagccagagctggaggatagcctatcagggtttcaggggtcagaggcccttctttctggtggtggtaggggtcatactccccgctggatcttcaaggacctagtgaaacctggatcatgaagggaggtgggttgttggctttatctttgggtgccaggaggacactgccacctgctggcctagcagttttttcctcactgaggtgaagcggaagattgtggcctctaatgaacagaccacaaaagaaacctccattgcttatggatccaataccgttaagtacccctgaactaaccattagaaaaaaaagagtcggggagctacagaggacaggtggcttctcagagcaagctccctctccctttccaacctctacttctgtcctgcccatatcattcccaacccaagaggagccaagccataccacatctgaggatagaattggatccttttaagatagttggaaccttagaggcccagcaggttctatgaggttgaattagatattgaccttatcagagcaatttaaagctggagctggtatctgttagggtcacccctgcccaaggtccattgtgggaagactagggatacctcagtgaggggtgagggaagcccttgatgtctgtgttaaaacgtgtggttctatatgcctcacatctcagagggagcacagccaacgacctgcctcaggcctcacacatccagttgccacaggcctcccctcaccacacccttcagaaggtcccttaccctcctgagttcccagtctgtctcacaaggtggtacagtacctgcttcagtaccctggtcagcgctgagcacaggagggggttgatgcccagctgggcaacataatgagactcagacttccagagtcagaaactggacacgatgcttacttttagttccaacactcagaggcagggggatctctgtaagtttgaggccagcctggtgtacatagtaaattccaggacagtcagagctacatggagagaccccgactcaccccatcccctcaaaatcaggactactgaaaggatttagatattggggagagcatgtggaagaatgcagaggcatttctggggacatgagactgtaatgcaggccagcagatccacaacaaaatctctacatgccttgtggaagagtctagacttcatgcatgcaggaaattaagagcaaatgaaggtcaccatcacaccaagttcaatgagcagggcagggaaaacaagaattttctgactcctgaactcctgcatcaagcccatggttagagccgggcctcccgagaaaagcgcaagagcaacacttttcttgcactgactggaagagcccaaggcaaggcaaggtctgagctgaccctgaggggagctgaggcttagagtggaaagcttggaccatgttctggtggtgggtctccggccttgttccttccccatcacagtgccagtggaaggaggcacggtccccagggaaggggggagagccagccggcggccagagctggattccctgagtgccctacactgatgccgagaaaagttgtgctcctcttgtgctatgatcctctttgtttcaatgacttgtttctcaaacgctaaagctacttgggctgcatgggcagctgtgtacctgcctttcagaagccccagggccctcgtgtgttctatggaacaaaatgcttataatccagctcctacagactcttgagagtgaacactgcagacatgcagtctatgtgccttgactgccttaagccagttcctggcactgcccccagaacccccctccccaacatctacactgcctgtactctactctcctttctcgctcacacttgcaccctgctccccttacacgcgtactcaccatccaccctctcattcagacatgcctccctgtgcacacttttcatgcaaatggccacccacactcaagcacatctttacaaacacatcatacacgcccccttatggacatctgtcatgcccatagctttgatttcacactcatgtaactcatgtacacttgctctcaattgtccgctgtggccagacttaaaattacctcccatccccaccccatacccccggttttttgtttgtttgtttgtttttgtttgagacatggtcttactgtgtagcccccacctccactagcctggaacttgctatgtagaccaggctagctttgaacccatagagatctacttgcttctgctttctaagcattgggattaaaggcataggccggccaccacgcctagctcagaatcctttcaattcaaccatttggccatgtctccacacccagaatctttatcatttgaaggatggacggctacagcgttctgtgcttcttgccaagtcagggtcatctgttgccctgccctgccctgtcccctctgtatcatcacttctccccctaatgattccataccacagtttgccactggggctagaggaacttttagaaacacacttgggctgagatccttctgtgttaccagtgaggaatcaggcctaaaggtattctgtactctgactcctgagaaagctgccgagctccaccatggagggactacccgaccttcctcatttgccctctctgcctagtacctggctgataccctgcacagtgccagcacaggctgcagcagagtacggataagtgaacagcagattgtcctttcagatggctttccctggggatgagccaagaaggacccagtgcctaagccccaccctaaccccaatttgacaagacctcttctcttgcatagacagcttgtgtgtgtgtgtgtgtgtgtgtgtgtgtgtgtgtgtgtgtgtgtgtattcacgcgcgcgcacactacctccatccttccaagaggaaataactcacagatgactcagagggtcttcgggaggatggatagagacagagaagtgtctggacatttggtgcatgcagggtctgaaggctgtggagagttaaaatttgccttcttgtttgcctatgccataaggaacagccaggttggactccaggctggccgccagtggccttggagtttgtgggggctccctgggttcgtgaagcttttcttctggttaaccttggattaggtggccaccgttttggggtggtccaccctgctcgctcacctggacaagataaagacttggaatcattgtgcctactgctcaacaggaaataagcatttggtccttttctccatctcaaaagtaaacaaatgtaagaaaacaatgacatataactctcgttcccagaatcccctgctccacagccccgacttgaagaagggggatgactggggccttcctttctaggttgttcctgttggacctgggacaggagcttctagagccttagtgaagcaggctccaccctaggcagaccctctccctcacacagtgactggcttcctttgcacccccatcaccacacgaaatatttagtaccctctctgcccagactttcactgcattccccccacccttctggagatcttggctataaatctgactgaaggctcagtaactcaaccttcccttcagcctcccagccctcataaaagccccagcctcagctccccataaaggctatccttccagcctgccccttcccactcagcactccagactccctctctcctcagcccctccccatctgcctgtcccgtccaccctgaacacccctctgtgcgtggcaaatgtaagccactccttttctagtcctctagccacagttttctgaggtctcttcaggttgtgatgctgtcactaacccatgtgtcccaggacatcccagagagcctgtcaggtgggaactataggtatagcacagagcaattaaagtcagaaattcagaagctcagagaaagcactgactgtgagaggaaactgtaccctgccctctttctttctttctttctttctttctttctttctttctttctttctttctttctctctctcccttccttccttttttctctctctctttctttctttctttctttctttctttctttctttctttctttctttcttccttccttccttcctttctttctttctttctttctttctttctttctttctttctttcttccttccttccttccttccttccttcctttctttctctctctctcccttccttttttctttctttctttctttctttctttctttctttctttctttcttccttccttccttccttcctttctttctttctttctttctttctttctttctttctttctttctctctaaagatttatttatttattatatgtaagtacactgcaactgtcttcagacactccagaagaggtcatcaggtcctactacagatggttgtgagccactatgtggttgctgggacttgaactcaggacctttagaagagcagtcgggtgtctcaccagcccccctgcctgctttcttgcttcagttcttccctacagaagacagacacagaaccaggtcagaaactaagcagaacttcaaatccccttgcttatggacttgctcccacagcgtaggctctcataggacttctaggtcagcagtttatgatctctggtgatgatggctccttaatccagcttgcaatagccacccccgaataccagactgtaccggtgttattcagggccacgacggaggaatgctggctcccaccttcctttacccagggccaggagctgctgacccggctaaagaatgtgctttgcttggggttaacattccaggatcagcttggaagcccaaggacttgtgttggcagcaggagccaactgagcacaaggcagagaggggggactagacatcgcccctcaaatccgggcacatatcccttctatatatttcctagtcactcctgggaatggaggcagaactgacaggaagaacatattctctcatttatatgaagtgaagctactgggccctgagctgcagtgtcccttgcgataagccccacctgctggggagcctagaactctctataaagccacttccaagttcagggtttcactagggcaattaggcttaaggaggctcagtcacatcacccagccctgtctctgactcccactcagccttgttgtgcttcctgcctcatttgcatcaactaccaatgcacccaacacctaacccaaggctcagtgaagaggcattaaggttctgtgcactggagtgttgacagctagagagacaggagttatttttactgacacagtctcaggcgtcaacggtcccgggtgacttactgcggtggaaccactcagggagcccatggaaagcactcgggatctggggggcccactagaggaatcctgtagcgtttaacacctgcctaaagcgcagacaccctggttttgtaataccacagaaggagagttacagaacctcagaggtcagaaagaggatgtcggtcaaagggcagacaaggaggaagatctctgtgttctaccactaacaggaaggcgaggagccccttgcaaagcactgactggaaccactagaatttaggataaaatagaaaataaaaataaaaatagatacccaccattgagcttaaaatttagtatgtgggatagttaagagcatcttcatttcctctctccacagccttctcttgtgtcccccagctnnnnnnnnnnnnnnnnnnnntgtcacccagtttctcctgtgtaattcccagctcctcctgtgtcccccagcttctcctgtgtccccccagcttctcctgtgtttcccagctcttcctgtgttcctcagctccccctgtgtttcccagctccccctgtgtccctcagcacctcctgtgtcctccagctcctcttgtgtccctcagttcctcctgtgtcccccagcttcttctgtgttccccagcttctcctgtgccccccagcatagctctcaagccccagacagtttcaacagtcactcactaactctgagcttatcttcactctggcctgggtcagatcaaacagctcaagtgtctgttaagaccttgttgtacagcctccccgaaacataattggatctctgccagaactggccagaagacggaaggctagccaaaacccaagataggaggacaccatccatctggtaacttcatatctcatttggtcccaaagcaaactcatgaaggagacatgtgacatgcttcatacatgagtacagagcatcaggagcctgagcaaaccagaatccttacctagccataagcccaccatttctggtgcagtctatgtgaccctgtagggacaggaacttcatctctctgtggcttagcttactcattggcacagtgggcataatcatatggtagtgttcctagtgaggagtgagttcatccggacaggccagctaaggccagcacaggctgtcacattccttgtaggacttgctagaattttagcttgtacctttgtagctccagcttgcttgtatttccagaatgcatttgggccccacaggtgttgtatgatctgacccatgacatggagattatcatgattatttacctccagctatgcgactttctagctggtgacactatgcctaggatgcttagaacttaggtcagcgcaacaaacagtagatagacattgtagtcagtttcagccatgacacaagccctgttatactcaattaggccagaagagagcagctttgagccctcaatttcctagactacagggttttaagccagctccttggagtcatacctccttggtttggagaaccagttctaactggctggttcctgttcacacaattccatcagcccctaagagggcaaaggtccacatatccaggccttactgtccaccacagagtggggctaagagctgaccgagggccataactcatctgagttctgggaaaaggcaatttaatgacccaggtctctggctggaggtgggtggtgagctgggtcctgcatctgctcttctcccagaggaaaaaatgagatctgccccaatagtcctggggagtagatactcttgtgtcctagagaccccttatggttctcggatacacagaaaacaaatgcattagctctctctgttctttctccctgcctctccatgtcatgcctaagactaatctatgtctcacccaccacttcaaaacccaagtggcttcctctgagcaccccctgacccctgaactcctgaaccagataagatccaacttttctgccatatacctgtacttcacaccactttgagaggtctcccactttctgtcctagattatagaggaagcttattttgtttttatcttctttatttatcttatttctcttgttaggcagaaaaattctcgagagtggggaactaattagtagtcatcccccttagatgtgcctgatacctgccttacccattcccatcccatttcccccactgcacataatacttgtcacagcacattcagactatggagttcaggagttcaggaatggatacttattcccggtgactgcacagaaggctcattttccacaagagtctttaaatccttggttcccaacctgtgggtcatgacctctttagaattgcagggccttttctcagaagtcacatatcagagagcccccgtatcagatatttacattacaattcataacagtagcaaaattgcagttatgaagtagcaacaaagataattttatggttgggaggtcacgacaatacaaggaattgcattaaagggtcaagggattaggaaggttgagaatcattgggctaagtagttggtgactgggtgcaagggttagaagaagtgcttcctcctaagactagagcgtgaggcagacaaactgaatgagggtgactcagctcagcttaaacgtcctaacaaatcctccaaagagctaagcccaatctttaagtcactgagccacatcccaggtcctccctacacagaatgaaagttagttctggcacttggttgttctaatcagtagttctgtaaacaattgttgttaatttatttcatatgtacagccttatgccagtatgcatttctgtgcagaagatacatgcttgatgtcgttggagatcagaagagggggccagaacccctggtactggagttatggctctttgtgggtcatcttgtgggtgccggggatgaaatcctggtcctttggaagatcagtcagtgcccttacctgctgagccatctctcagttctctccatggttctgatggctcactcctctgcctgcaggtctgtttgtttgcctcctgtgtccatccatccatctggtctgtatgaatccactgtgcacctttatctgttcagcagtgccctgggtattgggggtgtttaggaatagtgataaatgtctagattgagtcttaaaggaaaccttgggctcctctgaaaaaaagtcttcatcttatgaggaaatgttgatacagctagctaacagacatgggtcttctagtaagctttaaaagccctatctttagaaagcaaccccaaactatcctcctctcatcttggctaggggctccctcctcttttcatgtcagtcaggtctagaacccaggtctcccatccctgagcctgctcctctgacacatgcttttcattgtcctactctgcctggacagaccccaggaactgacagacagggcgcacagagagcagactggttgagccttttctattttcacagactactcagagtggagaggcaagctggcagaagatagggcactaaactagctatacagtttccatggaccgtccgaacttagagaaggctgattcccggtggatggtctctggctacagagagctccaagacaaggagataccagttattccctctgaaaagattcaaagggcaaacagaagtaggaaaatgggcagagagtagttttttttttaatttgataattgaggacgtagtcctctttgatcctctgccaagtcctaaagatacagctagagatgaggtcctgcagatgagggagggatgcctgcccggaatagctagaattagggaagtcctcttgtcctgtactctttccctataggccagtatctgaattccaggctttcttgccagctgtgtggcagaagtaaactcactttctacatcggaaaggggggtctggacatagccttccaggccccttaaatgcagccaaatcttatgcccaacctcctgctcttttgaaaaaaaaaaaaaatccactgggaggaaaccctgggaccaagacactccttacagatttaggagctcgtggatgtaagtccttggaatgtgatgtgcttttttcacaatttatggagatccacaaggccaccacatcttgagggaatccacgcaaccctacaaagtaaggatttcccaggcctgttggattccagaatccaattaaggttggtggaatccaagcagagtgaacatggagtcaggacagctctctaccagtgcttagctggcgtcagtctccaacccattccatctccctattcactttctcctttatggacctcaagaagttatcaaaaggcttttcagattttgagcttggaagaaacaatttactgcatgtggagaaatacttcgggactttctagtgcccttagattgtcccttgccaaccgagaacacagcacaatagcacaaggttggcgtcattcagagactaaagcaattcagagagccttcaatcctaaagactggcacttcggtattaattcggctctgcctccattctcgcattcctgggcctcgggtccaagtgggcggggccccattcacacctttccgcgcctagccaaggggaggaacggggcaggagagggtgaaccaatgcgagaggttttggtcacgagccgccggcaagtcggccaatgggacgcaggggcgtggtcaggacattccccctcgaaacgttttatagcaattcggaacgcggggctttctagcgtgctcgggtgcggctgtgacctctgagcccgcggctcagcgcgcgctgctactgctgcccgacccactccacctcgcggtccccgcaccatggagtcggtggccttactccagcgcccgagccaggctccctcggcctccgccctggcctcggagagcgcccggccgctggcggacgggctcatcaagtcgcctaaacctctgatgaagaagcaggcggtgaagcggcaccatcacaaacacaacctgcggcaccgctacgagttcctggagacgctgggcaagggcacctacgggaaggtgaagaaggcacgagagagctcggggcgtctggtgagtgtccctcgcggctcccggctctcgggagctcacagcgcgtcccttgcggtgtcctcggctgcgttgccaggcgcgcgcattttagatgtgtctgtccgtggttttcaggacagtgctcatctgtcctgaaccttagcttcactagatgcctgtagtttgagaagacggagcttaacttgaattttgacgggaacaaacgtcaacagagtagaatggaaggaggaagttgaaagcaccagttcttagtagatggatgaggtgtggagatctttaactctgacttgacactttggggcctttccagccgaaatgaagctaagtttggttgggataggtttttattctgggaaatgtaaaagcaggcccaaatgtcaggtccactcccagcactccagccacatctttggatgtgaggcctttggggaacttgcccttttgatttacgcatgtgtaatcgtaataataatccgtaactctgagcaagttcctccatctctgttttctgtttccccttctgcaaaaatagagagaacacagcctgtctcacaagctgcttggaaaaaataagatataaatgtgaatgcacttgagccctgatcacagatcctgtgttgagaatgaatactcctatctggaaacctccccttggaaggacagcaaatttaccaaaagttacacaacaatgtttcttccactctagttcagtgggcctgagtattagctggctacttgtttaaaatgtgcagtctctcattttccaccaagggaactattttataaaaggtctataattcacattttcgcaaggctcagagcaggtggtttagggagaacatttggcaggtccagtggatgctgtttgtaagggggtgtgtatgtacagccatcatttgccctattgactatgggaatggtcccctcccctaattgtttgcttttgcagccagtagctggtttgaaattcaagaagtcatttcattggtgaaggagagtggatgttggagaaaggagtggattataaccccatcaataggagcaagtatgtttttcctgctaaggcctggcacagtccccagttgcccgctgccaggttacagttattgggcaatcgtgtacttccgggctttcttttctttctctttctataaagtgccagggcctcagaggcttcagccttgagacttcagggcccaggctttgtctgggggcttagctaggaaatagtggctaatagtggcttgtgtgctatgtcgcttgttgtaggaagagtggattgagggagctagagtgtctgagaaactgagatcaaagttcagagttcacatcagctcttgattgacacacacacagagaaagagagacagagaaagacagagagagagagacagagagagatcacatttgattttgaagtgaagtaaatcaatgactcttgcatcagaacagagaaaatcaaaaggagctctcaggttcccatgtcttgctgcatgcaaggagccaagatcagcaaatgtggagatcctgctctgaaactccccagcaggaccacccaggattgctgttaagagtttgcttagccccccccccccctttcttggaaagcagctctccgctgtgctaatgatttctcaatcctggagcagtgccctcatctccacccacccacccctacatcttaactgctttccctaaagagacctatacttctgatacttcagtgggggagaaggacatggcgctgcttaggccttgccctgaggagctggggctgttggtggttcccaggaaagcctcctgctgccaggaatttctcaccacatttgcagcttgcttcccattctccttatagagatagttaagcagggtcccatgggattatctgaagggagggacaggtgtgtgtgtgtggggggggggacacacggactaatggctgctccaggagggcatcagaggaaaaacaaatatttgctctggatctcagacacattcctggtatcgaaatgacatttcctcctgtgagtctcccagctcccctgaccaacccctaaagagaaaaacacatgcccgggtctcaccgaagccattggtctgatctgcatggatgactcagtcaccactaagggggccagaagggcacccatgtgggtagttctgtggggtcacattgcttctgttccttttacatttccaattgctcagtgggctacagaagattgagaaacgacggagacaagctgcttccttcattggcagatgagggaactgaggcccagagaggggaagtgacttgtcttctggctgggcaatggcagacctgcagcaaaacctccagacttgtccaccataagctttggatgaccaagtgctgagtcttggtctggaagttaattttgagatgagcccgggcttgcctctgagtgctttgtcatcccatcggctagctccagctgccctcccagcactgcaggcaatgtttagagtgggagacggcactgggaacccccattctttgctgaaggatcctgggtgcaggaacgatactatattcctgcaaagtgtccaattgtgcttcctattgcttgccggatgcgttacctctctagagtcccctctgtgtaaaatgcagattataatgtagtgggtttccctaggattaaataaaataatatctgtaaaatcctagcagtgtctcagacacatgtggcttattgtcccagtaagggtgactttgacctagggaactctcttaccctggtcctctcctgcctcaataagaagcatggactgggctcagtcttcttgagttgaatcactatggtctctgctttgttcaaagccctcatctctcattcagccaacttcagagaaggactccggttggccagccgccaaaggcttgttgggcaagatgctgccctcccagctcctcctgcacctgcctgctcagcagcagggagggaggctgcaggcgactcttgtccttgggctccagccaaaccacacaaaagggctgggcagagaagctccttgctcaggaacctggcagagtgggctaggaggaggcagggaggaggtggcattcgatgggacttggggagatggctcaggttacctgcacagcttcttcctgattcccgtctggctcttggtaaggtggtacatccccgctgctcagccaggactgcctaacctaacctctcctgcactatctaagtgggtcatcatccagcaccttgcctgcttcccatgaaagggcacaaacgagtcaaggatcttggctgtgaccagaggtgcccaacttgggccatctctcccagcaaccagaactagcatctctgccctccccacccccttcccttctttttctttctaaagctttctgatcacttgaatgcagatcatttctaatccgagctctgggagagaggagttatttacccatggagcctcagtaccaactaactcctcagggtgttggcaaagagtgggcatgttttaagtggaaggagtggcacacacaatgtggcccatggcaagatacgggcagtcccttctccagagatggggggcagggcagaattggacacctccaaggaacttttgtcttctgagatactagcttctccttcattgtagtcctgtcctgtgcatggaggaactttggtgaagtgagtttatctttctttctttccttttttttaagatttatttattattatatgtaagtacactgtagttgtctgcagacacaccaaaagagggcatcagatctcattatggatggttgtgagccaccatgtggttgctgggatttgaactcaggacctctggaagagcagtcagtgctcttaaccactgagccatctctccagccctgagtttatctttctgaagtgttcgctgctggttggggagttagctttgttgcctttatgaactcgaagagcttcaaggacgagaatggttttagcaggtctgctctggcagctaacatggcccagcctgacggcctagcaacggtccttagatggctccttcctgacattgcggtgacccatttctgaagaagctgtacacagaacgttgacgcatggaaggaaacttggagatctaccctgacctgcctggcatgctctgattcacttccctagcccactgtcttagccgaaaacctcacccatccttccatatctgaaacagttttctcctgggctggttccctatgctcttccaagtaaagaaagccactcccaatgctccccaagcctttccatgagccaggactttaaaagctggacagcccaggagtgcagccatagctgagcagatagaggcacttgctgcccttgcagaggacctgagtttggtttccagcgcccgtgttgttggctgctcagaaccatctgtaactccaatttcaggggatccaaagccctcttctgatccccatgggcatcatatgcctgtggcacatatgtatggcacacaggcaaaacacccatatgcataaagtaaagataaataaataagtcttatcaaacaaacaaacaaactggacagcccagttagccagaggctcctagttttctgtgccttgtgttgcatggcttgagacaagtgagaatcaggtgcctgggttcacatagacggccatggattcacatacacagagtcatccttggtctgcctcagagtgtggtggccatataataaatggattacatgtgggtaatatgcagggtgaagagagtgtcagggagctgaaaaatgaggcttcagtggttaacagcacttgccgttcttcagacccccccaggtcccatcaccatcaccaccatccttaactccgcttccaggggatctgacaccctcttcagacctcctgggcaccaggcacacacatggtgtacatatgtatacatgggaaaaaaacacccatacacataagattaataaatttacaaaaattaaaaaaaaacaaacaaacccaacttgtgtaaggacaaagaccttggcctgtggccatcctttgggttgggtacctgtctgcagttggtaccttcttcttaggcttcagccagcttattttcatccttaggcacagttgccagtaatcctgcaggtgagaacaaaggtctctagaaattagttcttgtaactgagggagactccacccaggcccggggaggaggggatcggagaaaccttatctggtcactggttccttcaggcaaagatcatccagggacttaacaaatagatatttgtaatgagtgttcactagtgtccagctgttaagggccttctgcaaacagggctctttctagtcttgagtggtagtagattgaactttgatatactagggctggcagagtttggggatagtggcctagccccaccataccagtgataaatcaatccttgtcttcagtcaccctttgggggactgatggaggaccaataacatgccttatttccttcctgggaagtgccagacaggatctcctagtacctattgtggataactggggttcgtcgactgctcctcaccccttgtatgtcttatagaagaatgatatagggtgaagttagaattttaggtcttctaaggttagaagtggctcttgatacctgcctgcccacaagccataccaaataattgctagcaccctcaaaaatctgttttggaaactcatttcttttggcccctatacccttagagctctgtccctaagcctatgacgtcacctcagtagtctatacacttgtgtgtacacgactgtgcatctgacatctgcctgatctttgcctggatgcattttaagcactcaggtatttttagttgtctagatagtggtgtgtgtttacctatgactgtttttactacctactaatagatcttttacagacctttgtctctaaagagttcacagccctttgctcattgtctggtttcatgaacaaagacttacagagaagagagcaggccatgcaatctccccttcaggctgagaaaagcagcgtggagaagcggcgtgtgggagtatggctctgtgctgaatggagaagagagagcaatctcctagctgaaggaatattcaaggcctttgccctgctcccctgttctaagcccaggacttttctgcctagctctttagggagtggggttagagcagaatgttgaagcagaccgatcctcccatttgcattatcccccatctgcatcatccccctgcattgggcctctcagggatgaggctccatggtgaccatctgctgttgtcctccctgccctgttctggggagggctgagaatggggcctgtcccctttcagcaatgcagctttagggcctgatggggtggagggcacgccatccttggcccgttgccggggtgaccgagctatgggcattgtgagcaactcctctgacaggattagggctattccgcattcttgtcagatggggagcacaaaccgaaaagagcctgctgtccagagagctgaagctattgtctacctccggagcctgtgaaagggtggattagaggccccaccccttgagcgggggtttcctttctgtctccttttgaatccagaggggaggccagccctcctgggaaattgaatgaggagctgtttacctcaggctgggccttcatatttcttattacttgtctgaagaggaagtcctgtgtttaccattctgttggtgtccatggccagaacttgccaggaactgactgacctgggacacccaatcttcacctgagggccactggcttctgtacagctcacttcacagaccagaccagaaaaggcccccccccccagactacttagttcaatctgtttatttcacggaaaggcagctgaggcactgagaagggtaggacttacccacaaccactgggatagaaccggagaaccaggcgttgtgggtcctggctctatggtttccattctctccattctagagaaagccatggaccagaaagacggacactcttaagtgtagctcctctgtttcctctgtacccacccttcctgagcccgatacacaccagctaggggtcttaatccttttccacctttaagaccctttaagtctgtaatccccagaggactgtctgtctacatgtttgcttgttgttggacattccttacctggactttgaagattgctcactggagggtggtttttgtttttgtttttgttttgttttgatgatcttttttcttatggcaaataacttgccagcagtttaaacagatccacattgttgtaaatcattctaatacaaaataaaatgcttttatttgttgtgtatgtctgtcttctcgggatgtatgtttgtacatttgctcagggcgtctggtcccttggaactggagttacagacagttttaagctaccatgtgggtgctgggacccaaactcaggtactttggaagaacagccagtgctcttaactgctgagacttctctttttcagccctctaaaaccgttttatcatcccaagtagaagtgctgtacccattaaataacaacacccccatgccatcttttgccctatacccctggtaacttttgatctattttctatagagttgtttattttagttcctcataaaagggggtgacataacatctgtcactctgtgactagcttatttcactgagtatgttttcatggtttagccatgttatagtaggtatcagaattccattccttttctgacagattgataccaaatttgtctatctatcacctgttggtaggcatttgggttgctttaatgtttgatgagtgagtggttgtttattgcaaattgtcgtttgggacagaagaactaaactcaatcagcttgccagctgtgctagtcattgacaatgactttaaggaaagcatttagtctgctgtgtttccagtttctttaccagtggctgagggtgaggatactttcttcttctctttccagagcccttgtgaggaccagtatatttaatcatatagtaaattgctattccctgactaatgtgtgccaggtcctctacctggcatcgactgctgagcagatcgtcctgagcaagtcatcccaggtccttgtccttggggtgcacattgtccttgggatgccctgtgcatatttgatttgtaaatcctgaagcatctagcctcacacaggtgcaggctgttacgtttcttgttcatctgtagactttaaaaacgaggtcattagtcattgctgctttgactgcactggactcaggtgacaacctttgcttgacaaggtgatcttcaaattgctgccacctgccctggtgaaggtgggtgtcttctcttagtgcctgctgtattgcagctgcaggcagagttccaggaccagggctcatggagcatcctcagagatgcctctaccttgctagacctttctccttaatctcctgcatcctctgttcccaggtggccatcaagtccatcaggaaagacaaaatcaaagatgagcaggatctgctgcacatacggagggagattgagatcatgtcttcactcaaccacccccacatcattgccatccatgaaggtacagtagtggaacacttggagctgggaaacaggcaggactctgggagtgagggggtgcacacaagtcagatctgccaacacaaagaagtagcatgtgcccaatagtgatgcctgtaaccccagctctaggctgcctaagataagaggaatataaatttgagatcatacaaaggtgcataacaggaccccaccttttaataaatacataacttaaacaaagcaagttctcttaaaaaaaaaaaacaaaaaaaaccaaaaccaaaacaaaacgaagaatgataaaggctttggagttgcaaaagccgcatttaaaaccctgccacgtgacacaggacttctcccgtaatccatctatatcacagggcggttgcaaaaatccaactgcatactgtcaccgagtactttgtaagtggaaaagccagtagtttagtttatgtctttgtagtgtggctggggtcctacctagaatcccatacttgctaggtaagtgctgtaaattgagctgcaccctcatctcagactgcaagccttttgttgttgtggagtttttccctaatagcactgcctcccaaccccacgagatccttagccacccaggagaggctgaaaggccggagtctgcacctgtctcaggtgtgtgggtgctgctcaatgctcctctgttagccaggcctcccagagtcgccttgtgtccctggatcactcctgcaggggtttactcttgcctctcttacctctcttctgacatcagttctcgcttgatcactctggctgccctcttccctgcagcccagacaacaaagtgagcaggaggggtgcccgggaagagaatgcccctcccacgtacacctgtctgcttcaagtctttatgtaacttcagtaacccgcatcacagggacagcaggaggaggggggggagggggnnnnnnnnnnnnnnnnnnnnnnnnnnnnnnnnnnnnnnnnnnnnnnnnnnnnnnnnnnnnnnnnnnnnnnnnnnnnnnnnnnnnnnnnnnnnnnnnnnnnnnnnnnnnnnnnnnnnnnnnnnnnnnnnnnnnnnnnnnnnnnnnnnnnnnnnnnnnnnnnnnnnnnnnnnnnnnnnnnnnnnnnnnnnnnnnnnnnnnnnnnnnnnnnnnnnnnnnnnnnnnnnnnnnnnnnnnnnnnnnnnnnnnnnnnnnnnnnnnnnnnnnnnnnnnnnnnnnnnnnnnnnnnnnnnnnnnnnnnnnnnnnnnnnnnnnnnnnnnnnnnnnnnnnnnnnnnnnnnnnnnnnnnnnnnnnnnnnnnnnnnnnnnnnnnnnnnnnnnnnnnnnccccatgttgatggtacaggcacagggcatcactgttactggtgtctaaagggttcctccagattcattttcatcttgctatagactctagatgttttgacctatgggagtgctaggactgacttctaatgttcctcacagtgcaccgtgccgcctctttatctttggttcctagcttagaggttgcatatacactgagaaccacaagtgaagagtctcagtcaggtacccctaagagtctgggcccccgagttcacctggaaaacagcaccacaagtctttctctggccttgaagctgaggactcaccccttagctccttctcagaggctctggggctggcccagcaagccaaactcataggacccgtttaacacgaagatgcgctgtcatagcctagcatgttctgacagacacaccagctgaagggccagtttcaggagccagctattttctacgtttttagaggactggagccagggctcggcgtgaggtggtaagaaggcccctcctacacatggagatgggctaaccggggtgggctgactgccaagaagccagccagctagccagccaagtaattaccacatgtttattgattgcctctgtgatcaaggccataagcactccagccccagcctgcgtcctctgaatggtggcaggactgagcactgtctaggctctcacagtcacagggcaggtgtcaggttttagaattatacacgagaacagtatacattaataggtcctgtttttgagcactttctcgtgtatcaaatactgtaccaaaccaagcattgtctatcaccggtttcttgcctgtttctcgcctgagaccttggaagttgctgttgtctgatctcaggggaggaaactaaagcacagtggtttgattgcgtatccaagtttatccagcagctctgcatgctccctggtagatgtagtagcggtttgaccaaggtcataagatgaagtttagggccttttactcctacagtgatatctctgtctccctgggagattgctgagtcctcaaaagcctaaacgtagccactgacctcatgtcttgatttgctgctccaagaaggcactgagtcgtcttcgtaggctcttctgcccttattcgctgctctgtggcccctgtcccctgtagcagacattccacagggaggtcctatctggggcgaggctatgaaagagactatgtcctgaggtgggtgggagtgtgttctccaggaggcctgacattctcgctcgccctctccagtgtttgagaatagcagcaagattgtgattgtcatggagtatgccagccgaggcgatctgtatgattacatcagtgagcggccacggctgagtgagcgggacgccaggcatttcttccgacagatcgtgtctgccctgcactactgccaccaggtgagcgcccaccttccagacccggtcgtgttctttgtgggagggtatctctggggcgctgaggctgggactctgagaaaagcttcggggctctcagaccaaggaatgctgctatctctagctttgttctcttgaccatagaaaggccttaaactttgcctgtgaatttgtatcccagagtgcctgtgctcagctctgataattacatcttctagacgaggtcccttgtctccattcccttccctggcgacggtccctgactcggttcccttcctcttttagaacgggatcgttcaccgagatctcaagctggaaaacatccttctagatgccaatggaaacatcaaggtgagcccctgcttctggcttctcaaggctctaagtgcttagtgggtccctggaccttagccatcttctatcccaacacgttctttatagatgaggcactgagccctcaagaggaagatcaccccactagtgactggcagaggttgggctagaacagaaatgaagactctgtctctcaggccagttacatcacaagcgtggcaacggtttaatctagtgtcaatttttactcaaaactttggggccaacaggtactgagcctcattccccttgccctgagtgcttgcacacgaacccacgaacccatctgttacagtcaagaagccctacagggcctttcctttttgctatcactttctgtttcccggaaaacacaggcttctcattcacatgctgaagtagctagacttatgtcaatcacaagttcatgccaaggaaataaacaagaatctcagggctggaagggcaagaggacaagagctggctgaggtaacaggctagcctggcaaacaactgggagggtgtcagtctggcacttctcagatctacccgacatagggcaagggtcactttatggctgctgacctgcgtgtcctgaggtatcctggtactgagtcagtaacccttatccaggccaatcctgaagcaggtagggtctctttgatgctgacagggaagggaggccagagccagtaaactcacacaaaccggagaagggcatagactctgttggtaccaatcatcaatgtcattaccagttcacatggcaactgcttgataagcgcccaataaagctataaacaaaggagccagggtttcataaacagccctctccaccctgcacacatgaccctttgatggggtgaaggatcaggtagccccagggtcttgacctccacctctagctgatgggaaagaggaggaggatcttagaacctctctggcccttaaaatccagcagctcgtggtgggggtggggtcctttgagatgattctatctctgggctgtgaacttctctgacttttgtcctctcctctcctctctcctctcttctcctctcttctcctctcttctcctctcttctcctctcttctcctctcttctcctctcttctcctctcttctcctctcttctcctctcttctcctctcttctcctctcttctcctctcttctcctctcttctcctctcttctcctctcttctcctctcttctcctctcttctcctctcttctcctctcttctcctctcttctcctctcttctcctctcttctcctctcttctcctctcttctcctctcttctcctctcttctcctctcttctcctctcttctcctctcttctcctctcctctcctctcctctcctctcctctcctctcctctcttctcccctttacccatgcaggtccaccctggcttcctgcctaggagtgggcagagatgaacccttggctcagaagggcagctcaggcttcatgtagttactgggccttgcttgcctactgagggctttaaggcactgtctttcaggacctgagctatgagatgtaggttgggtgtctctttccttccaccagggcctgactcttcccaggatcctgtgtattcaggaaacaggaagtgataataacaaggcaggggagctgaagggcttcttgactgcagctgattaaactgtattccctggagaaaggatgagcaagggctgtggaacaacccgacctttgtcgtgacccatgtttgtcccgaccctatatagattgctgactttggcctctccaacctgtaccacaaaggcaagttcctccagacgttctgtgggagccctctctacgcctcgcctgagatagtcaacgggaagccctatgtgggcccagaggtgagcatccttctcctgccagcatccccgaatccaggtcatgcaggataggtgaggtagtttgcttgttgcttctttattggagcacaaaactcaggcccctacaaagcagtgacttgccaagccttgagggagaagtggcaaagctgtcgcagaacagaggtctcccggcatcgtctccttcttgccccctggttctcatcaccttctggtgctcagtccagccacccccaccttgacccagaaggacagcaatggcctggccacttttcccgggcttccaggggaagtgaccggcagcatcttatcctgtgagctcctgacccctctacttcacctctagttacaagagcgggtaggaggaagccttcagatgagaccttcccgtcttccgtcgtgttggagagacgcagacggcagctctccagtttgcagcacatgctgtgtctttgctgagcacccctccccctctccctctcaggtggacagctggtctctgggcgttctcctgtacatcctggtgcatggcaccatgccctttgacgggcaggatcataaaacactggtgaagcaaatcagtaacggggcttaccgtgagccgcccaagccgtccggtgagtgggtactgtggcccagctgggggagtcgggtgcactgtcactgccagtgattcccaacacagtgactagacaacggtaataaagaaggtagcagtccttagtaactcggggagattaggatgcgacccacttttctccagtctgagacctctgaggaagggggcagctttcttcattgtgagcatgctttagaagtgctccctaaggtccagcttaatcctctttgctatagttgtaattgtttcttattgactttctcctcatcctgagaaagctgacccttcatataagatctagacagtgggaagaagtataggagagctttgctttgtcgttggagcatacttccagggaatggactttcagcagagaaggaaaacacagttgtagaaacaagggctgggagggaaagcttatgggacagagaggcagttgcctgtgtctgtccaggaaagttggcctgggagagggcctgagcctgtgtggagcctgaggaaggagtggagtacactggtctcacccagaagcatgagcagtgttcccattcaggtgaggtaggcccatgctagaggaccttggatgctggttcttgcagctctcaagcccctgcctttgttttacagatgcctgtggcctgatccggtggctgttaatggtgaaccccacccgtcgggccacactggaggatgtagccagtcattggtgggtcaactggggttacaccaccggagtcggggaacaggaagccctgcgtgagggtgggcaccctagtggtgactttggccgggcctccatggcggactggttacgtcgctcctcgcgccccctcctggagaatggagccaaggtgtgcagcttcttcaagcagcacgtgccgggaggtggaagcactgtacctgggctggagcggcaacattctcttaagaagtcccgaaaggagaatgacatggctcaaaatctgcaaggtgacccggctgaggatacctcttctcgccctggcaagagcagccttaagcttccgaaaggcattctcaagaaaaagtcctctacctcgtcaggggaggtacaggaggaccctcaggaactcagaccggtgcctgatactccagggcagcctgtccctgctgtatccctgctcccaaggaaaggcatccttaagaagtctcgacagcgtgaatctggttactactcctctccagagcccagcgagtctggggaactcttagacgccagtgatgtgtttgtgagtggggaccccgtggagcagaagtctccacaggcttcagggctcctcctccaccgcaagggcattctcaaactcaatggcaagttctcccgcacagccttagaaggcactacccctagcacctttggctccctggaccaactggcctcctcccatcctgcagcccggcccagccgcccctcaggggctgtgagtgaggacagcatcctgtcctccgagtcctttgaccaattggacttgcctgaacgtcttcccgaaaccccactgaggggctgtgtgtctgtggacaacctgagggggcttgagcagcctccctcagaaggtctgaagcgatggtggcaggaatccttgggggatagctgcttttctctgacagactgccaagaggtgactgcagcctacagacaagccctaggaatctgctcaaagctcagctgaggaagggagatggtgccctagtatggggtaggctctgagagggtttgcagaggaaccctgggtcggattcctccagtgaatagagtacatcaagggctctacgtctgcagcctgactgaacctgaaagatgagagaaatcgcattgatgtggaaaggaatgggaacccttgctgcccgagtgttatagtggggtggcctgaaggtgcctacctcctttgtgccatgagtgtcacccatgacatttcccaccctgttctctggctgcaccttcacataagtttctgtttccatcaaccaccagggttagaaccctgacttcctgggaggtaatgtgtagtgactgccattatttagagaggaaacagcctctggtttccatctctgctgctgtgcatctcaaagacctgggaagactcggaccgctgtttgacttcatctcaaggggaccagatgcccctggaccccatcttagatctcagagacttgaaccttgaagctgttcctagtacccagatgtggatggatgctctgtttctcaggccaacgggacctagaatgtgctgacttatttatttttttgtgattctcacttctgttttttggtttttgtttgtttgtttgtttttgtttttaagtgaattttgctgctttcaataatgtgaatgctgtgttctggggaactccactgtgccactgaagtttatgtacagagaagtatttggcaatgatgtccctctattcaaggggggtgggggcgtttttcaaatgtatgtcttgagcactgtctggattgagtctccagtcccttcacacccaaggctggccaccctccctcatcttcatctgtggccaaaaaaaaaaaaaaaaaaaaaaacaaccctcattaaaaccagcagtggtaactggaaaaacagtctcttgttcactttggggacttgggttcacacatctttaagccttttgatatttgtgaccacagatgggacacagattctgtttaatggaaatagggcaagggggttaggaggtgcagctgggtgggtcaggatgctgtttaatgtgtgctctcaatccccaggaacgtaaaagaataaaatcaatcaatcaaacaaacaaacaagcacccttccaaaacactcagtccacctgccgttcagcctgacctgttaagcattctggaagaaaagccttggcccagggtcctcagttcttttttctttccctagtcctcaaggaagaaatggatcaggtggacatctctgattgattccctttcccagcagcccctccctctcccccccaacccccctcctccactagccagtgccctgcccccagcctgaagacacttcccacagcgtttattccctctgaagaaatccctttccttccgtactggacagcttctccctgggccctagctccagactctgggaggaagtcaagaatgcttggaatgcccaccctccctggcctgcctctcagccccctgcagagctgtccctgcagcctgttccattgagaaactgctggactctgggactggatagagggagggacagaggacaaagtgcaggcaagcagctggccgcctttggttccaagcaggccctctccccacccccactcctgacctactctggtattcaccccctaattgcctagttctggctggcttctgtttcccagctatacacccacctgtcctcccagtgtggggcattgccgaatgaagacttgggcctcccttattatacctagggacttagaaagatcacagcctagagaggggttaggacagcacagttcacaaaaaagttgcttgagtgacagcaaatgtgcccgaggtcccaggaccgggctaggcttgcataaacactagaaaatcacagactgggccttcatcccacagcccagtgtgcatggttgcttgcttgcttccttccctttgggcctgcagcaagcccttggtgtgctgaactgtggcagacagcttgggttgcagacagtctgggggcaggcagcacacgggagcacggaagaattaaactcagtgaaaatcatccaggaaacactgacgggaagtttagatgaaggaaagttcattgtggaagataatagagactatcacttattcttaattatttttgatgtttgggatcaaacttggagccatgctaggcaaacatcatatcactgagctgcaaactccaatgcttgttgagtcaagataaggcctcagcataactctttatcctcctgtgtcagtaccagcatcccaggcttgtagcacccgcctgcagcaggaacttcaattagtgcctggctccatgctctcaagaattttgttacatccttgtgagtttgttatttactctcattttgcaaagaaacagaaatttgaaacattaatttacattgtgggaacacaaacttgaatagccagatctgtgaaaagtcacactggagagcacagaggctcactgctcacacactgtggagcacagaggctcactgctcacacactagggagcatggggggggggggtgctcactggtcacacactgtggagcacaaaggctcagcacacattggggagcatgaaagctctctggtcacacactggggagcttgaaggctcactggagctggagtggctaaaaaaccagaagcaaacatctacacctaccagggaatatctgttatgtgctaagctcttggtcagacttaagatctggagaaatttcctctcctggaaatacctcccctggcctccacaaggcccaagaaaggaaatggacaagagggggcagcaggaaaggggaagatggaggagaaggctgaacttagtcagccatctgagatgagggccagaagggacacagtaccttactatctgggcaggagctgagtctcgtgctcctgggttggtggagttcccgtggtctgtttaattaccatgggagctaagacatggattggatgaaggggtgaatgtggggaggtggggaggagccccaaaaatctagccttggactgtagatttcatctgctcagacctcctcacctgccaggacacttcataccaaaggcattccagaaagcaggctcagcgatgacgccggggccccgagggacaatgctggagctgcaggaatctttagtgccacatcagcgcttccggaatgtgaacaacctagacaaagatgggggaggcagctcaaggagatcagaaaagctttttgaatgttccttcttcctggccctttcctgaggcacaggcgggatcatgatgttcttgagtggacaccccctcgtggggtaggtccgcgggagggaaactcccatgacacattggcctggctccctggctcaggatctgatgacccttctgccatatcctgaagggggagagtaagaggagaagaacagagtagaaatgtggggagcagcagacctcccctcccccagaagagcatatgcagacttcaggagtgggaatctgaactccaactgccggctagattgtgtctttaagggacaggatggatcagggacaacgatttggctgagtgacatgagcatttttcaaatagaagaggcagagtgttgggagtcagtcacctaatagacagcaggctggttttctggaagacgatggatgtgcaggctaagatggggaaccagccggggtggggccaaagcccatggctggacctccaaatgtaagctgtagcttgataatctcttacatactgtgccccagtcacttacttggccaattgattaccatttattggattaccagttattggaactggggctggaggtcactcatacagcacttacctggcatgatcaaagccctgagctccatcttggggacttcaacaaaaacatttttctttctttttttcattttactgagtgccgtctggcacatttgtgttttggttaggtttggtcttgactttgttcctaaggcaagttctcactctgtagctccagttccggggaggccggcagtgctgagctgaagacaagggcagtgtcagcatcgtcctgacaaaccttgaaaggctctctctgaggataaaggataaagggcaatcctccaccgtgcccagctttggggatacgtttacgaacaaaactgacagcaatctatgccctcgtggacgtttgaatcgccagtgaagctggagcaaagggcataaaagattagcaggaagaggggccgagaagtcaccttgcgggccattctaaagctgtggcttttattctgggggaaacagagtcattgggaggtgctgagctaaacactgagatgacctaacagacttttaaaaggagtccttccagcaggcaaggtgacttagggagtaaaagtgcttgccactgagcctgaccacctgaggattcctggggcccatgtggaagaaaggagagaaatgactcttgcaagttgtcttttgatctccacacgtgagctgtcacacacacacacacacacacacacacacacacacacacacacataccccgatagaaatggatgaaaagactctagctgattaaggaggaaagcagtggcaggcttgatggggacctagcagaagaccacttttgaaaggaaatggcagggcttggaccagagttgcagcagtacagaaatgggagccatcagatctggaggtgtagtctgaagggggaaccggcagtttttttcaggcgggtggaggaagagggggtaaacctgggctggggtggaggcccgtagacctctcagtccaggaagtaagaaagtagactatggttgtctgatgccacttcccactctaagattcggggattgtattaaactggaaggcagatctatctatccaaagctgacaggctgcctcgtaagcttgcctgtactgttctgttctggggaggcaggcagtgctgagctgaagagaagggcagaaccagcattctcctgataaaccttgaaaggctctctctgaaggacaagaggagaaagttggggactgtatggtcctttgtgtcgtttaagtttcctgagatttggcttctttatctacacaatgagagctatactaacattttcttactctcacgcctgaagtcccacattttcaaaggcttttagattcccaaagaacttaagaaatatctccaggctctgcctccagccttggtccttacagtaggggcaggtgctccagtacagagcaggggctggggctaaataatttcaggtcatctttggtcacctctgtacatcagaattctctgttttagtcgtctggggaggctgctcacagacttttgtccaggaaaagaccgaaaggctgagcgtttacaagagccatgactctggttccactgacaagttgtcagccgagggcctctggaggagctggaaccacagcttttcttggagacacacgctttctctcgctccctttagatttgacacatctcctcctcagtcttctttctccgtcatcctgctcccttcctaggctaatctcactccaaagttctccctcatcctgtctggggcatttaggacaagctggggggggtgggggagggggcttctagtccataaatggccactaactctttaaattttagttttcaaaagaggcggtctcagccttctgctctctccctgccggggagttcctgggaagagggaagaggaaggaatcagctttgccggtatgggattctagaaatagctgaacgtttaaaaagatagaccagtctgactcagcttcccttgtaaacacagggttttcccagctccacgttctaagcccccatttcctgatggaagtacacaacagtgtatttgtagtggttgggatccaacaaacagatccccatnnnnnnnnnnnnnnnnnnnnnnnnnnnnccccccgtctgtctcttggctgcactgcctggactttggattgtgggtgctaagcttctacaacagagttgaccgagcaggccagaccaagggagctgtcatccttcaatgctctggggctggagtctgaacttgcctgacacagctcaccttgggacttctggctgcaattgttcagcactatctctgcttggtgctctgaagcggcccatcctctgccaggagcccctccttgcaaagggactcccagcttgccctgcttcccacccaggtgaccagtcctctgtggatttggcaaagctatggatgattcaaggtagtgtctacactcaccttgaaattttgctcatcaacaaccgggctcgccaataggccttggagatagacttggccctactcaaaaaattctatgtcatgagcagatacagcaagaagccaatccactgatttagcgtgaacgacataacagcagccaaaaccaactagatacttgaagctactgttaatcatgtccactaccagggacattcattcaaagacaactcaaatgcaatgggacagtgtcacctggacagcaggaagctgggtgacaagagctaccctgggtggtagtgccagcccctatcccagggggtcactcaaagcaccagcacagccattaggttcaccccatgctgttaaatgtgaccacagcaacttctttgttggcacagcctttcttctacaaagcatgtcacagtgactcagagtcactttctgagtccccttcacacccatcgtgttgttgcaaggattaagggaggcagcaggtgagagtgctttgtaagcaagacatcacctctgccagcctaaggagtgagaacagctactcactaagccagcagtgaaggcctcctccaccagccagcccagccccttataaaagggaatctgagagtgaaacaacagacaactcattacctaataaatccatcaacgtttgctgagaccagactattgttcttgatgccatagaaaacacaggagtggtcccctccctccacgaatttatgtagaatagaattgaagctataaaccaacacctacaggctgatggctaacaatacagagatggggatgctgagggtgggaaccagggacagaacatgtggcaagatgtgcaaatctgttgtttgtaaggggaccactgtgtagataaagcactgggtagatcagcttaggaatgagctggacactaggctccacagcctagcaggtgacaggtggtgcttcgtagtcctataccctacctcacaaccgttgtcaccttgctctcccttggctaccgccatgagaggacatgcccaggtcagatatgggtgggtagagtaggctaattccttccttgccagacatttgaggtgggcagcgagcagatagtttggctattgtagttgttctctttacctgactatctttagtgcctcttctgtcttccacaaggcatgctatgacaccttaaagccacttctacagtcccctcacatctacgtgtttcggcaagaatcaaaggtcatggctcataaagatgcttggcagccattacatcttctctacagacccctctcctctgcctcagctgggccaacttgggccaccttaccatctgtgtcccatgtcccttgagatagtctgtctccatagatcagtttctccctccccaatgtggctttaagcaagatccagcctcaggctcctcatgtcctcaatagctacattagaaatgtgacctctttttactcatgttaaattgtgtgtgtaaagtcatgccatccccatttcagattaacttaaggaaaaaaaaatactgaccagcaagtaagtcactggttttatgttactactgctttccaagtgtcagagtgtacacagcccaatcttctttccctatgatataaaaaagtcattgggtggtgatggcacaaacctttaataccagaactcaggaggcagaaacaggtggagctctgtaagttcaaatccagcctggtctatggagcgagctctagtacagctagagctactccgagaaaccctgttttgaaaaaccagaagaaaaaaatttaaaatggagcctgacatgatggtacatgcttatattcctagtatttgagaggaacaggcaagatcacaagtttgaggctaccttggcctacagagtgagagcctgtttataaaaaaaaaagaatatataaaaaagaaagagaatattcacatgattatgctgagtatgggactggagagatgctgcagccattaagagcacttgttcttacatcagacacaggttcagttcccagcacctacgtggtggctcacaactgtctctaactccagttccaggcaatctgacaccctttcctggcctccaagggcaccaggcactcacatggtgcatacactctctctctctctctctctctctctctctctctctctctctctctctctctctcacacacacacacacacacacatacacacacacacacacacacacacacacacacacgcacgcattcacgcatgagagagagagagagagagagagagagagagagagagagagagaacatgcatggatattcatgtgggtaggtggatgtccatgcccatgtttaagtatgtggagacctgaagattggagttttgactattgctctcttccctattcccttaagacagggttctcactgaacctgaagttaggccggcagccagcaagccccaatgattctccatctgcctcccacagtccgggtgttatagggtcacaaaggcacacccagctttttacgtgagtgcttggcatttgaacgcaaaccctcatgcttggaaagcaagcagtcttgctgtctgagctgtttccccaggaccctaagtctatgctaagcatgtgcgcttccaccaagctacactaccaagctacacctttaagtccaaatgacttttgttctgatatagaaggggagatgtttaactagaatttttacccagtgtctccctcaaactcaaaactgagtaagtgtcctgtattttcgttttcccaatctggaaatcctaacatcaggaagattgaggttagacaataggaagatcttgggctattgccttgggctactgacccacaggatgagagaatctcccattctggacagctttaaaaaggtgagtgtggcaaactggaagatggtagcacacacctttgatgccagcactcaggaggcagagccaggtggatctctgtgagtttgaggccagcctggtctacagagcaagttccaggacaggcagggctacacagagaaaccctgtcttgaagcacaaaacaaaacaacaaaccaaaccaaacgaagacaaaactgagtgttcccaggacctagtgggaagcctttagacatttagggctatctttacagccaagagactcatcttctgtagctgagctcaggaggattcacataaaacacaggaagtggtggaaagtgaacgagattatcagtggagttcctgccaaaatgaggaagtgacactgggtggaggcaggggacgcctgaagtccccagagaggatgtcagagcaggaggtgctgagatcatctggctaccccacccccctcactttgggccaaggggggtggctgagggtgtggagctgtggggtgaatctggagggttgggtgagcctcagcaagtaagtatagccggggcagcaggagttcaggccttgggagaaaaatcttaagatatgtatttgggggtagaaatgaccccccaaagggaaagaaaggtggcctcaggatactcagcagagcaggggctgatgtgagtctctagggtcaccatagggagctctggggctctcagtctggtaagagagacaggtgtgccctagaaatcaggtcgtcaagcatgctttgttttcttcctcctttagtgcatactgggtgtggtgctgaaccccgggagtcctgaactaaacagaatatacactgcccttcaaagcctggaggtccaggggaggagaggtaagtaagtccttgtgaaattgtaacttttataaggtgaaggacttcttgtttctctttttctttctttttggtagataggcttatagcttgtgctggctttgaccttgaccttattctgtaactgagaatgaccttgaattctcgatcctccccagctccccctcacaggcgggcattcccccatcatgccaggtttctatagagctaaggaccaaatctagacctttgttttgggtcactgactcccttccttggtgagagttcagatgtcattcctgtagtgcccctccacgaaactccatctttagaccctactgggtgctgtctgctaccctactgggtgcagatctttggataggtaaacactctaacaactggataacagccacagcctgggctggacttgaatttgccaccatccccacacctctgccaccagagtgctgtaccaacagcctaggccagcctgcacaggagtcaaaggtcaccacctgaccccaatgtacctctccagctgctgcctctgtcccccacactgcttgcttgctctgtggagtaaagtaaaattaactggctaaactgggtgtggtggagctcaccttcaatcccagtccttgggaggcagaggcaagcagatctctatgaatccaagaccaacctggtctacagattgagttccaggacaaccaaggctatacagagaaactgtgtctcaaaaataaataaataaataaataaataaataaataaataaataaataaataaataaaacaaattagctggcttggagaatgacttaaaataagaataacttaatagctttcttattgttgggttgtttttgtagccttgtctgtgctgggactcactctgtagatcagtctggcctcaaactcacagagatccacctgtctctacctcccaagtgttggcattaaagacatgtgctaccatgcccagcctagcttctctattttagctcctcccatacctaccacaagctgggagaagctgttgggtgctggccagtctggcctggaactctggaccctcctgaacagggtttacaggtgttctgtaccaca

SEQ ID NO: 22 - DNA, 3073 bp, Mus musculus
cgtgctcgggtgcggctgtgacctctgagcccgcggctcagcgcgcgctgctactgctgcccgacccactccacctcgcggtccccgcaccatggagtcggtggccttactccagcgcccgagccaggctccctcggcctccgccctggcctcggagagcgcccggccgctggcggacgggctcatcaagtcgcctaaacctctgatgaagaagcaggcggtgaagcggcaccatcacaaacacaacctgcggcaccgctacgagttcctggagacgctgggcaagggcacctacgggaaggtgaagaaggcacgagagagctcggggcgtctggtggccatcaagtccatcaggaaagacaaaatcaaagatgagcaggatctgctgcacatacggagggagattgagatcatgtcttcactcaaccacccccacatcattgccatccatgaagtgtttgagaatagcagcaagattgtgattgtcatggagtatgccagccgaggcgatctgtatgattacatcagtgagcggccacggctgagtgagcgggacgccaggcatttcttccgacagatcgtgtctgccctgcactactgccaccagaacgggatcgttcaccgagatctcaagctggaaaacatccttctagatgccaatggaaacatcaagattgctgactttggcctctccaacctgtaccacaaaggcaagttcctccagacgttctgtgggagccctctctacgcctcgcctgagatagtcaacgggaagccctatgtgggcccagaggtggacagctggtctctgggcgttctcctgtacatcctggtgcatggcaccatgccctttgacgggcaggatcataaaacactggtgaagcaaatcagtaacggggcttaccgtgagccgcccaagccgtccgatgcctgtggcctgatccggtggctgttaatggtgaaccccacccgtcgggccacactggaggatgtagccagtcattggtgggtcaactggggttacaccaccggagtcggggaacaggaagccctgcgtgagggtgggcaccctagtggtgactttggccgggcctccatggcggactggttacgtcgctcctcgcgccccctcctggagaatggagccaaggtgtgcagcttcttcaagcagcacgtgccgggaggtggaagcactgtacctgggctggagcggcaacattctcttaagaagtcccgaaaggagaatgacatggctcaaaatctgcaaggtgacccggctgaggatacctcttctcgccctggcaagagcagccttaagcttccgaaaggcattctcaagaaaaagtcctctacctcgtcaggggaggtacaggaggaccctcaggaactcagaccggtgcctgatactccagggcagcctgtccctgctgtatccctgctcccaaggaaaggcatccttaagaagtctcgacagcgtgaatctggttactactcctctccagagcccagcgagtctggggaactcttagacgccagtgatgtgtttgtgagtggggaccccgtggagcagaagtctccacaggcttcagggctcctcctccaccgcaagggcattctcaaactcaatggcaagttctcccgcacagccttagaaggcactacccctagcacctttggctccctggaccaactggcctcctcccatcctgcagcccggcccagccgcccctcaggggctgtgagtgaggacagcatcctgtcctccgagtcctttgaccaattggacttgcctgaacgtcttcccgaaaccccactgaggggctgtgtgtctgtggacaacctgagggggcttgagcagcctccctcagaaggtctgaagcgatggtggcaggaatccttgggggatagctgcttttctctgacagactgccaagaggtgactgcagcctacagacaagccctaggaatctgctcaaagctcagctgaggaagggagatggtgccctagtatggggtaggctctgagagggtttgcagaggaaccctgggtcggattcctccagtgaatagagtacatcaagggctctacgtctgcagcctgactgaacctgaaagatgagagaaatcgcattgatgtggaaaggaatgggaacccttgctgcccgagtgttatagtggggtggcctgaaggtgcctacctcctttgtgccatgagtgtcacccatgacatttcccaccctgttctctggctgcaccttcacataagtttctgtttccatcaaccaccagggttagaaccctgacttcctgggaggtaatgtgtagtgactgccattatttagagaggaaacagcctctggtttccatctctgctgctgtgcatctcaaagacctgggaagactcggaccgctgtttgacttcatctcaaggggaccagatgcccctggaccccatcttagatctcagagacttgaaccttgaagctgttcctagtacccagatgtggatggatgctctgtttctcaggccaacgggacctagaatgtgctgacttatttatttttttgtgattctcacttctgttttttggtttttgtttgtttgtttgtttttgtttttaagtgaattttgctgctttcaataatgtgaatgctgtgttctggggaactccactgtgccactgaagtttatgtacagagaagtatttggcaatgatgtccctctattcaaggggggtgggggcgtttttcaaatgtatgtcttgagcactgtctggattgagtctccagtcccttcacacccaaggctggccaccctccctcatcttcatctgtggccaaaaaaaaaaaaaaaaaaaaaaacaaccctcattaaaaccagcagtggtaactggaaaaacagtctcttgttcactttggggacttgggttcacacatctttaagccttttgatatttgtgaccacagatgggacacagattctgtttaatggaaatagggcaagggggttaggaggtgcagctgggtgggtcaggatgctgtttaatgtgtgctctcaatccccaggaacgta

SEQ ID NO: 23 - protein, 640 aa, Mus musculus
RSARAATAARPTPPRGPRTMESVLQRPSQAPSASASESARPLADGLIKSPKPLMKKQAVKRHHHKHNLRHRYEFLETLGKGTYGKVKKARESSGRLVAIKSIRKDKIKDEQDLLHIRREIEIMSSLNHPHIIAIHEVFENSSKIVIVMEYASRGDLYDYISPRLSDARHFFRQIVSALHYCHQNGIVHRDLKLENILLDANGNIKIADFGLSNLYHKGKFLQTFCGSPLYDEIVNGKPYVGPEVDSWSLGVLLYILVHGTMPFDGQDHKTLVKQISNGAYREPPKPSDACGLIRWLLMVNPTRRATLEDVASHWWVNWGYTTGVGEQEALREGGHPSGDFGRASMADWLRRSSRPLLENGAKVCSFFKQHVPGGGSTVPGLERQHSLKKSRKENDMAQNLQGDPAEDTSSRPGKSSLKLPKGILKKKSSTSSGEVQEDPQELRPVPDTPGQPVPAVSLLPRKGILKKSRQRESGYYSSPEPSESGELLDASDVFVSGDPVEQKSPQASGLLLHRKGILKLNGKFSRTALEGTTPSTFGSLDQLASSHPAARPSRPSGAVSEDSILSSESFDQLDLPERLPETPLRGCVSVDNLRGLEQPPSEGLKRWWQESLGDSCFSLTDCQEVTAAYRQALGICSKLS

SEQ ID NO: 24 - DNA, 39699 bp, Homo sapiens
  misc_feature (1)...(39699): n = A,T,C or G
nnnnnnnnnnnnnnnnnnnnnnnnnnnnnnnnnnnnnnnnnnnnnnnnnnnnnnnnnnnnnnnnnnnnnnnnnnnnnnnnnnnnnnnnnnnnnnnnnnnnnnnnctgttctggctgttcctctcagacctcacccctctctacccacagggcaagtggtgacagaggagggagagacaatccctgggggaaggggaagggccagttagctgcaaaatgtctttagagtttgcgtgctcccccatggtatgatcctttttattttaatggtttaattatgggctgtttcccaaatactccattcattttgagctccccaggcaggtacttggctcaaagaacccccagaggccctgtctacagatccgaccatatccttgtggagcgtaagcagcctccctctaaggatcttcgtgaagtcccacccttcccacctccccttcttacctctgcccagtgctccctgaatacgtccagctgctcctcgactccctgtcctgaacagcctgtcccctccacaaagcagagcaccaagaacccaccatcgccgcacagagggcaaagtgaacttctttccaagagtgagctctttgcagatcctgtgcagctgctatttcataccagatgagcttcccgcaactccagccagcacaccctggacctgcctgccccaacacacacacacacacacacacacacacacacacacacacacacacactctctctctctccacactctcccccttctttcttactctcatgcttgcacattcactcatgctcacacacacgctctcacacatcccacaaatacactcacacatgcttataccacaaaccgcccactcttacacactcaccttatggaaacactcacatatttacattcacaggatgattcatgctcacacgcacacctcacattcatgcttcacactctccttgtactcttacccctcaaatccacacatgccttacacacttatcctcatttgtacgcctcaaataacacaccttacactcttacacgttcacacacacacccatatgcgcttctacacacatgttcatgcacatatttttgctcttacactcacacactcacattcccagactcacattctgagcaggcatccaggctcggagtcctttaatttgggggtgagtggctgcaacgttacccaggcctcacccttccctctggaaccccaagctgcagtttgccatcatggctaggggaatcttctgcacccttctaaagatggtgaggtgttttacaggtgaggaaatggagactcaagaagtcctgtgacttccacaagagctcctgagctccatgaagcagggaacccggtcttcctcacttaccctcacatgcttagcacctcctgtgcctggcacagaaccagcacttgataaacctgtgtcgagtaaatgactggatggctctctgaggggaagaactgggaaagatcctagtgaggggaagtcccagttcctaatttagccagactggactctcctggctcttgagacagtttctttttttcatgcatgatccctcagccactgcccccctccaaaaaggaaacagatgactaggagggtccatgggatgagagctggaggccagagactcatctgaacacttggtgcctgaagtgacatttcagagttgatgggtttccaggtggttggggagaaatctatcctcctcccttcagcgtacctgcagcatggacagtgggacaggaaggagctccagggtgccagctgctggccttctgctctgcttggcttctcactgggctgtcggggctcctcccctgcttagccttggaagggagcacatggctgtgcaagcagggctgggaacttccatggccccatgcaccatctcacggtggcccaccctgccctccttacctgaaggacgacacaggacctcggggcactctgcctgccattcaacagaaaatgggccttggtcctaatcacagcctagcaattcatagtctcaacaccaaacatttgtaagggaacagtaatttacaaatccctttcccaggctcccctgttccatctgtagaaggagactggactggagcttcccttccaaattcatcttactccaccccagaccttcgctcccggtgcctcggggcagccagctcaaccctgggtggcaggtgacctccttatcttcactcttctctccctcacacagccactagcttagtccagaccgtcaccgtcccttgagaggacagtttcagtagcctcccaacttcacttcccctaccttcaggctccccaccagacaccctccacatggctgctagactccctctgttcttcttgtctacgtatccgaccatatccttgtgaagcgtaagcagcctccctctaaggatcttcatgaagtcccacccttcccacctcctcttcttacctctgcccagtactccctgaatgcgtccagctgctccttgactccctatcctaagcagcctgtcccctctgcccggaatgccccctcaatggtgtacctggcgaatccactgtctcctcaccccacctcatccccatgcacacaaaacttttaaggtacttctcaggactgtaatgatattattaactcttataggcccagggcatcacacagagtgcctggcatgcgatatctaaatatgtagcacacaactgttgaataaaagctagaaatcaaagagtccagaggcagcaccagcgttgagggaatctttagggtgctccctttccctctgagttcctctatggcctgcaactgacacaaggaaccagatccaggaaataagcaatatttcaactccctctgcttagggattgagttccctctccccttgactgtgggcgctcacaggggtgctaggtcagacctgagctttttatgagctgtgggtgagaaccagctgattaacccagccttgtagtaatagcccctcagtaccagattgtgctaccgttatttggggccaagagaaatgctggctcctgcctttccttgccaagggccaggagctggtgacccggctaaagaatgtgctttgcttggggtttacattccaggattggcttgggaggccaagggctcaggttgccattgggagccaggcacggggaaggggggtggcaatgggcagacctttctcccacctccctcctgggcacacttcccatgccctgccctgcctggtcattccaagtggaggcagggccaggaggaagaccctcagccccttcatagggagcagcatttaaatggagtgtgaagtggcctagtatccactgccataaacccccacctgctggggagcctttaacagcttacaaagtatctccaagtttggggtcttctttgaataattaggaactgagggctgggagatcgagtcacctgtcccaggtcatgtggccagcaagcagcagagttgggtgtagcacctcatctcctgacttccattcccaggctcattatacctcctgccacatctatatcaacagcccctgtaccccaacatctaaccagaagccccgacttcacagggtcagtggagaatcaataaaatagtgagtgtgaaagggtggacacctgtaaagatggggggttatttttctttactcatcctttactcaaaaagggtctcaggtgactacaacgtaatagagtgagttagtagaaagtacttgaagacccatggaggaatcccatgaaaattttccccagtcgccggcatagcttctccactccctagcacccacacttcccaactccacagcaatggaagtgacagatcctccgtgactgggaaaaggacacaggagtgaagggcagaaaaagagaaaaatctctggtttcgctactaacaatggggtaaggagaccctttctaaaacactgactggaagttctaaactttatttatttatttatttatttactgagacggagtttcactcttgttgcccaggctggagtgcaatggcagggtctcggctcactgcaacctccgcctcccagtttcaagtgattctcctgcctcagcctcccaagtagctgggattacaggtgcctggctaatttttgtttttttagtagagacagggtttcaccatgttggccaggctggtctcgaactcctgacctcaggtgatccgcccagctcggcctcccaaagtgctgggattacaggcgtgagccactgcgcccagtccctctagactgcaaatctacacatatatccacccctccacctcccaactctcagaacaacttccttcgggtgttcgaatctagcactaagagttgttaagaggtcctttcttttctctctcagatcagctccttcctccctcccttaacacagaggtccagccttgggctgtttcaatgaccacttcctagctctgagcttatcttaactgtcttctgtcccaaatcaggtcagctggagctcagggaactctgataacccctcgctgtcacacacacactaggtgcgcgcacacactcttgggtctctgccgaaattgagggaggggacttgggaggaccagagcccagcaaagcgccaggcagacggataggaaaccatcagtctgacgacctcacttctaatttcatcccacagcaagcccaggaggtagtcatttcagatgaggaaagtatgacgcagagcagcttagtctacttgacactctaggcaagtcaggaatcctctctaagccaaagtatgagggctaagagtgctgtttctggagccagattggaccccaggcaatctggcttcaccacttgacaactctgtgaccctgcataggcccttaattgctctgtgtcacttttctcacacgcaatggggatatcataggctagtatgtacttcatagagttgtagaaaggattgaattcatgaatacaggaaatctaaggaacagtggctgacacacagtatgttagctgcataaaagaataattcttatttatacatgaagtggtggagacatgagttatagtcacagtcagttagtgacagagcagagcctgaagcccaggttgccagactcttgagccaaaaacattatgccagcctggggatgcgagacggaatggggctcctgaatgtccagtactgaaggaatcagttaccaggtggcaaaagaaagcgagtggctgagatttctaatttttttgggtgggggggacggagtcttgctctgttgcccaggctggagtgcagtggtgcgatctctgctcactgcaagctccgcctcccgggttcacgccattctcctgcctcagcctcctgactaactgggactacaggtgcccaccaccacgcccggctaattttttgtatttttagtagagacggagtttcaccatgttagccaggatggtctcgatctcctgacctcatgatccgcctgcctcggcctcccaaagtgctgagattacaggcgtgagccatcgcgcccagcccttgaggtttctaatttgtccctgcttagatattgcagagaagttaaagcagatttgaaacaaaactgagagttggtttatccaaatctccttttacagataaggaaccacccctaaaagagaaagtccttggccatggcatggtgtgggttggtggtggaagtggagctggaccccggcacgcctgcgtcctgtctctctgcgtgtgctctccctcccattccaggatggagacagggcaagctctttggcttggggagaagagctagcttctccttcagtcacatcccctcccaggcctggtctgtgaataacattcggtttctcagggtaattgagagtttgagggctgttttcagtgtttgcggcacaaattctccaaacttccggcaagacatactagaatttagaatttagaaccagggctggcttaataaatgttagatatcattatagctgttattgcaattactcagtccatatttgttgaatgaatgaatgaatgaacaaatgaacggtttactggaggaacaaattgcctaagccgacttctgcttgtggtcacagctttgggcatcccataaaacatgctaggcttagtttggtcagaagagggcagctttgagctaggcttcccaatttgccagcgactaacaggatttgcatccctttcttggaggggaggtagggaatactacaggctgtaattcatcctcagggctcaagactcatcttagaggtatctgagatctgccttacctgctcccaaccctcacgtgacccccatggcatggccttggtgcctctcacctctgctcctacctgcaccctgctcccaccaggacacatcacagcagtccacacactgagctgctttcaaatccccttttaccagtctggacccacctccactcccctacagacacacacacaaattgtgaagtgtgtaaggacaaggacagacatttgttcccacttgttttcccagcacagcacatagtagatccaataaacagctttcccccatgaccccctcagacatggatcagccatgggacttggggctggggggtaggcgtctcccttccaggagtcaatagtggggcaggcaggattgagagtagcttagctcagcccagatatctcagcacatccacacatccgaccacatgacccaggaattccccaagactgctggtggcagagtccccgaccaacacggattccctgtcaggcactctcgctttcccaccaactagacctcctttaaggaatttgagatatgagtttcagcagcttagatcatttccgagtcacatgctgttctggctctgtgtcttccttgcctacctgctgtgatctttggtcacccatggctcctcacctagatgggaattcagattgtagtcaaaggaagctggagcaggggtgagaaggtccaagaagttgcagatgattccctcccgaccatggccagatagctggtaatggagtgggcccaatcacatgtaggtgcttttagtttcatctttggattccatcgcacatccattccttcagttcataagcatctatggagcgacttttaggtgcctcgcagcacactgggtgttggggatacctggaaaaaattacaggagtgtagctagattaagccttaaaagaagcgttaagctcatctgtataattctttcatcttatgaagaaatgttgattcagctggccaattgccacttgtccttcaggtctcaacttaaaaagtcctggctttaggaacctgcgcctgaccagcctcctcccacctgggatacatatcttaaagaaaatctgagccgggcgcagtggtttacacctgtaatcccaacactttgagaggccaaggcgggcagatcacctgaggtcaggagttcaagaccagcctgaccaacatggagaaactctgtctctactaaaaatacaaaattagccgggtgtggtggcgcatgcctgtaatcccagctactcaggaggctgaggcagaagaatcgcttgaacccgggaggcggaggctgtggtgagccgagatcacaccacagcactccagcctgggcaacgaaagcaaaactccgtctcaaaaaaaaagaaaaggcaatctgttcttcttccatcatggacccttctccctctgtacaggatttacttgtttatttctcactagactgagaacattccaaaggcaggaatcttgtcatgattgtgtccccaggctcagcacctagtgggcaccagtatttgtagaatgaagtaattagtagaaggccacagaactggttagtgtcagagtcaggactcgaactcaggtcccccaacactcggccctgtgcttgctcttatgttatccatacttccttttgagaattctaatcatctggatgagcccccaggaatagaagcagatttcagaggggaaaggagatagcaagtcaaggcaactatctctgggcctcatcctatttgcacagaaaacccacagcaaaaggggaggctggtggagggaagaatgccaaaccagctgccacctcctgtggccctccaaatttgggagcgatacattggtttcctgtgtaagatggatcctctccagtcacaaaggagataaagagctccatggagggatggagacatctgtaactcacactagaaaaataatcaaaggatcagtggaagtagaaaagtgggcagccactgggggtgggtccttctccatcctcagcatgccctggatacacaggggaggcaccatcctcctgaaggcctgaggggaaggctggctctccagcatagctagaatccatccagggccctaaactggctggcagaaggggtttccctcagggaagaggatccaggtctattgtcctctattctcttcctcaggaccagggtctaaatcccgccactttattaccagttgtgtggccttggacagaataatactcatttcacaggattaggttatcaagatggccaaaggggaaatgttccctttctgccatttaaagcaagaaggaaaacctatggccattctcatttcactgtaaatgagcactcagagtggagattctggacctagcaactccaggcctcaaaaactaagtcaagctgggcgcagtggctcacgcttgtaatcccagtactttgggaggccgaggcgggcggatcacgaggtcaggagatcaagaccatggtgaaaccctgtctctactaaaaatacaaaaaattagccgggcgtggtggcgggcgcctgtagtcccagctactcggagaggctgaggcaggagaatggcgtgaacccgggaggcggagcttgcagtgagcagagatcgcaccactgcactccagcctgggcgacagagggagactccgtctcaagtcaaacctcataacctaccaccagtgctcctggcaccaaaatcacaagaaaaccttgggtggagcaaccattttcagacttagggacacaggttagatagtcggcatgtaaaaatgttaaataaatatgtatcccttcgggttctctccacctccagccgacacatcctaaataaattccactaagtggttgagggaatctactaaaccttagaagccctctttttttttgaaacggagcctcactttgttgcccaggctggagtgcagtggcgccatcttgattcactgaaacctctgcctcctgggttcaagcgattcttctgcctcagcctccagagtagctgggattacaagcgcgcaccaccacgcccggctaattttgtatctttagtggagatgggatttcgtcatgttggctaggttggtcttgaactcctggacctcaagcgattcgcctaagaagccctctttgaggaagaaggaagaagtttccagggccattggattccaatatccaagtaaggttgatctaactgaagacaagtgaactcgaaccataggacagctctgcactaaccctcccactaggctggattctgcctctgttccatcccagctccctttctcctttatggactcaatgaagtggtcaagcaattatagattttggcttgggacaagcaaattactcaggatgaagaaatactttggtgacctttagtgccctcagatcgccccttgccaactgagaacagagtacaataaaacaacagggcattaagcaggaccaagcgccactcagaggcaagtgcagctccaagggccctcagagtaagcttctgggcctcaggcggccttcgctggaatcccctagtccccattcctggtgggcgggttccattgacacctttcccggccacgccgagggggaggaggcggggcctggagccccggagagccaatgtggacggccgtggtcacgcgccgccgtcgagcaggccaatgggcgccggggggcgtgtccagggcctcgggctcagggcgtttataacaacttggaatgctgtgctttactgcgcgctctggtactgctgtggctccccgtcctggtgcgggacctgtgccccgcgcttcagccctccccgcacagcctactgattcccctgccgcccttgctcacctcctgctcgccatggagtcgctggttttcgcgcggcgctccggccccactccctcggccgcagagctagcccggccgctggcggaagggctgatcaagtcgcccaagcccctaatgaagaagcaggcggtgaagcggcaccaccacaagcacaacctgcggcaccgctacgagttcctggagaccctgggcaaaggcacctacgggaaggtgaagaaggcgcgggagagctcggggcgcctggtgagtgcggctccctctcgcggcgcggggcgggctccggcttggccgccggcagggagcggaggagggcgggcggcggctcgctcgttgctcggcggagaggccagcgtggtctttaccgcgctgagcttgcggggctactgcggggtgtccctggcagatgtgtcagtccgtgattgcagggacagtggtcgcaaacttgcgaaccccagccagcaacaccgtactgctgtgatgattgccaaataaaagggaggctatggatagttggcgcggaaaaacgaatcgtgtcgtgtcctgggataagatggatgggacttaagttgagttttgctgggaaaagactgttcaatagagtgcaatggaaagaggaagtagaaggcaccccatcttaataggtatttggtaaatatgtgtgtggttgaatgaatggatgaggtgtggatttccccaactccaagaatctggcaacccagcacactggagctctggcacggggtgggttttgacatttaggtcctttccagctctaaaatttagttgaaatttcattatgatgagtttttgattctggaaaatgtgaaaccaggtccactgtaccagagacacctttcggtttgggggccttttcaagaacatgccctgttactttggtgcgagcgtaggagtctagcagtctgtgtgaccttgggcaatttccttcatctctgtactttgtttccccttttgcagaactgtagaaaacacagcctgcctcacaagctgctgtgaggattgaataagatcgaaatatgaacttatattgctcctaacacatagaacttgcggtgagatagccgggcgcggtggctcacgcctgtaatcccagcactgtgggaggccgaggcgggcggatcgtgaggtcaggagatcgagaccatcctggctaacacagtgaaaccccgtctctactaaaaatacaaaaaattagccgggcgtggtggcggacgcctgtagtcccagctactcgggaggctgaggcaggagaatggcctgaacccaggaggcggagcttgcagtgagccgagatcgtgccactgcactccagcctgggcaacagagcgagactccgtctcaaaaacaaaacaaaacaaaacaaaacgaaacaaacaaaaaaagaacttgcagtgagaatttctggaaagggcagcccagaaaggatggcaaatttgtcaaaagttagttagcagtggttaactggttctcaaacttgagtttaaagtacgtaaggatcacctgggatgtttgtttaaaatacttacattctctggttccacacccagagtaatttattctgaaggtctaggatagggccatataatgtatattttaacaagccttttagagcaggtggtttaggcattattatgttttgccaaatccagttgggtgctggttgtgagggtgtgtgtgtgtgtgtgtgtgtgtgtgtgtgtatggtttgccctattggctacatcagcagttacttccccagattgtgtttgcttttgcagccagtagctggtttgaaattcaagaagtcatttcattggtgaaggagagtggatgttggagaaaggggtagattatggccccatcaataggaccgagtatgtttttcctgctatcgcctggcacagtccccagttgcctgctgccaggttacagctattgggcaatcatgtacttcctggcttgccttttctttctctttctgcaaagtgtgagggcccggtgaggctccaggcttgaggctgttggacccaggctttgtcaggggcttagctggaaaatagctgctggtggcttgtgcttcgtgcctcttgggggtggagacactgggtcgtggggactggggtggcccagagactgagaaactgagattgaagttcagagttcccatcaggctcttgacccaggtcactgtggggtgtgtgtgtggatgtgcatgagagagagagagtaagagagagatctcatttgattccagaatgagataaactagctttcagttttcaaacttaagtggatttaggcagggattccagctcttattacatcagaagatactccctggcctcatgcctcttgctctatgtaggaagccaagatcagtaggcatgggacctgctgtgaacctccctgatccatagaccacccagttctgcagctgggaacttgctcagggtctccttccttcttggagagcagctgcctgctgtgctaatggtttctcaattctggagcattgcctcttccccaccccaccccacccctgcctcttgactgtccttcgtgaatcgagagagacctagtgcctcaggatacttcagtgcgggagaggggtgtgggagcttgcccaagacctcccctagaatgaattgagattgttggtgggagctagattcagaggaaagccagctgggtgacttccatcccaattttctctccacctttctagcacacttcccgctcccaacctgcctagatgggattatcagggccagatgggattggctgagggaagggcaggtgggcggaactaatggctgctctaggaggacatcaaaggaaaaacaaatatttgctctggctcttcaatacattcctggtatccaaatgacatttcctcctgggactcacccagctcccctggccaccccttcccctaaagagaaaaacacatgctggggtctctgaaatggtggagtccaccaaagcctttggatgatctgcatggaagtcttacctccaaggggaaccattagggccgtgagtccaagtgtatggtgctctggagcaagagtgcttctgtcttttttatgttttggagtgcagtgcaggatttcaaaatgtttggaaatgactgaggtggtccgagtccttcattgacagatagagtagctgaggcccgaagaggggaagtgacttatcctgtagctggtgagtggcatgcctgcaatatgggctcctggatgaccaagtactgagtcctagactgggagttggtcttgagatgagcccaggcttgcctcagtgtgctttgttattccaacagttagctcccgctgtctttcccagcactacaggcagtgcttcaggtgggaagagtcactgggaaccaacccccaccctcacatacagtgactgtgttgaaggattctgggtgggtgaactacactatattcctgggtttcaaaccttgttggggatgctgcctagctgacagtcaaggttgcaagcattcaaatcgtggctccattgcttaccagctgtgcaacctctctgtacctcagtttccttatctgtaaagtaggggtgataattattcctacctcgtgggattctcttaggattaagtaagatagcatatgtaaagtgcttagcacagtgtctgacacacacagtgttattatcccagcaaggctggctttgatgaagtcctgcccttccctttcctggggaatccctgcgtcctggaggtctgtcctaccctgagaaagagtatggattgtgcttggcttccctaagccaaaccactttggttgctgctttgttcaaagtcctcgtctctccttcggccccagctccagagaaggactcctgcctggctggctgccaagggcttgcttggcaggacactgccctcccagctccctctgcacctgcctgctaagcggcagggagggaggctgcaggccactcttgtccttgagccccagccaaaccacacaagaaggctgggcagggaagctccttgcccagcaacccggtagagggggctggaggatggcaaggagggggcagcacagtatagggaggtggctcaggctccccttggagcccattcctgatccctgcctagctctctggctggtgtggtgggatggcgagccacccctaggcccacccccactctgcccagcctgggccaacccagcccaacctctcctccgttatctaaatgggtcatcccctagctccttgccctgcctcccagacagcagctgctccacaaaaggccagagagaaatcaaggatcttggctccagctctgggtgataactatgaccagagatgcccagcttgcaccttctctccctccacctggaaccagcatctctggatcttctttttctaagacctttctaccatcctctcctgaatccagatcgttcctgatctgagtccctgggagggaggcagtgtttaccaattgagccacagcacctacctctccagggtgttggcagaggagtgggcatatttgtatatctgtaagtgggatggggtggctggtgatactacacagcctggcctagggcaagatatggggcattcccttctccagggatgggaggcaggcagggaaatctctatggctgagatggaagcttctccaggcaccatccttccatcttcagtcctgattgtgtcttgatgtgttgtggaaccttggaaaagtcagtgtgcctttctggacttcagtgtgtgctgtttgcaaaatagaatgaggaattaaccctgctgccttttccaatgtttaggactgcaggggcaagaaaaccactgggacagaatcagaaattatgctcaagcaggctaccgtggccatagtatggggctgcttataataatacttggctagcaccttcctggcatagtagcaggtggcccatttctgaagaagttcagcatagaattctagagtttggaagggtgcgtagagatcctgatgtgcaaattcgtgaatggctctttctttttggcctttgttcaaacctttctttctgtctggaatgcccttgttgcccctccctagcccacctcccttggcttagcaaacctcactcatccttcaaaatcgaaagcagtttttctcccagaggtggtttccctgctcctcctatgggcaaaggaagttctctccagtgctcttggagcctctctgcaggcagggacatcaactgccacatttatcacaatagaatggagtttaattaattgtcagtcctcccactggactgtgggactgtccactttttatctgaatccctaacacctagcacagtgccagccaggcacatggtaggcactcagcagatgactggagaataaatatcctttcgtttttcagatgaggacatgaaaaccagccagatgagttaaccagacttatctggtcaagtgacttatgttgagttgcatagctctataggggcaaataaggattcgattcctgggctcttgatgccatctccactaatcagatgttcaggtttatgttattatcattgaatctggttttctttccccttctgagtagggtggccatatattgtattatctaaacttggatactttggagagtaaaaggggcaatattagtaattagaccaggactgtctcaggcatgtggccttcctgcctctgggtgattggttcagcaattgttaccctcttccttggttttagtcattttatttttattttttattttttttttaagacagaggctcgctctgtcacccaggctggagtgcagtggtgcaatctcagctcactgcaacttctgccctcccgggttcaagcaattctcgtgcctcagccacagagtagctgagattacaggaatgcatcaccaggcccagctaatttttgtatttttagtagagatggggtttcaccacgttggccaggttggtcttgaacttctggcctcgagtgatttgcccgcctcggtctcccaaagtgctgagattataggcatgagccactgcgcccagcctaatcaacatatttttattctagagaatagttgcctggctatcttgcagatgagaacaaaggtccctaaaaattagtccttataaccgaggtggacttcacccatgtctaggaagaagaggagaaaatcttatctgagcactgctcccatctcagtcaaaggtcatcagcccagtgacttaactagtaaatatttgcgatttatgttcaccagtaaacaattgttgaacactttctgtatgctgagctctgtctaggcctgagctgttgctctaatttactttgacaggctagccagcagatagctagagccctctcctgtgggtccaggataggctggggagcagtggtctagccccaccagggtggtgatgcatggctctttttgtctgccacctgcttggagaccgatagaggcctgatgacataacttgtttgcttcctggaaagtgccagccgtactgtgatctcctgggacctaatatggatacctggtgggtccctaacctaccccctgatgccagagcacaaacttgcaggaggctggaactgttcaatgaggattaacaattctgatgtagaatcatgggcttctggagttgaaagagatggatcttggggttcaacttgtgcactcgcccccatgcagagactccttccagcccctctaacacccctttctcccttttttggaacctcatttattttaggccttgtcatctttagagttctgccccctaagcctatgatgatttatttcactattgtatctgcgagtacacaactgtacatccaagatgtgcctatgcgtacatcttaagttctgaaatagttttgattatctagatatgggattcatgtttatatatgattgatcgttttgctctttatggacctttatctctgaagagctcatagaactttatccattgttttattttaaacaaagaattttagagagaaaataacttgtccataaaatctccccctcagggagaggaaaaagggtatggaggcgagaggtgtgtgggaatgatactccaagttgaatccaggagagagaggtacctcctagttaaaggaggattcaggccctctctacatctacccctggccccctgcccagttccaagcccaggtttttatttttgtttttgttttttgcttagctcactaggaagagatggatggtttggagcagaagggggatagccccatcgcatcccctgcagctgcagcatgggcctcttcagcatcttggggaggaggctccatggtgaccatccctcccgcctgccattgtcctccctgccctgctcagggagggcccgagagcagggcctcccctctttcaaagatgaagctctgggggaggagtgggatggagggcacgccatccctggcccgttgccggggtgaccgggccagggcattgtgagcagctcctcttacgggattagggctgttccgcattcttgtccgatggagaacacaggccggcagggcctgctgcccctgcaagccagaaaccattgtctgcctccagagccctgtgaaagggtggattagaggctcctcccctcgagcaggggtttccttttttctctctccctttgaatcttgaggggacgcaaaccctcctgggaaattgaacgaggagctgtttaccacagtctaggtcttcagatttctcacaacttgcctacccccataagaggaagtctcgtatttaccatttgcatccttgggcagcacttgccaggaactggccggccctgtgacaccccacccccacccagctcccacctagccctgcagcctctgagggccccgtggcatctgtacggctaatttcatagactcagagcaggaaagcccctcagatctcttagttcaacctgtttgtttcacagaaaaaaaaaaaacccgaggctctgagaaggggtggggactggcccagggggacagtgacagactccctaggcagtgtctctccccagctccgcgcctcaggccctgctccctggtattttctgggattttgtccaggagctgctgctgaggagggtggagcagagagggaccgagaccctcggtggctcagagctttgctagctgcacctcggcagccctctttccatttcttcctgcctctctccacctttcctgagcccaccacacatactgcctggagggcttcgtcctcatgtggtgtttttcatcttgccgggctaagatagcaagccctgagatagcaagcaactgttgagttgtttgttgtcaggggaggaaggtttctcatctggactgaatagactggtgtttgggggctttttttttttttcttcataattttgggaccaatttttaaaaacatggtaaaacatacataatataaaagttaccattttaagtgtaccagtagcgttaaatttaacgttgttgtaaaccaatctccagaattcttttcatcttacaaaaccgaaacactatgcacattaaacaacacctccccatttcccctcccccagtccctggtaaccaccgttctgttaatactttctgtccctatgaatttgcctattccaggtacctcatttaagtgggatcatacaatattgatccttgcgtgactggcttatttcacttagcataatgttttcaaggatcatccatgttatagcatgtgtcagaatttcattcctttttatggttgaataatattctattccatcctatggacggtaccacatgtaatttattcctacatttcttttctttatttttttatagacagggtctcactctgttgcccaggctggagtccagtggtgcaatcatggctcactgcaacttctgcctactgggctcaagcaatcctcccacctcagcacgcgcctatagctgggactacaggcatgtgccaccacacctggctagattttgaattttttgtacagacagggtttcaccatgttgctcaggctggttgcgaactcctggcctcaaggtgatcctcctgacttggcttcccaaagtgcttggattacaggcttgagctaccgcacccagacctatccctacttttcttgatggacatttgggttgtttccactttgtggctagggactgattgcttatagcaagttacagaactggagcagaaaaagtaccaaactcagaatcagatggccagtagtcgaatccacttgcaccagttagtgaccgtatgactgagcacatcatctaacctctctgggtcccagtttcttcacctgtaaagggtattgatgatgctttttgtgcccacctcccaaggttgttgtgagggtcagttcatttactaatgcaacaaggagttattctgtgcctactgtgctcagcatcaagaattcagtggtgagcaaaactggctggtccttgtcctcatggtgcagattggcacgtttgctttataattcataacgcatcagccttgcaaatgcaggtttttaccttccttgtctatctgtagactatgaataaggaggtgacttgtcgatattccttcctgctgcatggaccatgtgcactcagctcaggtgagatctttttctagagaaagtgctctccagcctctctgccacctacactggtgaaggatggagtggcttctatgggtgtactctgtggcctttatagcagctacaggcaaaccaccaggaccagggcccccagagtgtcctctgccaaacctttctcctcactctcatgccttctcttcccaggtggccatcaagtcaatccggaaggacaaaatcaaagatgagcaagatctgatgcacatacggagggagattgagatcatgtcatcactcaaccaccctcacatcattgccatccatgaaggtacagtgggcacttaaagctggaacttgggggtctatgtgtgtgcatgtgtgtgttcacatgcgtatgtacatgtgtcagaagaaacaacataaagaagtaaaaaaaatataggctctagagaagagcaggagctggatttgaaactcagctgtatgactttgcacaactcattgaatttagtctctgggcctcagttcctcatttataaaatggggtaatcccatctacatcacagtgtggttgcaaagatcaaactgtttatgtcattgaatgctccactcatgggaggtactcaaggaattgcaggtttttttgttgttataattcggttttccctacttgaacactaccttcccaacccagtgagctccttagcaatctgggggaggctgaaacatacatagacctgcacctgtctcaggtgcgtgggtgctattcttcatgcgtcccaagagccagacctcctagagtctgacctgggctctgaatcattcctgccacagggctggctcctacctctccttgtctttcttggcctcctcttctctgacatcagtgctgatttcaccactccagctgccctcctccccatgacccagacaacaaagtgagcaagagagggtgacgaaggaaagatggggagccctctcttacacacacctgtctgcgtcgagactttacataatatcagttagatgagaagcgagggatagcaacaggagggaagaaagggagactgtaactctgccctttgtctgtatattcctggtggggaaaaaaatagagcagtctctgctcttgggtcgtgttcatagaaagattaagggtagagccttaagggtagagccttaagacatagccctgtggcttaagcctgtcccatgaagagccaggcaagtggctgagaaggctaattttatctctgtgtgtgcttccctcagggaagagtggggagacaacaaagtattggttaagccaggctgagtgtggtgattggggtgtgtgtgtgtatatatatgtgtgtgtgtgtatatgaattctgccttacacccatatctccagctaggctgagtgtggtgattggtgtgtgtgtgtctgcatgtgtgtgcgtgtgcatgtgtgtgtgaattgtgccttacactcatatctccaactggatctgggaactgagcactgcagctcagggtatggcttctctggcaccttcagattcaacagacataagaacatcatagttactgtgtgtctggaggggctcccccaaattcatccccttcctgctactggcttcaagggatgtgaggtagcgggtgtgcctcagtcctgggaaatgacatctaacctagctgttctccaaaatgtgccctggctggcttttgactcccgattttatggcacaaaggctgcatgcacccttgcagagatgatgagagccataggggtggagtctcagccaggcatccccaggaggctgggcctccacagataagggccatttattcctgtccccctggacaaaaggacagtcctcctggccatgtatccaattccctggaagctgggactcctctagggagaaggctcttcacttcactccttctcagagcctagacagcattagctctggggcaggccaagcaagccaaactcataggacccgtttgacacaaagatgcaatgtcagggacatacatgttctaatacacaccaggcagaagggccagtttggtgaaccagccactccctacctagtcttcaagtggcaagagggccactcctacccagagagatgagccagctgggatgaggtggctgccaggaacccagccagtcaattaattaccaaatatgtattgattgcttctgtgtacaaggccttatgcatgaggccctgccctggatcctctggatggaagtcagagatggtgatggatatctcagctctccctggtgctttatagttcatgatccactttaatatacttttattccctcttctgatcctcaagacagacattattattggccttatttttcaaatgtatgcatgagggcactgattataaacataactgtggccaggcgcggtggctcacgcctgtaatcccagcactttgggaggccgaggcgggctgatcacatggtcaggagttcaagaccagcctggccaacatggtgaaaccccgtctctactaaaaaatacaaaaattagcctggcatggtggcgcgcacctttaatccctgctactcgagagggtgaggcaggagaatcgcttgagcctgggaggtggaggttgcagtgagccgagaccacgccactgcactccagcctaggtgacagagcgagactctgtctcaataaataaagaaataactgtaggtaccatttatcgagtgcttgtttatatgtcagacctataccagcttgctcagccagccctggaactgctgttgactttttatatttctcaccccagccctgtgaggttgccttattatcctgcttttcaaatgaggaaactgaggcacagtggtttaatgacttgtccaagatcacccagcaaacctgcattcttactcatgtatctagaagagatttgcccaaggccacaaggtgaaaaagtaccaggttcttgaaccaaggagcctggcctttcattcccatctagtgacgtctctgccttcctgaaagggcagggtcattttcagaattcccaaaagcctgaacttccacggaggcagaggatgagccagtgtctttggccttaactcatggctcctggaagatgctgagaacttccaaggcccttcttctgcccttatttgccaccgtatagccccattagcagatattcctggaggggggtcctgtctggtttggggcctggggtcggggaggagtgagtcacccccagtggagagcagtgcactctgggagggcctgacgttccttgccttgctctgcccagtgtttgagaacagcagcaagatcgtgatcgtcatggagtatgccagccggggcgacctttatgactacatcagcgagcggcagcagctcagtgagcgcgaagctaggcatttcttccggcagatcgtctctgccgtgcactattgccatcaggtgagcacctacctgctccagccatattctcagtgggtggtccccagggctctagggctgttttggaccagagaggttccatgacttgtccaggatcacacagaaacagaggcaaaactagattctggactctcagggaaatgtcagtgtctctgactttgagtcccttctccgcggatagaagggcccgtgatttcttgcagcacataccgataaagataggcattcccagcctacctgtgctcaagcccacttggctccctttgtgtttacctcagtctccagactgggcccctcatcatcttcccttccctggtgaccttcccgtgactgccctctccttctttcagaacagagttgtccaccgagatctcaagctggagaacatcctcttggatgccaatgggaatatcaaggtgagtcccacttcttatttctagaagcctccttgcccaccccagcttttctgcactgtccccagccaagtagctctaagctcttggtggattcctgaaggagctgagcaaggctgaccttcattggtactggtagggacctcagccatcatccattccaacacctcattgtgtggatggagagctggagcctcagctgaggggtgctttgcacaagatcacacaactagcacgtggctgagcctggactagaaccaagatcttctgattcccagatgagtgctcctttgatgtcataaggctgacaggagtctagatctaaggtcaggtttgctacaaccttgggacaggcccggcctgagttcttctcatgtatgtacacacttgcatacacacacacatgcatgctttaatctggtacaattagatagccctttggaaacttcccacagatgaaggactccagctccagcttcctgctttctgcagctgctagatttccatgcttaagtagttaaatttaggcatggagaagttcatgttgatgggataaactgagatctcagggctggaggaaggacatggcacagggaggctggcccctgcaggcatctgggaaggtgacgctgcactctgaccctcttcagaatcttcctgaacccaggacatagtctcttccagtggcttttgacctgtaccctgaggtgccctggtactgagttcattccctcttaccagccaattcccggagcaggtggggctttctttgatgctgagcagaagggagggaagccagagccagtaaacccgcataatcaggcacaaacatggacaggcatgaactttcctatctgcaccaatcatgtgcttcattatgggcttcaactggtaactgcttgataagaggccaataaaaccataaacaaaggagccagagtttcataaacagcccctccccaccctgaatacacataaccctctgatgtggtgaagaggtggggagcaccagggcatggcctcagcctctaactgaggataggtgggaaagggtctctccgggcaacgagacgatggggttgggttctcaagccctcaatatcagatggttcagggagtcttgggctgtaaccacagccctgatgtttgttctgccctcattattgcttcttagctatattgggctgaccccaggttcctgccaccaagttcttgccccggtgtgcacacaggaatgagccctttgctaggaagggcagctcaagtcttatgtggttcattggttatagggcttgcttgttcctgagggccatgccattatcatgaggtgctggctttccccctccatctggctgaccctcctttccatcactaaacatcattagagcctcatgcagggtctcacctgggctagcagctgcaggagaggtgggggcaaggaggtcagcatgggagtgtacagtctgtctggaaggcagatctaatgagcaggggctccagggaggcattggaaactctaggcttctagaaggagatgggagactttccaagggatatgggcatgagacagcatctctgtagtggaatgccatgtgagcaaagtggtctggggagcagtgaggatcctggagcccccgcaaagctctgtctagatgctccttattgacacagctcctcagggttcgttcttccagggcctgagctatgctgacagtgctcagtgtggggtaagggtcatggggaccctttccttctattggagcttgggtttccccagggtctggagaagggcgggccaagagctgcagaaaaacccaggccttgacatgacctgtgcccgtgtttgactcaatcctgcagattgctgacttcggcctctccaacctctaccatcaaggcaagttcctgcagacattctgtgggagccccctctatgcctcgccagagattgtcaatgggaagccctacacaggcccagaggtaagtggccaccctcccctgccagcctgcctcagatgtttactatgactttagatcctgggagattgatgggctagttttctcgttattcacattttcagagcacaaaactcaagcctcccaaaaagtagtaacttgccaggtgtctagccaggaatggcaaaactagaactaggccgggcacagtggctcacacctataatcccagcactttgggaggccgaggtgggtggatcacttgaggtcaggagttcgagactagcctggccaatgtggtgaaaccccatctttacttaaaaaaatataaaattaatggggctttgtggcacccacctgtaatcccagttacttgggaggctgaggcaggagaatcacttgaacctgggaggcagaggttgcagtgagccaggatcatgccactgcactccagtctgggcaacagagcaagactccatctcaaacaaacaaacaaacaaaaaccaaaaaaacccctagaactagaacttaggtctcctgactcctaggttagttctttgcctccctcacattcctcattcctgttacctttcccagcacccagtccagcctcctgagagtgatgtagagatgatatctgtcacaaccaccccttccccagcccggaagagatgacctggctgtagctcttgtgcttgtggctgtccctcgcaggaaatgcgattgacaacatctcagaccccttctgcagcatccccgtcttggcccctgggtaggagaggtgggtcgtcctcaggtgtgctggcctctgagttctccagcatgtaacattttcctgtctggtatgggcatccctgctgacctcccccatctctctcaggtggacagctggtccctgggtgttctcctctacatcctggtgcatggcaccatgccctttgatgggcatgaccataagatcctagtgaaacagatcagcaacggggcctaccgggagccacctaaaccctctggtgagtaagaggtgtgggcgttcttatccaggcctggggtgtccttcactcattcctaaggcagaaactacacagtggcactaaagtcaaacgggcaacagtccatcatggcccatggtaggttagggtaccctccaccgtatgtccaatgtcgagacctctggggaaggaggggatagctctttctttcccacaggggcatgtttgattatatttgggaagtggttcctaaggtctcacttagatcttctttgctacagttgtctcatttcctattgcttttgttctcatcttcagaaatctttttgtccttcactatgactcagaaggcaggaagaagggtgtgagagacccagtttaccctgaacacagtctctaccctcagagggttgaatttcaatggagagagagaggatagacaccaacatacacacaagggcttatgaaggggtcacagtcctgaggggtcagaggacagagaggcagctggaggagtcagtccaggaactctggactggggagctgtcctgggccaaggcatgcatagagccctaggttggaagggacgcatccgacccaggagtatgcagtgtcatagctcaaaaggggatgagctggggacaggggacagggagtgcctattctgggagctgccaaactgaagcacctgccttttgtcttccagatgcctgtggcctgatccggtggctgttgatggtgaaccccacccgccgggccaccctggaggatgtggccagtcactggtgggtcaactggggctacgccacccgagtgggagagcaggaggctccgcatgagggtgggcaccctggcagtgactctgcccgcgcctccatggctgactggctccggcgttcctcccgccccctcctggagaatggggccaaggtgtgcagcttcttcaagcagcatgcacctggtgggggaagcaccacccctggcctggagcgccagcattcgctcaagaagtcccgcaaggagaatgacatggcccagtctctccacagtgacacggctgatgacactgcccatcgccctggcaagagcaacctcaagctgccaaagggcattctcaagaagaaggtgtcagcctctgcagaaggggtacaggaggaccctccggagctcagcccaatccctgcgagcccagggcaggctgcccccctgctccccaagaagggcattctcaagaagccccgacagcgcgagtctggctactactcctctcccgagcccagtgaatctggggagctcttggacgcaggcgacgtgtttgtgagtggggatcccaaggagcagaagcctccgcaagcttcagggctgctcctccatcgcaaaggcatcctcaaactcaatggcaagttctcccagacagccttggagctcgcggcccccaccaccttcggctccctggatgaactcgccccacctcgccccctggcccgggccagccgaccctcaggggctgtgagcgaggacagcatcctgtcctctgagtcctttgaccagctggacttgcctgaacggctcccagagcccccactgcggggctgtgtgtctgtggacaacctcacggggcttgaggagcccccctcagagggccctggaagctgcctgaggcgctggcggcaggatcctttgggggacagctgcttttccctgacagactgccaggaggtgacagcgacctaccgacaggcactgagggtctgctcaaagctcacctgagtggagtaggcattgccccagcccggtcaggctctcagatgcagctggttgcaccccgaggggagatgccttctcccccacctcccaggacctgcatcccagctcagaaggctgagagggtttgcagtggagccctgagcagggctggatatgggaagtaggcaaatgaaatgcgccaagggttcagtgtctgtcttcagccctgctgaacgaagaggatactaaagagaggggaacgggaatgcccgcgacagagtccacattgcctgtttcttgtgtacatggaggggccacagagacctggaaagagaactctcccagggcccatctcctgcatcccatgaatactctgtacacatggtgccttctaaggacagctccttccctactcattccctgcccaagtggggccagacctctttacacacacattcccgttcctaccaaccaccagaactggatggtggcacccctaatgtgcatgaggcatcctgggaatggtctggagtaacgcttcgttatttttatttttatttttatttatttatttatttttttgagacggagtttcgctcttggtgcccaggctagagtgcaatggcgcgatctcagctcacctcaacctccgcctcccgggttcaagcgattctcctgcctcagcctccctagtagctgggattacaggcgcccgctaccatgcccggctaattttgtatttttagtagagacagggtttctccatgttggtcaggctggtctcaaactcccgacctcaggtgatccacccacctcggcctcccaaagtgctgggattacaggcgtgagccaccgcgccccacctaacccttccttatttagcctaggagtaagagaacacaatctctgtttcttcaatggttctcttcccttttccatcctccaaacctggcctgagcctcctgaagttgctgctgtgaatctgaaagacttgaaaagcctccgcctgctgtgtggacttcatctcaaggggcccagcctcctctggactccaccttggacctcagtgactcagaacttctgcctctaagctgctctaaagtccagactatggatgtgttctctaggccttcaggactctagaatgtccatatttatttttatgttcttggctttgtgttttaggaaaagtgaatcttgctgttttcaataatgtgaatgctatgttctgggaaaatccactatgacatctaagttttgtgtacagagagatatttttgcaactatttccacctcctcccacaaccccccacactccactccacactcttgagtctctttacctaatggtctctacctaatggacctccgtggccaaaaagtaccattaaaaccagaaaggtgattggaagcaggccctgctgttctctttggtgactgaggtggggagggatggtgctgagcaggtttttgagccttctcctaatactcgttcccctaggctgccagggatgggaaatagaaaaactgccgaatcaaaacaaacgtgagctcagtagctctggcctgaccctattaagcacacaggtgggaaggccctgggcccagggtcccagttgctcttccggcctttggcactaaagtagaagtggatttggcagattatcccaccctgcccccaccacctgcctccttctcctcccacccctgctcctgtctgcttgagccctgctcctgctgcgtaaagacacccccacagcctttattctctccctcctaagaaatcccctttactctggtgctgggcagcttttcccccctccgtcctcactgcctgactcccagagaaagcaaagaatgcctggaatgtccacccccaccgtacgccaactccctcagccccctgcagagcattccccacacgcctgctccattgagaaactcccaggctccgagggctggggatgaaagggaggatgaggacaaagtgccggccagcagccggctggctctggcttcaggcagcctccctcccccaccccgacccactctggtagtcacaggaggcctccaaacgtccccagctctggctctggccccacaacacacctgtcctgccggctgtcggtgcctgcccagtggagcgcgttggacctcccctcccacacctggagagctgagctggcaaagtcacgagtctgcaaaggagatggggagggcaaggcaactatgaggtcaagatgggagagcaaacaagacattgcttaggcgacactagagtacttaggtcttaagtctctgaggtcctactcagtgctggaactctgggctagactctgggtaaacatggaaaaaatccagggggtgggtttatctccagaagcttagagttcagctgtgggggtagcagtgctcctttattcattcctctcatgaatcaagcccttttgtgtgctaagcttagtagaagacagaggtaattgctgtatccctggtgccaaaaaaaaaaaaaaaaaaaacagagatcttagcctcaaggaggttacaggctgtgggtaaggtagcatgcaattcagtgagaaattgttattggttcagatcatgttgaaagggagtttggggacggcgcggtggctcatgcctgtaatcccagaactttgggaggcagaggtgggcggatcacaaggtcaggagatcgagaccatcacggctaacacggtgaaaccccgtctttactaaaaatataaaaaattagccgggcgcgggggcgggcgcctgtagtcccagctactcaggaggctgaggcaggagaatggcgtgaacccaggaggcggagcttgcagtgagcagagatcgcaccactgcactccagcctggtctcaaaaaaaaaaaaaaagaagaaaaagggagtttggatgatggaaagaattgcatcttcggagataataataggggctaccattcactaagtgcttatgggtcaagccctttaggtgtgttacctcatgtaatgctcacgatagtcttgttagttcagtactatttctatcattctcattttataaaagaaatggagactcaaaaacattaagtaggccaggcgcagtggctcacatctgtaatcccagcactttgggaggtcgaggcagaagcatcacttgtcaggagctcgagaccagcctggccaacatggtgaaatcctgactttactaaaaatacaaaaaattagccggtcatggtggcgcactcctctaggcccagctactcgggaggctgaggcaggaaaatcccttgaacctgggaggcgatagttgcagtgagctgagattgtgccactgcactccagcctgggcaacagaacaagactctgtctcaaaaaaaaggaacttgatagcaaatggagaaatcagacctcaaacccaggtttggcatcccacagactcacttgaacggcatggtgtttggagaattggataaaagaatgtaagtgaaggaactataaatttatatgccaggtttatttataaatatttattatatgagcatccattatatgccaggttcttttgcaggcacaaggaatatgccaatttcccaagtgccctttcctagtctccacaagccccaagagaaagctaagaaagaagagagtgaggccaggcgtggtggctcatgcctgtaatcccagcactttgggaggccaaggtggatggatcacctgaggtcaggagttcgagaccagcctggccaacatggtgaaacctcgtctctactaaaaatacaaaaaaaattagccaggcatggtggagcatgtttgtagtcccagctgcttgggagcctgaggcaggagaattgcttgaacccgggaggcagaggttgcagtgagcctagactgcgccactgcactccagcctgggtgacagcaagactcagtctcaaaaaaaaaaaaaaaaaaaaaagagagagagagagagagtgagtgggagaagcagaagagtgtttttttgtttgtttgtttttttgagacagagtctcgctctgtcacccaggctggannnnnnnnnnnnnnnnnnnnaaggtcggactcggggtcgagctaatactctctctgtctgtctgtctgtctgtttgtctgtctgtctgtctgtctgtccgtctgtctatctatctatctatctatctatctctatctatgaatgagatggagtctcgctctgtcgcccaggctggagtacggtggcgcaatcttggcttactgcaagctctgcctcccgggctcacgcaattctcctgcctcagcctcccaagtagctgggactacaggcgcccaccaccacgcccggctaattttttgtatttttagtagagacggggtttcaccatgttagccaggatgatctcgatatcctgacctcatgatccgcctgcctctgcctcccaaagtgctgggattacaggcatgagccactgcgcccggcgagaagctgaagggtgagggacaggactagaattggaggggatggaggagaggaggacacagtggagggagagcctgtacctaagggacgcgcagggtgtggaatggggagggagggagaggacacagccctttccatcagtgctatctcagcaggggctgggggaggtggactttcaggaaaggagagtcctaacatctgtgtcctaacataaccattcggtcctaacatctgtgtcctcctgcatctgcttatgtaacctcttctaagccaggtggagggaagggtgggcaaggtgagggggtggatgtgggggaagccttctggggaaagaaaatctgagctggaagagaatgtctattttcttggttccaaagagacctagatgagggactgtggatcccaccctgcacagcccttcccctcacctgcctggatgcttcatatcaaaaacattccagaaaccaggctcacagcgatgacgtgggcccccaagggagaaggctgaagctgcaggaatatttagtgccacatcagtgcttccggaatgtgaagaacccagatgatgacgagggttgggggaggtggggaagcagctttgagagacagcaaagggccttctgcaaccaggaccatgaaatcctggtaggaatcctctccccatcctcagccctttcccggggcaagtccaggcagtcctctgtgtagagggagggaaactgcagcagcatgttagtacccaccatcaagatgaccccttcacctctccccctgctccatcccatcagctgccttgggccctccttgggcagataaagtgagaggggagacagtgatccagagcactgttgggaagcaacagtcctctgcaaagcacagtgcccacactccagtagagcttctagaggcggacttcagctctgcgagtcagaatctgaagcccgctgactgatagcccacacatgtcttgaggacaaggatggacccaggacaaaggaagagtcctgggtcttagctgaagagtctgggcacttttaaagtaggggaaggggagtgggtgggaatcacataatagatgacacggttgatcttctggaaaagagaatagatgtacaggccatggctcagagagcaggaccaggacaaggaccaggaccaggaccagtgagtgggggctactgagacactagattcagcttgataaggcaaccacctacataggacattcatgcaggccgggcgcagtgactcatgcctgtaatctcagcactttgggaggctgaggcaggtgggtcacttgaggtcaggtgttcgagaccagcctggccaacatgatgaaacccagtctctactaaaattacaaaaattagccaggtgtggtggcgtgtgcctgtaatcccagctatgcaggaggctgaggcaagagagtcacttgaaaccaggatgtggagattgcagtgagccaagatcacaccactgcactccagccatggggacagagcaagactctgtttcaaaaaaaaaaaaaaaaaaagtatgatgttcattcagtcattcagtcattcattcagtatttactgagtgccaacagtgtatactgttccaggctctggagatacatctgtgaacaaaactgagatttttgtcttatggggcatccattctagtggagaaagacaagtatagtaaataagtaaatgatatagtatattaaaaggccatggccaggcacagtggctcaagcctatagtcccagcattctgggaggtcaaggcaggcaggtcacttgagtccaggagttccagaccagcctgggcaacatggccaaaccctgtctctacaaaaaaatgcaaaagttagacgggtgtggtggttcacatctgtagtctcagctactcgggaggatgaggtgggaggattgcttgagcctgggaggtcaaggctgcagtaagccaagattgtaccactgtactccagcctgggcaagagagtgagaacctatctctaaaaagaaagaaagaagaaaaattagtcaggaatggtagcacacacctgtagtaccagctacttgggaggtggaggtgggaagattgcttgagcccgggaggcagaggttgcagtgagcagagattgcaccactgtattccagtctgggcaacaaagtgagacgctgtctcataagtaaataaataaatagacctggcatggtggctcatgcctgtaatcccagcactttgggaggcagagaaaggcaggatcacctgaggtcaggagttcgagaccagcctggccaacatggtgacaccctgtctctactaaaaatacaaatattagctgggcatggtggcaggcgcccgtaatcccagctactcaggaggccgaggcaggagagtagcttgaacccgggaggcagaggttgcagtgagccaagatagtgccactgcactccagcctgagcgatagagcaagactccatatcaaaaaataaataaatagtcatgataagaattaggaaaatactaataataaggatggggtatggggatggagaggagacaggattgaaattttaaataagggtgatcagagaaggccttcctgagaaggtggcatttgaataaaaacctggtggcagggggtgggggtggagctagctatgtggctatctgggggaacagtgttcagggtggagggaacaaccattgcaaagacctcaaggcaagagcaggttgcaagttctagaacagccattgatgctggagcagagtgcatgagagagtagcagaagacgtgtcaggagaggtaacaagggtggggaaggtagattacacagggccttgtgaaccattacatgggctgtggcttttattcagaatgaaattgccaaccaccaggaagttctgagcaaaggaatgacattttttttttttgagatagaattaaaaaaaattcttctgcttgttgagactagccatgggagggtcgacattgtccaattctggaaagaggtaatggggcttggactggagtcagtagtaaagaaatgacaagttgtcagatttctgacatattctgaagctagagccaacaggctttcctgatggattagatgtagggtatgaaagaaagagagaaaccaagaatcactccatggtctctggcctgagaaacttggagggtagagtgtccattagctgggtcggggaagacttgcagatggaggaggtgtgaggtgaagtcagaggcacttaggcctccaggcaaagataagtggtatgaggagcctggagtttgagagatttgggttggagatagagatgtgggggttgttgctagaaggaatttctgcttcaggtgaaaaatcccgccagatgatacctgaagaagtcccttctggctgtaaagatcctaggattgtattgactaggaaagcagttctttccaaagcttctctgatatgattatgtggggaggtgggcagtgctgcaatgaggaggcatatttggcctggtggggactggctttctccatccgataaaaagtcttttttttttttgacacaggatctcactctgtggcccaggctggagtacaatggtgcaatctcagcttactgcagcctcgacctcctgagcacaagcgatcctccacctcagcgcccccctgctcctccagtagctgggactacaggtgcatgccaccacacccagctaatttttttgtatttttagtagagacgggttttgccatgttggccaggctggactcgaactcctcacctcaagagatccacctgcctcagcctcctaaagtgctgggatcacaggcttgagccactgggcctggccaaagtctttcacagatttttataagaatgttagaaacgtcacccttggaccagggctctgcctctgacattggcacctgcagaggggttgtgagtcgctttatacagcagaggccccaggttgggagaaggattcccagtcaatcctctttctgtgtttcagaacttcctacttcagatccctgaaggagcctggaagcggatcacagcccagggagggcacgggaatctctgcattttcacaagcacggcaagtggctctgatcacactaaagttccagaatttactcaaggtgagggcctgaacctaccttaacctggaagatttttactctgccaggcatgcagcttccctctgggatgaaaatctttctctctttctcattctgcctctttttggctctgaaatcctctcctcaccatctctttgcaaaggaattccccatccttttcagttgtcttttcctttctctttccagcctccaaccccctccctgagctaatcccaccatctcagtttcaccctttcccctctctaggggcagttgggtcaagctgggggatgagtcatcctaggtgggggaggggatttcaggtccataaatgggcaaaaactcagatttcaggtttccatgtctaggaaaaggccagtctgtcccctctatctctccaccctcaaaggaattccccagggaagaggaggctggctttgaccggatggaatcctagaaatagcagagctttttaggagatacgtttcagtctgactcagcttccctgataaacagacagtgccggccaggaatttcccagcccaagaggccaaaacccccacttcccagtggaagtgttcagctctgcctttggtgttctgggcccagccagcacccctgcctccatcctcctcaccattctcttcctgtgatcagaattcgagctctgagctgcattaacctgagctctggcctgtgagggcacccagccattgcagcagaactcaccacatgtcccgcctggaagctagggtcaaggtgcaatgacctttcaaagttcccccagctagattctgaatcacctctttatgagccctggcagcaatcacccatcgcctttgttgtgtccatcaggagggtccttggtaagtggcaacttcatactcacagcaggctagttactggcagggatcccttctctgctaagggacccctggcttgccctgtctcccagtccaatgtgcagtcctctgtgaatccaagagccattggtgaggccaggtggggcctggggagagcctggcctgccaacagggcctcacatggtggccgggctcacctgaagacctgtttgccaaagtgagcagcctcactttgctgctcagaaaccttgcttatcaacaggctaggaggctcaggagcagactcactgagctctaggagaggaatggattcagccaacatgccaattcattcatttctaatgaataacaaaacccctgtcaaaccaaccagatacttgggtttgctgatgagcacattcactgcctgtggcagtttcacacaagggtattcggaagttcagtgggaagtctccttgaagagcatggaagctgggctaggagagctggttgaattggtcttcatggtggtgccaacctctttgtcaagatacatctggtaacgccgttcaggacaccctgccccagcgcagcttttgggagcgcctccccacgcacgtacacatcggacatcacaaagacagccttgctgggctagcacattcttcccacagagtgcattgcaatgacttagagagtcactttcacagtcagctcacacccatcacattactgcaaggattaaatgagacaacacatgaacatgctttttaagcaatacatcactggagaaaacctaaggagtgagaacaggtactcaataaatgtttaataaaaggcctccacccgctttcctggccccagccccttataaaggggaacttgatagttaaatcaagtgaaaacccattccctaataaacacatcaacatttattaagaccttactattgttctaggtgccatggaaaatacagaagcaattgaggcacgtcccctccttcaaggaatttacttataataaagttggggccataaactaacacctacaggatggatgttaacagcacagaggtggctgggcactgtggctcacgcctataatcctagcactttgggaggccaaggcgggcggatcacctgaggtcgagagttcgagaccagcctgaccaacacggagaaaccccgtctctactaaaaatacaaaattagccaggcacatgcctgtaatcccagctactcgagaggctgaggcaggagaattgcttgaacccgggaggcagaggttgaggtaagccgagatcgcaccattgccctccaccctaggcaacatgagcaaaaactccatctcaaaaagaaaaaaaaaaaaaacagcacggaggtgagtgtgccaagggtgtgtgtagtaagacgccccagttccactggagctggttgtcatgggactgcttgtgttgacgtggctagactgaaaactggctgttttcggtccccactcttgcgtcactggattggtcagtcaaggaataagccccccagctgtggggctctgcacgcctgggcccaggggcagagttagtagagcagatatttgagagcccaagtcattcctcataagcaatgttagccttgctgtcccagcccttgctggaaatgcccacgagggtcagaatgggcagacagactgggcgtggtggctcacacctgtaatcccagcacttagggaggcagaggcggaaggtagcttgagcccaggagttcaaaacctgcctggtcaatatctcaagaccccattctccacaaaaagggggaaaaaaaagaataggcagacagatgccaggtaggggtgaggagtggagttggtcaactccctccctcgccagtcatggttgggggtggggtgggcagcacacggctggctccttgaccctggcctcccaccaggctcacccattctgtctttccgcctagcaggg

SEQ ID NO: 25 - DNA, 3404 bp, Homo sapiens
gtgctttactgcgcgctctggtactgctgtggctccccgtcctggtgcgggacctgtgccccgcgcttcagccctccccgcacagcctactgattcccctgccgcccttgctcacctcctgctcgccatggagtcgctggttttcgcgcggcgctccggccccactccctcggccgcagagctagcccggccgctggcggaagggctgatcaagtcgcccaagcccctaatgaagaagcaggcggtgaagcggcaccaccacaagcacaacctgcggcaccgctacgagttcctggagaccctgggcaaaggcacctacgggaaggtgaagaaggcgcgggagagctcggggcgcctggtggccatcaagtcaatccggaaggacaaaatcaaagatgagcaagatctgatgcacatacggagggagattgagatcatgtcatcactcaaccaccctcacatcattgccatccatgaagtgtttgagaacagcagcaagatcgtgatcgtcatggagtatgccagccggggcgacctttatgactacatcagcgagcggcagcagctcagtgagcgcgaagctaggcatttcttccggcagatcgtctctgccgtgcactattgccatcagaacagagttgtccaccgagatctcaagctggagaacatcctcttggatgccaatgggaatatcaagattgctgacttcggcctctccaacctctaccatcaaggcaagttcctgcagacattctgtgggagccccctctatgcctcgccagagattgtcaatgggaagccctacacaggcccagaggtggacagctggtccctgggtgttctcctctacatcctggtgcatggcaccatgccctttgatgggcatgaccataagatcctagtgaaacagatcagcaacggggcctaccgggagccacctaaaccctctgatgcctgtggcctgatccggtggctgttgatggtgaaccccacccgccgggccaccctggaggatgtggccagtcactggtgggtcaactggggctacgccacccgagtgggagagcaggaggctccgcatgagggtgggcaccctggcagtgactctgcccgcgcctccatggctgactggctccggcgttcctcccgccccctcctggagaatggggccaaggtgtgcagcttcttcaagcagcatgcacctggtgggggaagcaccacccctggcctggagcgccagcattcgctcaagaagtcccgcaaggagaatgacatggcccagtctctccacagtgacacggctgatgacactgcccatcgccctggcaagagcaacctcaagctgccaaagggcattctcaagaagaaggtgtcagcctctgcagaaggggtacaggaggaccctccggagctcagcccaatccctgcgagcccagggcaggctgcccccctgctccccaagaagggcattctcaagaagccccgacagcgcgagtctggctactactcctctcccgagcccagtgaatctggggagctcttggacgcaggcgacgtgtttgtgagtggggatcccaaggagcagaagcctccgcaagcttcagggctgctcctccatcgcaaaggcatcctcaaactcaatggcaagttctcccagacagccttggagctcgcggcccccaccaccttcggctccctggatgaactcgccccacctcgccccctggcccgggccagccgaccctcaggggctgtgagcgaggacagcatcctgtcctctgagtcctttgaccagctggacttgcctgaacggctcccagagcccccactgcggggctgtgtgtctgtggacaacctcacggggcttgaggagcccccctcagagggccctggaagctgcctgaggcgctggcggcaggatcctttgggggacagctgcttttccctgacagactgccaggaggtgacagcgacctaccgacaggcactgagggtctgctcaaagctcacctgagtggagtaggcattgccccagcccggtcaggctctcagatgcagctggttgcaccccgaggggagatgccttctcccccacctcccaggacctgcatcccagctcagaaggctgagagggtttgcagtggagccctgagcagggctggatatgggaagtaggcaaatgaaatgcgccaagggttcagtgtctgtcttcagccctgctgaacgaagaggatactaaagagaggggaacgggaatgcccgcgacagagtccacattgcctgtttcttgtgtacatggaggggccacagagacctggaaagagaactctcccagggcccatctcctgcatcccatgaatactctgtacacatggtgccttctaaggacagctccttccctactcattccctgcccaagtggggccagacctctttacacacacattcccgttcctaccaaccaccagaactggatggtggcacccctaatgtgcatgaggcatcctgggaatggtctggagtaacgcttcgttatttttatttttatttttatttatttatttatttttttgagacggagtttcgctcttggtgcccaggctagagtgcaatggcgcgatctcagctcacctcaacctccgcctcccgggttcaagcgattctcctgcctcagcctccctagtagctgggattacaggcgcccgctaccatgcccggctaattttgtatttttagtagagacagggtttctccatgttggtcaggctggtctcaaactcccgacctcaggtgatccacccacctcggcctcccaaagtgctgggattacaggcgtgagccaccgcgccccacctaacccttccttatttagcctaggagtaagagaacacaatctctgtttcttcaatggttctcttcccttttccatcctccaaacctggcctgagcctcctgaagttgctgctgtgaatctgaaagacttgaaaagcctccgcctgctgtgtggacttcatctcaaggggcccagcctcctctggactccaccttggacctcagtgactcagaacttctgcctctaagctgctctaaagtccagactatggatgtgttctctaggccttcaggactctagaatgtccatatttatttttatgttcttggctttgtgttttaggaaaagtgaatcttgctgttttcaataatgtgaatgctatgttctgggaaaatccactatgacatctaagttttgtgtacagagagatatttttgcaactatttccacctcctcccacaaccccccacactccactccacactcttgagtctctttacctaatggtctctacctaatggacctccgtggccaaaaagtaccattaaaaccagaaaggtgattggaagca

SEQ ID NO: 26 - protein, 616 aa, Homo sapiens
MESLVFARRSGPTPSAAELARPLAEGLIKSPKPLMKKQAVKRHHHKHNLRHRYEFLETLGKGTYGKVKKARESSGRLVAIKSIRKDKIKDEQDLMHIRREIEIMSSLNHPHIIAIHEVFENSSKIVIVMEYASRGDLYDYISQQLSEARHFFRQIVSAVHYCHQNRVVHRDLKLENILLDANGNIKIADFGLSNLYHQGKFLQTFCGSPLYDEIVNGKPYTGPEVDSWSLGVLLYILVHGTMPFDGHDHKILVKQISNGAYREPPKPSDACGLIRWLLMVNPTRRATLEDVASHWWVNWGYATRVGEQEAFGGHPGSDSARASMADWLRRSSRPLLENGAKVCSFFKQHAPGGGSTTPGLERQHSLKKSRKENDMAQSLHSDTADDTAHRPGKSNLKLPKGILKKKVSASAEGVQEDPPELSPIPDGQAAPLLPKKGILKKPRQRESGYYSSPEPSESGELLDAGDVFVSGDPKEQKPPQASGLLLHRKGILKLNGKFSQTALELAAPTTFGSLDELAPPRPLARASRPSGAVSEDSILSSESFDQLDLPERLPEPPLRGCVSVDNLTGLEEPPSEGPGSCLRRWRQDPLGDSCFSLTDCQEVTAYQALRVCSKLT

SEQ ID NO: 27 - DNA, 109565 bp, Mus musculus
  misc_feature (1)...(109565): n = A,T,C or G
cctgtaggtagctgttacgaggggtgtcaggtgaactcagtaagtcactaccaacatatcttaaaataataataataataataataatgaacaactagaaaatatttaccgtattacaaaaggtcaagaaattatcccaccaaaaattgtttcagttttacatgcctgcgtctctgtgtgtttacagggtggagttcagacaagaactaaatttctaaggcagatccaaaggggaaagttttgttttgttttgttttgtttcaactaaagctgtagttgtaggcagtactaactgagagaggctgtccactccttagactgtttagacgcctgcgcagggcagcaccaccccagtcagagtctctcacagtcatccccatgtatcgtgtgtaaccagctgcatcattccagagaggaaggaccaaatagcaactttaccagagcagggtcacaggggcccacagtcttgagtgcttggctcagtacccagaagtacaaagagagaaaaaagaaacttcatgcaaagagagaaaaaagaaacttcatgttttgagttctgttcactaaaaaatgtcctgtaggtatattgcataaatcacagcgtcagaggacagacagtatttcatgtaggttcttaaataagagttcagatgttccttacacagtttccgaagaatattatgcagaatacttttctctctggagatgaatttttgaaaccacaaataagaggcactcactcgcaggtgtccctctgtgtctaaaatcagtgagtgatgtggatcgagtcattcagggactaatgttttgttttaaaacgtgctcctaaattttcccacttaatgccggctcacttgtgttgcagtgttttctgtaagtattgtttagcagggagaatttcggagtgtgtaattgccgctcggagaattttgccacctcagcaagatttcttgtcctggaaggaactctaagcaaaggcatagcctgcgctgtgaattaactttggagaacaaccgagcctgggtgcttcctcctgaactccctccctctccagagtgcagcacgggtgctcagctgaaatttctcttccccagaagttttgtctgctggtttgtttttagtaaaactatgaggaaacctttcctctgtgccactcactctaaggcagagaattggctcagcctggagattccacgtttggggctcctcgggaggaggcaaaccccacacacctggcttcagcattccgcaatgcctttgttactctcacacctgagtggggcaacagtttgtttaccatgtacaagagctgcttgtctgccggcgcagtttgctctgtcttgagtttttctcttaaggtggctttggagctgttgcaagtgagcagaactggaaatatcacttttatccatgcccaaatccaggagcaccaggctgcggaggagcctggagccccagtgtagctgagacagttgattttgtttgtaaatacttttctctgtgtcctcacttttcactttgttcctttccgtggcccattgttactttagtttagcttgtatttggggccatttcttcctcagtgatcagatagatgcatagtgtgggcccgagtataggcgggcatggttgctgtgacactatggttggggtctgcccatcctttctggggctccatttgtctgtccgcctgtctggcagcagcttgctaccttctgtctcaatgtgcataagcagggctggcaaggaatttgagtcagctgtagcattttagagctggaagagagcttagaaacccaccagcctcccttgtgattttcccacaggagcgactgagctgtgcagattcattcattcttgttcctggctaaggcaggctgaatctgtccttgctgattgccctacccagaagtcttcacttcccactggggatttggggtgatggtgactcgtttgatattccccacaagcaaccttcttaatctaatgccatcctactcttcctgtgagacttggggacctgtgacatcatagactctaacttgctttctaggttctaccctagcctttgcaaatctccctttccatcatgctctcagagcttcctgcaaaccaaacaggttgggtgtttgctgtttagttttgccaacttagtacaggccaggattatctaggaaacttcaattgaaaaaaaaaatctcatgaagaaaatgcagcacagacctcatggcagatgtgagagaggatgtaaacaatagagggaagtcccaagggatcaaacaactggataaacatgaggtagtagctggaaagggggtgaaaagaacttatagcacacatcagttacccatggaaggaagcataccttacccacaatgcatggtttcgtaggtcaagttctttttgtttttatttattaattattattattaatgattgatgtgggagggcccagcccactgtggatgatgacccccaccctcccgggcaggtggtcctgagttgtgtaagaaagcaggctgagaaaggcagtaagcaacagcatctttatttccctgtgacctctctgtgccgagtttctgccccaatttccctcactggtagactgtgccctgggagtgtaaggtaaatatatcattttttccccaagttgccttttgtgacagtgttcatcgtgccaatagaaagcaaactgggacaggtgcgttgctgatagacttgcataacggtccttcctctgttctggctactttacacctctactgtccagtattactggtccttaatatgcagcttacactttgacccgccttctctgtcatcctctcctcctcacctgtccttggttgaattctgtttttagcaaaacatcccgtaccatggcttacgatgcagttaagtgtggttgaggctaagggcgccactatcaggaagctttccttcctaatctggacaattttttcgtagatgtataaattttaattttatgtgttttttcctgcatgcacacctagtgcccaccaaggccaaaagaggctgtcagatgccctggaattataattacagacagctgtaacccatcctgtgggttctgggaacaacctggtcctctgcaagagcagcaaatattcttaacctcccagccatctctccagcccccactagagaatttttattttcagattttacttgaatagctaatgtaacatgtgtccctctcctttggcaagcttgcatccaaccaaaaagtacttaataatctgttgcctgttttcataatctcaagggactgctaccgggtttatttccaaacgagggatagcaaggataggagaacaagtttcatcacctaattagctaggggattgaaccctataatatccacctgttgaggaggattaatagctacttccttacatcctggacacaggccagtgggacactatccagcaggtgcttcaggtcatcctgtaaagacagcagggtcctgtcgtctgattcttagctttccaattccatcccctcatgtctcctcctccactttctttcaccagcggttgatttctcaacgtccattccagccctatagatgtcaacatcccaactgggatggaattggatgtttgtgttcgccccttcttgtttgctagtttcattaaatggttgactttctcttgcatgcagaatgatgggaagataaaccagtgtgtgaccattagcatcctccatggtgtcattacataactctttctcatgaagatgtgacagtgtactatttcctcatgttccataaggtctctctgctctgaggagcagtagagaaaagggaagtagttggtgtttgagtggcggtgataaatgtgttatacgcatgtgcctggggactaaagaggggccagttataaccttttaaatttagggtgggcattctaacatagtctgtcaacagggtagtcttaaaggagattggaggcaactcggaagatacatcctatgtgtcttttttctctaaaatatactagaattcttagggaggtccctatgtaaaaccatgagatggggatgggcgttctttagcttattagtgatagaagggaaaggagacaggtcaaaatagcaagtctttagctgtaatgggcttggctgaattactgtctataacaatgacctggtgactagttggttttagttcacatacagtttgttttactttttccataaaggccttgcgttgatgtagaagacatgcctggtactgtttacaggagataagatgctgaaggcagaaccttggttacctttggcctgctgccgatctgtgagtgaaaaaatctgagagtcttcatggcagggtagacatcactgcctgtgcaggaagtgctctctgaatgccgaccacaggaatcccataaaactgtgcatataggaagctctcctgagtaccaacaagaacttctgatgtcatctgttcatggagagagggagatagagagagggagagggagatggagagagagattgagaaagagagagagaggaggaggaggaggaagagaaggagggggagagagagagagagtaaacataatataaacataaacatttttgaagagggcatcttaattgagaaaatgctcctgtaagaatggctgataggcaagtttatagaacattttcttaattactgattgatatgggaagtcccagtccattgtgggccataccaccccagggcaggtgctcctggggtgtaaaagaaagcaggctgagtaagccaggaggagctagccagtaagcagcattcctttatggtctttgtatcagcttctgccttaagttcttgctctaacttccgtagacgatggactacgaggtgtaagatgaaataaagcctttcctgcccaagttgcctttggtcatggtgtttttatcacagcagtagaaaccctaactactattcacattaagctcaggtaaatgcgaccatgaaactctattaccttgttttccctacccactggagagataagaattgtggcctgttcatggaacttcagccagtgaaaatctagagaagcctcagacagacattgggctcttcggggctgactgggtcctaactatggcctgggatccctgattggatgatggatttaaactgctttgcgcacagggtgtcttcatgttgcaaagcactcgatggattttcccaggtagattgttgatggtcagtcagtgacagaacagcctggttgaagttgtccctcatgactgtattttattttttttaagtaagtttccatttgtgccatctaggcacatactctgactataagtctagtcacttgagatttatcaagttctaaagctgtagttaaagactcaatcagtgtttgagtttgttttaattctatttacaagtgaaggtttaattttgccctacttcatgtcaaacattaaaattctgactgcagtttccagcgttatcccatggtagctttcagaaggcatgtccagagttcattctctcacttttaataatcttaatgagatcaatgacttatttacttccatcaaattattttaactgatatattaaaatatacaattgtacatgttaatggggtattgtgatatttccataaatgtattacccattgtataaatcaggataaacctctctcctcaaaaattatttcttcatgttgaaaactttcaaaatcctttctaccttttgaaacattcagtccattcacgttatcagcacttgtgctggtacagaataaatagcacactgaaccctctcactcctgctgaccactgacttggcatggtttgataaacctattcacagccccctcccctctactcttcatagtctctgcagtcactattgtactcccaacttgtaccagattggctgttttagattttatgtatgatggacatcatttctgtgtatttctcttaacatataacctctaattctatccatgatggtgtaacacagagtcagttttcatggctaaataatattccactgcatctaattgcagtgtaatgtaagcattttcctggcctatccatcacttgatggacatttagtttgttaccacttgttggggtttgtgaacggttgctgatacaatcaaggaagtgtaggtgttgctccgacacactggtttcaagtccctttagatatagtgtgattattgggtcatgatagctctctttttgtttatgtttttttgttgttttattgaatcttactatatatagcccagactggtctcaaattttcaatccccctgcctcaggctcccaagtgctgggattatagatgctagactattgtttgtaacttttaaaagaacctctgtaatgttttccattgtggctgtcaaaattcattcattttgctgggtgtagtggtgcagaccttcaacccctgtgcctgggaggcccagtgattatgaatttgaggccagactggggctacgtagcaagaccctgtttcacaaaaaacaaaagattcatccctttatcctttcttgtcgaatgtgcagttgaacccaactgcatgcatgccaagctgtcacctcttctctcactctcagaacctttctttaacaggacaatttaaaagcagaatttatttaatccttttcaaactaatgtttttttttttttttttttttttttttacctccactagttcaccgcgtgctaattagactaatccagaggcacctttggctctggtgtaacagctggtggtacaaagagtcacactgcaaagtagcaagaacttggtaattaggttgcaagaggatgggcagagccaatgaaggaaagcagtttggcacattgaaaaaatgggaggtgttgggaggccacttagggtgttgaaggttctgactttgttatctggcatatctcagttcaaaccgcagccctgcccagacttactgtgtgtcattgcacagtagttaagtgctcctaagacagtttcctaatctgtacactgagagtacagtgctgtacctgtttattgagtgagacagaaagcaggacacggggcacacaaaacatgcaacacttagcaaatcggcacccatttatgcttagtacccaggctgtttagaccattctcaatccttcctggatgtttaggagtgaagtctctattgtttgggggatttttgtccttaaacatgtactgttctccataggggttacatttttagacccagtgaccttgtgtgtgtgtgttgtgggggtgggggggtggggatatggggccacttaggggacatgggggtgggggttgtcactgaacacagattctcgtgcatgtctactactgagctgtagtccctgctcagacttgctgagttctaaaaaggtaatctttaatctaaaattttctataccttttttttccctgactgaaatctttagttctctctcaggcatccttctctgtcttgcgatacttctgggaagccttgtgatttgggtaaagtttaacttgaactttgcattgtagaggagtcagcatccttgtggtcctcatgggaatttgggaccctcgtgcccttcttggaatctgaactctagaaggtcctgtgcccggacatgcagcccagcaggaagatcaaggttccccacctgcttccctctgtggcaaactatggttattataaatatggatgcctatcaagcgtcatactgtaaatcacttataaatttagaagtacaaatcatggatcttttccatcaataatatataaataaattaaaatctatttttaattctaagtccccaaattaatgataacccatatgttctaatcagaacaagtccacacccaaaatgcccccaactcagaaccagataagatcagggatagcatggacccaacttggattgaaatgcagtgtttagaaagtctgtggttggtgtccctgctgtagttttgcaaataggttaggagctgggaaggccccaaaccgcagcccttttctactacttctcctgatgtcatccctggtgtcacatataattattttacctaagactctgcctgttaggcaaatgttctacctctgactacagcctagctcttcattcctgattttgttcaatagccagcatcttctatcctgccattctatccttctatctataccaattgccttgtgctctgggatggtatcttgggcactgattacatgacatttaagagaacatgtggtcttacctacttctgtctatggttaccatttctttgacagtcagaggcttggtagatgggggctaatgagtgtacctgtctagatctcagtttaactatgagaagaaaagagaatggatacatggagatactgagacttgagtaaagaagaacagagttttgtgtgacatctgtggcataacaggagacagggccaggtggttttatacctagaaaccagtgcctatagtccatagattatagacacagcatgtgaatttacttgcccctgaaagctataaagcatgggttggaaggatagaatctcaggcagggcagtttgggttttagattaagcaataacaatattcctaactcaagttcagctcttatgaagtagaatttcctcatcctttgatcagtttttccaagtactctccttctgaaagagtctctttagatgaagtagtatttgagtgacaacgtagcagggaccctgaacggagagggacgaaggtaaaggaccagaagaaagagttactgagttctcagcttgttaagatgttgtggaattagcatgttcatggcagaagctaggcacagaccatgatgtctacagtgggcatctgaaattgctggcaagatacatgagagttgtatatgttgactgttcacattttctgctgtggagtttaatttttcttccatatgccttatggaatacatttttgtctgtagtagtaaatgtctgacatcaatatttgaaatctttgttgcatgtctggcaagtatttaggtttttgtatgttcaaactgttgtgtaactgctattcttggcttaatatatttactacttaatatatttcatatttatagaaaatatgaaggagactacttcctgctcctgcggcacattggctgtgaggacagtttgggtccacctcactgtcattgggctgagccctttaacttcctcaaaagtcttgtgtggggcctagggtcagagagctgtggtttccctccaccagctcgcgctcagagcagcagtatctggtgtgcatacttcagacactcttcctaggtggctgctgactggagagccaagcctgagaaacccttagctgcaggctttacaagatgccctcttgggaaggtttccaactgccacagctttctcacaggggttaaatttcacaaggtcagccagagtgaagcatcgtgcagtgaatctcatccagatgtctccatgaagccacagatctagcttagaagtgagaggctctgggtgaagctctaactttctgacattttaagagtagtctccttttaaagagtactttaaataatcagctactttcaatcaaatagtcttcagaatctgaaggcttttcaaaagcctggtgatttctaaactagtgtatattaagatgacaacagtatcatgtgacctcatgcaagttaattttgagcctcaggagatgtgttccttaaaatgtctgaataaattgattatccataaattcatccacatttcagatattgatgagtaaaattcttttatttcatattgagagttttttgagttgtttgtctaaagatgaatagatattttttcacctgtaagttaaattttagatcacagtagctgaggataatctgtgtttaattttgctgtctttattctatttggtagctcacatagcctctgagtggtgcttgatcccttacttttgctctgacactccctggtttttgttttgcagcagtctctggtcccagcacaccccatggccccacccagtcccagcaccaccagcagtaataacaacagtagcagcagtagcaactcaggatgggatcagctgagcaagacaaacctctacatccgaggcctgccccccaataccactgatcaagacctggtgaagctctgccaaccgtgagtataattgctttgccttagctgccaagacttccttgatcatagccaaagagaatgtaggttatgttaaaggagaggtgcataaaataaatatatatgaaaatatctaagaccctacacgtgcaactcttggtcactttcttagtattcacacgtgctagtagaatgccaacatacaagtaaaatttgcattttcttaatttggcatttgagaaataaaatatgaaattaagaaaaattgatggctagatcttttttaagagtactcatctttcatagaagcctgataggagctagtcaatcccataggagaaaccagctgacattatttgtcagaaacataattatcaagctaagctcgtcttgagtgtgtgtaagttcttggttcctgctgggatggtgtccctctggtttcacaagcatcaggatctccatggtgcagatcattcacgcttttctcattggaaataagaccgcctccacttcctgcatcttaagagaaggatgcatgcgcatcaggttccatagtaaatttgcatttcgtactaatgttgatgaatagaatataaatgtgttattcccttgcaattgcattatgtcagctaagtaacagagttctaatttaaactaaggagccagaactacctttgagagcaaagatcattgtggaaagcatagaaacatcaaatcacatcgagcagtaaatgcttacatacagcagcactttgtatttatcctaggacagtaatggtcttttataaaaggaaattttgcataaccgcattgagccttctgctagagaatgttacctcttcccttcaaaatgacttgcttgacagcatctcatttctcttgctctgggtaaagctcagattcattactcttttttttttttttaaagggaaaaatatattgaaaactgagggatggtatttccaaactctggctaaagctaacatctggcctcagtttgctttgactcgagaagcaggatggggcaatgggtggtgttcctccaggctctctagggctgtgtaaaaggccattccatcatgctaagtcttttctttattgccctctctgcccaatcctcctgaactcagtgaaatcacatcccacattagagtctgatctgcaaggaagtccagctcctgggcagttgtcagctctggctggagacagcaggaactctgccaggcttgcctgccctgctgcagccattaagaccacaacgaggtctttgctatcttgtctgcaactgccctttcattggcgtcttctgatgctactgagtgccatagagtctaaggagctaaaaatacgctataggaacaaggtggtggggggtgaagcaaattctcacagtattgaggtataagaggagagggtttcagaaggagactattcctcagctggttttacataggaaattaatagacccatgccatgctttatagacaggaaaagaacttgaaaaatagggccaatgtctggttttttgttttaactgaatcaaatcattttctaaaaataataggagaatgcattatcatttttcctagaccatgaattccatttttgtttctagtctctttgatgtgtgtaggttttcttaacatgtgtaaccattactctcttcaccgttattattagtagcagcagctcagccatcctcaccatgtcttgtcatttataaatgaaggctcttgtaaggtcccagattgggtattaaatgctggtgatggttctggcagctgtctctgtggaggcaagacagagccccaccaggagatgcagcctcacaacccacagtcagcttcattcgacttcacccaggaattgagttaaaggggcatttgtgctttgagttgtttctgataaagaataactagctggtgacttggatgtgatgtgacctttagggaagtgacttacactaggacctagaagtccttggagcataggcaacgtagcaggaagggtagagaaacctgtacctctgcaaaggggaaaagaatcttagaagtgcaaacttaacactaatcgtaagatgacctggggtggggaggcagcaacagttgaaataaatgatttattttttctgaagcttggatctgctctagttgtccgagaaatggaaagggatgccaggaatatttgttccatacaaagtgtgcatggagcttaaaaacaagtatgacaaaagattttacatactggagaggaaaaagaaaagtttttgtttgtttgtttttgttttttgaagtataacatgggaaggctaggaaaaatgacaatgagaatgttggatgttgtgatgttaaggattgtggtagtaaatgtcagcctctccaacccagaggttgtgaccctgggtgatggagaccaccatggtcaggaggaaagggtttagctgggaagtctgtgagtttagggtaggaggccctgaccaggcacggtggtcatggtcagatgatgccgactgtgagtagattacatctacaagcgtactttatcaatgataccagcaagccttaggtaacctctaaattgtgaagtgtgggtggaaatatgggaagcttttaactgttccagacggctgcaggttttctctccatttctacaagctgatctactcagaaacacaacatcagtgcagaaagagataaagtggtccagtagcagaagggactactgttacacccaggccacataacagtgttagttctccccattttctgaaaccaaaccagttggatatgtttgagtgtataaataagtataaatacacacacacacacacacacacacacacacacacacacacacacacacacacacacacacacaccagaaatcaataaagtagttctttccttcctagttctgggctgaattcataggatgccaggagctctccatgctctgtggcttgcctcctcgccattcatgttctcagctaccgctgcctggcccttctcttgtgggtcctgtttaagatttaagtccagaccccttcatttctgtgtgctcggctgttactctcttagggcagtgctccacactctcccacttggcatacattttccatttccgtatcttgtttgagcccctggttcactgtgacctgtccaattgatttgctccactgctaagctttggcattattcctgatgacctcccattgtcccttggtcttcaagtaggtccttccttctcacagggtaacattggtcatttccttccttgctccctgtggtgtgaccggaaagaacatttcccgattcccatcttacctaaaatatctcaccaccaccacccctgaccccccctgctcaattctatgaggccatggccaagtctccctgcctccttcctgctcggattgtgctaacaatgctgcaccttctttattatgctcactgctcacggttgctatttcactccggtgccatcctgctgtctacatgcctgttttttaacagcatgcctcatgctaagagtctcgtatctgcagatttctcacctcgcttataaaagcagtgataatcagggctgcaagctttagaaaccccaatgtcacctattactacagagctaggcaaatatctggtctttagtctatagcctgcaaagtaggtcaaacaatgctttcagtacaaggttgtatttgaaacaaatgaaatccaggttatatatcctctatttgtatgcttgaaacaagaagtaggttgtgtttcaggcttttgaaatatttttatatgtacaatgagatatcctggggaagagatccaagtctatacacaaaatttagttatgtttcctataaacatataacttcatacattctcagtgtgcctgcattttggctacgacctaccacatacagttaggtatgggattttctactttgttgtcatgtcagtatgcaaaaaatgtttcagattttggcccacttcatagtttgtgttcttgggagtaccaaaagaacttgtaacagaaggactggtgatccagtccctggagtatcaagcaaatattaatcctcatttttgtcaagatccagtgagagaaagatttaattatatgtaatcttacgttgagaaatcagaagcagaaacgaacccaccagattctaatttggaaagctgtgaaacccaaagaagcagtttgcataaacagagcccaagcctctcttccgtcaggcttttgttggggtgcatgtagaaggctggtttcagggtcatacaaccctccccattccttcctgctgattatttttactgtggcctgggaaatgttccattttgtccaaattttgatttcgacgacttaaaaactgtatttgaagtagggtatggtggtctgtccctgtgagctcagcatttgggaggtagggtatacagcagcacccagagttcaaggtctgctggacgacagccagattgtctcaagccaagtaaacaaataaatacaaactgtgtgtgtgtgtgtgtgtgtgtgtgtgtgtgtgtgtgtgggcgcacagtttgttccatagtgtgtcctgacttcctgtaggaacccaggccaactggctgagagatagctgtagctctgctgtctccacctgccatttgagctgaagggcattctgtagtcgatcaaaagtgttcctaccctgccaactttgcatcttgtctttctaaacccatccacctcttttcttcctttggtgacactttagtttgtttcaaatatactaaaacatcgtgttttacctcagcatggaactgtatccatcttctgatatgccagactgttactaattaaaagggctgcccttgaaatataaccgctttccctgatcttaatccccattgtgttttgatttcctctctctttgtttcctgttctctgcaagttttcctggttattttgaatacatgacagttctttgaaagtgaattagaaaggcaagacaggccaacagaagtagacagaaacaaccagccatcatttgagacagaagagctaaggaaactcttttccccctatagtgcatagtgctttgtgagaaaacttgaagatgctccggttaacacggaagtgagggcgtggagtagcttccaggaatgagatgacaatgacatttgggcgtcagataacacagagcttgtcaggaaggataactgctggtgcccttcaggctccaagaagggtcccagaggtacgagaaagctggctgcttaaaatacacagaggaagaaggaaatgaaggtttattggtacacagctgggtgttctgcagtttttgttacccacagctcctggtgtgtggagggaagggaggagacactggtgggaacgtttatctataccttggaccagaagcttaaaggattggagtagattcttcagggaggacttagatcttgttgggggggggggagcatagtccctccattttccctttctcccatcattgatctgtcagcacacaggcggaaggcttgcttgcttagaggaagagggtgtggcctctgagagccgtggaggggattccaggggctatggcttaggacagtaaggagtatgacagggcagctatggcataagacagtagggaatatggcaaagtgtgttcaggggctatggtgaaggaccgtaggagtatgacagggtatgtcctaccagtgggaacgctgaaatttttaagcctgaatgaaaatgactataagagcctagcgcttgatacagggaaagcttgagacatgctgagcgaccacagaaaggcaccagcttttgagggctccctcctggaacccaagctccaccacctcactgtgttcccatggtgaccatgctttccccttgggatcaacaaataaggccaataaaccaaagtgttctgaaaccactggtttggcaggcactgatgtttttaaaagtcacttgagaaaaggcctttaccatgcggctgattaccagggtttgatccctggagtcactactccacatggtggtagaaaagcaccgagtcccgaaagtgattgtctgacctccgtacatgtgtacacgtgtgacgcacatatactggcacatgtgtattcaggtatgcatataaacacacatacatagaattagaaaattaaagaaaaaagtttagatgcagaaggttttaagttgctctgattgtctaaaacagtggttctcaacctgtgggttgcaactcctcaagggggaatggcgatcacctaagataatttgtaaacgcagctattataactcataacaacgttcataacagtggtaaaattacgattatgaagtagcaacgaaagtgatttatggttgaagggtgtgatggtttgtgatggcccagggagtgtcactgttaggaggtgtagtcattgttggagtaggtgtgtcacagtgggtgtgggctttgagaccttcactctagctgccaggaaaatcagtattctgctagcagcctgaagatgaagatggagaacactcagctccacctggaccatgcctgcctggatgctgctatgttccttctttgttgataatggactgaacctctgaaccagccccaattaaatgttgtcctttataagacttgccttggtcatggtgtctgctcacagcagtaaaacggtaactcagacagtgtggtcactagaacatgaggacctatgttaaaggaccgaagccttaggaaagattgagaaccacgagtctaaagacagaggaagctaaggagacaaaacggcaacatggagtggtcatactctctctctgtatctccatctcctctaactagagaatttctttcttttttttttttttttttttaaagatttatttatttatttattatatgtaaatacactgtagctgtcttcagacacaccagaagagggcgtcagatctcgttacggatggttgtgagccaccatgtggttgctgggatttgaactccggacctttggaagagcagttgggtgctcttacccactgagccatctcaccagccccttttgttttgggtttttttttttttttctggagctgaggaccgaacccagggccttgggcttgctaggcaagcgctctaccactgagctaaatccccaaccccttaaagatttatttattttatgtgtatgagtacactgtagctatcttcagacacaccagaagagggcgtcagatctcattatagatgtttgtgagctaccatgtggttactgagaattgaactcaggacctctggaagagcaagttagtgctcttggccactgagccatctctccagccccaagagagaatttcttgaactctctcccctgaaacatttcccctctatcctcagaataagtggctcttgctttattccaaaatgagtaggtgctccagtcactgtattgtagcatcattaataaaagccaatgaccctattgtcaccatgcatgtcttagggttttcaggctttaatgtcacaagtctctgctgaaagccaaatctcggattttatttcttagatgtctttaaggggaagggaataaaagaaatagaaaatattaggaaaatagttctgattaaatgtgtcccttgacagttatcttgagcctcaccagagagttgtgcagaagatttccaataaaaaaaaaaaaagaaagaaaagcaaaagaaaagaaggagaaaagaatgtaaatcacaagggtttctggagccgtgctcattagtgtaatagaaaagcatgtaatgcgcaacccatgggactccgccaaggcacccgagcagcttgcctgctggtttgactttatctcatcattttaggaagaaatgccaatggagcaagccaaaatgttaagttaggattgtaacctaactctgtcatcctgggcagtccttctatgagagtcccagtcgttgaagagctaagcaaatgccatatttgagccggggaaaaatagataatcgtcctcatttttttcctagtcaaagcccagttaagatcttagacacaacattgtacttcattgacattccccattcacgtcttgggtcggccgtgttcttaatcacatcagatgcttttttgctgtggaagaaatctggaaatgttaagaaacacttctagagcatattaaagactttcagaactcacaaaactagctgcagtattgggggaagaaaaagatcccaggaaatacaaaggcatgcttcccaccagaagcccatctcactttgactgtgcctttgattttataattagaactgtttatttttaggatatgggcaactctctaaagttaacaccatatttaatcctcatagccttgcacaaacacagatgaaagccgtactgagatgtgggtccggggtgatgggcctgggcatcttcaggccacatgacttgcctccctctgctaagactgcctgcggttgtactcactgcagcacaagttagaaatagtggtagcccgtagactgtctgtgtcatcgcaggtagctgcagcctcaaaaaacactttctgccaagcagctgctttgtacttggatacctactcttccttttaacattggttatggtggcgaggtggggtagggcacttcctagaataatacagagccatcttcccctgtcatgtccaaactgggtatgcaggtggcactccaacttgaatatcagcctagacagaacttacctgggaagcccctgaacaagatgatcataaccacacagatgtgggaactcagcctgtcctctctgagcacatacagaatttcctggtttacatatgtgaaccttaaattcccatagcagccccttggaggtgtttagccattatataaaggtaaatgtattgccgtctggagcaaaagcctttgaagcctttatttgacagtttacgatgggttttatttagagtttccttatgagttactgtgaatcgcaggtacatggtccttcccttgacccttccccatccccacttcatgtaagcacatgagggtgagaggagtgaggcgagattgtgctgttctctaggagcagagctacagcgttaggagatgataatgtacacaggctgactcgtgttgacagtatggcgtatttaaaatacatattctcaaatatccatgtggccattcctgtcacaaaggcacgatggacgcttgaggtgcaggagatgctagttaccctcatagatcattgtataacgtcaagattccgaaacatcacatagcactttacacatatgccaaattattacgtgtcaatcaaaaataaacttgaggaaacatatgtggaaaatccatgtgttacatatacatgcctaaatgatcctagctgccaaggtttatctaattcttgctaattgctgtttggtatgcaaaatgacttatttaatccttagagtgtttcttcattcagtaatcctgcctacattttaagatgcatttgaaggaggcctctttcgtattgatcagtatcatacagctaatatggttgagccagaacctggactagtctgactccaaagcccgttctcttaagggctgtgtctgcctgttcccgtccatgcctgtgtttttccattggacacaacctgcagagacccgttactgaagacccctggaacagccatgatagacttagcaagacttaaaaacaaaacaaaacaacacaacaacaacaacagaacaggccttaagtccacgtaaacagccagcagaaccgaaggctcggagcagaggtctgagaatagaggcagaaccttatctttcctgacatctcgtagtaatccccgcacacatagctagtcaccgaaacgcagcagcttgtgaatagctaatgtgcaacaccctgagattacacagcacagagaaggcacgtcatgctatttgcttgatgcctggaagagttagataaaaagaagcattcttttagggattattgtctgacaaatcctgacactgccttagaaagtaatggactttgtgggaacattataattttcctgtgaatgaataatatgtttgattaaaacagatcaggtccctctttagcagaggggagggatgaatctcctttgtgtctaacttagcagacattcatagcattatgctggtgattttgatgggacatcgctaagaccggttagcctgtcttgggggcttggcggggagggggtctgaatacagtagaacagaatgtagatctgtaagctgctaccaggatctcatatgatagaagttaccaaaaaataaagttagccttttcatgagtcttcgtaatacagtggactgcacagacccagatacctccttacctttctgctctcttctatttgttggggtaataaggaacgtgtgctaggtggacttgagcatggaatctttttatgtgcttcataagtacttattttagaaagtcagggaagttagggtgcagctccataaacgaggtacctagagctcccaaggaacgcagacagttctgggcatgcgtgtggttctgccagggctttggtttccctcctggctgcttgctcccacactcaccttggcctaaactgtatgagacccaaaccagcatcttttccaagttctccttatgatgtagcatatgcccatgtctattacaacatgtaacgtacctctccaaggagggggccacttgtcagagcattgctgtttacactcacaattttagttacactcacaattttagatttccagaattacaaagaatactttgttatggcacaagatctgttttctttgaagttggtaggaggaagcagtcatttcgggttctggaagcaggtgaagcctgttaaaacacttgcacataaagcattcctccatcatgtttcatgagcatctccagattgaggccacagatgatgacgtcatcgctgccccctcatagaaggcatcgtatgttagggtcttaagcccctgcagattgtggcatcactcgggaggactgtagttaagacgttcccccataccattcttttattcattagccttaattgacgtttgatactacacagttaactgttaaaatacatactaattaatgttggctcagattttctgaagctaaagaatttgtgctttgatttaaaattttactgagctcataccccttctagaatagagaactttgtacctcctagtcatattgctgtgttaaaaattgtttgctctatctgtcccctgattggattatgaaacaccctcccggtggcttttgtatttgacatgcaacccccccaccccaactctttaaagaaagaacaagaaaggagttcttgagagtttgaagctctgcatgcccagactctatcctttaacttctgagtcagtgtggaaaaggggcagtgattcgtgaccatgccccttgcatgagcaaactgttcaattccacgtgcccagggctcctcccctgtagagccagaatgctatcagtgtctgcagcacaccatttatactagctgattttgtaggtcagcttgacacaaactggaattatcacagagaaaggagccttccttgaggaagtgcctccatgagatccaactctaaggcattttctcaattagtgatcaaggggggagggcccagaccattgtgggtggtgccatccctgggctggtagtttgggatgctataagaaaccaagctgagcagcaagccaggggaagtaatccagtaagcagcatccctccatggcctctgcatcagctccagcctccaagttcctgccctctgtgaggtcctgtcctgacctttggtgatgaacagcaatgtggaagtgtaagctgaataaaccctttctgcctcagtttgctcttggtcatgatgttttgtgcaggaatacaaaccctgactaagacaccattcttgaaagggcggaaggagttaaagggctttgaacattttggggacttgggtttatgttctgttctcatgtaattagttgatcagtttttggttttgtttcctttgtttccaaacttcccaggaagtttacaactgagaaagcaggattagggtgtacccaagtcagaaggaattgtgtcttctgaaacacccaccagggcttgctttgacccttttcatttcccgagtaagcagaaactccgcttagcccttgctcatagtatgatgtagctgcacctccatttctttccaaagaacgacccgtggcctctctccactgccccgtgcttgtccacgggatgagaatcacatttatgaagaataaagtgagagctttggagcttcattcgctgaagagcttcctactctgtgaggacactggacactaggacaatgtctctactataatgtgttgctagtgtgttagattatactggatggccactagataaggctgttcactgctggagatgacaggtgccactcagaattggcctgatgggacagaatcctccttctgcctgtaatggcactatctcaaccaggttgggagtttgttgttgttgttgtaatttttaagtagaaaggccttccagtaaaattaaatattaaacaacacacgtaaatgtttaaaagtagtggtttgtcatagtttataaatggaaatttaacaatatttataaacttatcagtgaggccaactcacagatcttagatcagggctcctgggtgacagcagccatagaacaatgacaaccagtgtaaactgtctgacttatttctctactccatttggttgtacaacttttggggattcatcagttacatacataagcaattttgcagtaacaattgacaattgctaatcccattttcttcgtaaagttttgaattaagctggtcttgaaggttcacacaaagaaaactctgtttctccattgaattcctaataatgcagctgctcacaggtttcatggtagacagagcagagagacaggagcacctaaaacgtagaacccatgccagcccatgatgtcacttcatcgtgattcaactggcaggccgttctctgttatacaactggtccctgggtgctgggagcatttgtgccaaccagttgtacctgcttctggcatggtatttgtttgagagtgatgtgtatgtaggtcgttggtacaattttatatgaatgaacatgcgcaggcttgagcgcaccaaaagggaaaaaaaaatcctaaggcagagtaaactctcctagttagtgactcatatctaagttcaaatttactagaggtgggaagaaacacgttcgtccagtatctgcacatgaagcaacatcatacagatgtggtcatcagcgtgtcttttgtgcattcacatttccgatcatctgtcatattgaaaggttaagaggtggtagaacaaacagaaactttatatagtcgcctgttttgataatcactccatggagcatagatttcactgggggattcaaactcatcacagctttattcgttaaagctacaaccgtctgcatatggctcctgtcctcttcagccagctgactggcattgcacagagggtgttgccactagactcacccgccacccaccatccacctaccctgaggaagtgccttctgtctgtagaactgagaaaatcaaaactcactgtggctcaggactttaccccattgaacactcaatttcataatgtttccttcttaatttgacatctacgacattctaagttgtaataaacccagtgttggcaggcccaagacattgctatctggttcttgcatctagggaatagtgtactcgtggctttattctctcttcacctttaacttcgtatctatttctgtctggtgttgctgcacatatatttgccaaaagccttgaccttttgaggggaagaagtgtacgtaaatatttcccatgctctctgactacttgttctaaggttgtagtatgaggaacgtgggttgatcatcatcttttgtcagtctgtatagcagtcattagtcttatcagagtggctcccttgggaatactggtgctatttctagaatctgatggcttacctctggaaaggagatctgatcccttctcttaagggtccttcaaagaaaggagaagatgcttaacagttccctgaattgtcagcaatcattaaaatcagcaaatgctcaaaactgactcacagcagcccataacttgacatcttcaatgtaagaaaggtgtgtgtgtgtgtgtgtgtgtgtgtgtgtgtgtgtgtgtgtgtgtgtgcgtgcgcgcgcactagtttgtgtgtatggtgtgtgattttacttattctcacttggcctcactccattgcctttcttcttaatattgaaggcaggaaacaacccagctgggacatatgttttagctgcacgtttatttcgctcgtattttagttacctttttaaaaaaagtaacaattgtactgagcaggggagcacacagttgggaggcagaggtaactggatctctgcattcaagggcagctggtctacctagtgagttatattctaaccagagccacacagtagggtcctatctcaattttttttaatttaaaaaataagtaaatacaattccagtttagagttcttggttctagcgtgtggattgcttatgggctggcattcctcttctggacgtagctcatcccgcacatgctaaggaggtcacgattgcctttctgttgggtgtccgctgtagcagtgcagcctttcctggcctacagagacatcgtggtaaatcatctgagttctccaggactgtttatgcttctccacagagctcttgcccttgagtctttccactgatgtgatggtttgccgactttgctactcttagactcaggactgctgggctgctgcatgggccccaccagtaagcctcgtccagagtagagttttagaagaacaaggtgacgtttctctgggcacattagcggccgtcccctctgcacaggtgtagctgatcacttataaacaaccccagcagtgcagtcttaggcatgctggggccacagggtcacagttggagacttgtcccaggctgagcatgtctttgcatgtttttataccgagctgagtcataagaataaacatctctgggcatgagcctgaaagctctgaatcccactgctgtccacatctgcacaaaatgtacaggtcggccctggttctgaatgctgttccgacaaagagccttggcatgcttcttgtggctttttccaccccttttgtttttccactgagacagtcacagatatcaatatggctatagaccccgcctgctctttgccctttccccatgagttttcactatcccgtgccagcaacagagaactccttagtgtttatccacacaccagacttctttttgcctggcccctgactccctttttctgcttgttaagactctgcttgtgtcactgactaagcatcctgccttagccaccctgtacagagactaagctgcctccagctatgcttggccttcagagtctcttgtcctggtaccactcacttgtcaggacacctcgaccctctaatactgtgctgtgcaaaggccgagtcaggggtagatagttaagtcagtatccgactgcaagcagaagtataatctccagaactcacatgaaaaatgcctggcatggccatgcccttccagtcacggtgccaggaggtggagccgggtggatccttaggacttgctggctatccggtctggcctaactgaaaggccccatctcaaaggaggtggatgctgttcctaagaaggacactcaacgttgtcctccagcttacacacatgtgcaggtttgtacacatgtacacccacagacattgagcacatacatgcataagattaagaatcacattatatacaatttgctggctatgcatacatacatgcaaatatcagtaaatagtttttaattaagaaataaaatgcctctgtatatatcaccaagaaaattggggtgttgagtgtagagcccagattatatagaattgttatcttgatgaccaagtagaatcagttaactcccctcccttgctaagctgctgtgagggaatgtggatcactcagtgttgggaaaggccgtggtgaaggaaatgatacaaatttttctccctcatcctgtttttctcatctgtttactgttatcttgttaggtatgtttctgtagcatcatccactttttgtgagaaggctagccaccgtaactgaatagattaaagaatgacgaataaaccagctgcatgctctacactggtgatatcgccaaacagagccaggggtcagagccagtggccacatgctagcacctgtgccttctccagtggagctgctaatacgtgaatgaggacactcttcctgcttggcctcagattccctccctactcacaggaccacaagtaactcaccacacccagcatgccagttacaagttctcagaactcccagcagatttacttctggctctggtccaaagcaaggagaaagaaaaggccactctgtttctacagaactagagccttgactaatttcagggtttcttttttttttttttttttttttttggtttgtttggtggtggtggtggtggttggtggtggtgtgtgtgtgtgtgtgtgtgtgtgtgtgtacttaaatgtactcaaatgcatgtttgggttttttgtttgggctgttattattattgttattattaaagcccctgtacaaaacagtaatcccaagtaattattagctgagctatcttccattatcatcaagaaatacatgcttctaattaatctggctttctttttttgttgtttgttttttgtttgtttgtttgtttgtttgtttgttttgagacagggtttctctgtgtagccctggctgtcctggaattcactctatagaccaggctggccttgaactcagaaatttgcatgcctctgcctctcgagactatgtacatgcataggcatactcacattcatgtggttatatgcctgtgtcacatgtatatgtacacattggcatacatacaagcttatgtgtttgaatataagatagaggcatgcagtgcagtctagttttaggtcatgttgacacaagcgagagttatctgaaaggggagaacctcaattgagaaaattttctccaattagaaaatatcagcttacggtatttgcttaattattgattggagaaaggcagagcccattgtgggtggggccatgcctgggttggtggtcctggttctataaggaagcagactgggcaagctagtaaacagcaccttttcatggcctctgcatcaggttcctgtccttttgagtccttgtcccgacttccttcagagatggagtccacacacactgctgtacaagtgtaagccaaataaactggtttctctccaacctgattttggacctggtgtttcatgacagcaatagagaattctaactagagcacatacaatttttatttctgtaaataaagtaatgagacgcatcaattaaaaatatttttgtttctcttgttaagagagtattttaagtggcttggctttctgaaataccttacagacaacatcaatgcatgcaatctgtgttattaacaaaatgttaggcagcataggttattttacgatagtctcctttctctctgcattgtaagagcagtaaatagaaaaaatgatctttaattaaataacaataataaaaccattgttttaagtaatagcattagagctaattactataccagccattattctcttctcaaagggtcaaaactcagatatagtcaatcttttctctccccnnnnnnnnnnnnnnnnnnnntccccctctctcttccctccccctcccccctcttctgtccccccttctctctctcttcctgcaatggaaagcatctgattatttttacagcttattttagcctctttctcagccatgagctttaaattaagattgaaataatgaatgtgaaagggatttacaaagtataaacatggcatccaaacaggatcagagggtatcccagcctctctggtatgcagttgggttagatgaattagccgcacaatgcaacaaaaatctctccaattagaaatgtaattcagccgggcgtggtggtgtatgcctttaatcccagcactcgggaggcagaggcaggcggatttctgagttcgaggccagcctggtctacaaagtgagttccagacagccagggctacacagagaaaccctgtctcgaaacaaacaaacaaacaaacaaacaaaccaaacaaacaaaaaaatgtaattcatgtgatgtatatgagagaatgctttcatatgattttttttagattggtaaaattacatctggaaactacacatgataagtagacattgttgtatagacgtagaagttggttttatccatagcgccccaggttgacgctactgtcttagtcttgctactgtcttgtgttccccactcttctgcttagagtgattttctagtttcacagtctcacttgatcttcctatcaatgaagagcattattgtggtgatgctcttgcatccctggataacacatggatgttagctacacaggcataaaaataaggtcaaaacagcacctcagtaaagaagcgtagcgcgctgttatgaccatgagtacttgttctataaaagcatctgtgtagaccttgtgtttggacaaggttggatttactttggtttgctgtgtggtttgaagtaccttgtaagcaaagacgttggggatttccacgaaagttaagccttatgaattaaacccacagagataatagaatattgctctcatactctaaatgattaattgctggacgctggaaaggaaaagatagctgttgtctcacttctgcattgatactaaagacagtcttactcctttagttcagtcattcctggtttctctggtactcttttttcttccttctgtagcctagactggcctcagaatcactgagcacctaaaggtgaccttgaacttctgatcctcttgcctcccgttaagtacagaaagtaaaggcatgtgtcatcacgccccctttatgaggtggtgggcttgacctggggcatcctacatgttaggcatgcggtttgccagctgttgctacatactagcccggatactcaatgtaaaacacaaaggactgctctctggcagtgcttttttgaggggtagagtggtgggcttgattgtatttaggtttctttggtttgttttgctgatagcaaagggatttcttttcatgtatttataggaaacaatttcattttgtcatatttttttcagtattttgttttaaattttcatttaaattcatatttgtttttaaagtatataatattcacattatgtttaagtttacttaagtaacctaaatgaacaaatagtgttggttttggtgtttttgtttgtttttgaaggtggcttaatttaagagattttgtttggaatcctgtactgttcaagagatttagttactgggtcaaacaggagcactggtttctccgctacagctcttttcttgctttgagttcttttcataatccacacttcgaagagtagcttaaaaccaatggcagatccggtcatgatgggagtcataagactgagcatgcagccccgagcttggtggcagtgtccaccccattcccatgttggcgaggcatccttttaaagcatgtgcagaacggaggtgagcggctttcccatcagcagctcaggtcagcccaggccgactgcatgtgaaggccattaggttattttctgtggtggttgtgtatgtgctcagactcatgtttcctatagttctgataaatgaaatgcccaccttgcgaaaccagtaaagtgttactaccactgtgaaagaatgaccaggctacttaggctcgcatgcaacaccaggcaggcttactggctgcagcccacctaatctgtgtcatactgggaactgaatatgcttaggcatacatctggactagtgtgctcgtgtgaaggagtagaattgtgatggtggatagcattgtagcctgtctctgctaagaactgaaaagaaccaaatacaatgagatgaagactgagactgtatggaacccctgaccatgggtggggtggtacaggtacctctgtctattccacgaataagtaaaagacagagcatacgatttgaagttagcttagaagcagagtacttgattgtaagccttgggttggccagctacttccaagggttagatagaaatgaacccagagcaacatgctaagcatttaagcttcttaaatgtgcgtgagattgtgttacatggcatatgaatcaatatcccttacctcaagactcttaattttcttagaagtcagtggtttcagttccccttagaggaacttgtcacagtcctgagacactagcaccctgccttatgggctaacgcttcctgacctgaaatgctgacaactcagttttcctccacctcctgtgtttccagctgctttccatacaacagtaagccatggtgtggaaatgtctgccaggcccttgtctttgagctgatgccctccgatatctgtctgtctgataggactcagagcctgactgtcctatacaggttgttcagcttagcatcgggcacttcacaagagataggaacaaggttctcatgtcatcgccttctaaaattaccacgtgactttgagcaaattttcaggaggctcgctctccatgtttgtaagatgggggaaaatgctctaaaatgttctaatttatatgtatatgtcctcattgccgtatagaccgctaacctcatgacacacatagctggatgtttctgtaaaaactattgatgcccttttactttaagaaatcataacagatcacctgtctggtctgatttaagcatctaactattcaagcattatgcaaaaaagatgatgctatttatattggtactaggttcagccggcagagaaagagtccaattggaatctcataaatgctataagtatagataacaaaataagattaaaatggtatttaaacagagaggcataatatggaagtatatcaataaaagacttactatatgaaagcttatccaagaagcttgtatttaggccattgtacctgacgttgacccaattaccttgtaatattgaattttcttttctgtgcttctggctggcatctacactgattgctgacatagtaggcactgagtaggtatcaaatgatttacttcagaaatgttttaccatttcaatatatttcccccaaactaaaatttgatgttgtcccttgaagttgtttgcatttttgtggaaaaccttggtgtctccatgtattagagtcagagactaaagtgttcatcagaaacatcatagaatctgggagggcctgaggaaatgtggctcttgccttctgcctttggctagggccaatctggaagaattcagaaagctcagtctaagatgacagttcctgcaggataaactgccttcttcagcggagacacctgtgtcccggtgcctacttagccattcgcctgtttttatgttgctagctgctgtaggacagtgagataattagtggataattaatagttttgtgattgaaataccacaaactgaatcattgatttcacattggcttttttaaaaatataatgctcaaaatgtttaaaaattactaaagcccaagtcatttttagttccaacatgtttgaattcctaattaactacttttatcaaagtttatcatgaagcaatcaaagatgatcagtagtgtccccagaagatacggatgcagatctgactcttaggtgataggatagaagatcatatatgcaattttaaaacatgtattgccaggccctgtgatgttgttttaaacatcagcctaatttctccgaaggtcagtttcttgtaactcatgttccagcgctttggaaaatataccatataatctgctgaactaataacacatgaaaagacacattgtggtctcactttctagatgaattatttttaggttttagtaaggggttttctgtgatcactctgctaatggcagagcaagtattacccaatagtacttaacagtcacatgccctacaagaggctcccatcattctcactcccgttttctccatgtgacaatcaagttttaccccaggtgactcaagtcagaggtcagagctcccgcatcatagccccttgattaactgtgtgggtcctggtaccactgttcttattagaatcagtagtctagtgcacttcacagcagaacttgagggcccatcactctgtttccagttccagaagcaggcgtaagacagagctatggctctcgtttggctacgactacaaaatgtggtcccatgcttccaaagccagttttccctttcattgtaaatttaacctttcctccctctgtaataacattcggagaattcgggagatgcagagcaactgtttgagaaggtcctttgatgggcacactgatttttactttaggaatgttcactggaaatctgattctgtacagaaaggaattctggaaccaaccgtaccccctctgaataatttgaagtggacatttttttcacccaacagtcagtatgcttcctggtaaggcttggtgttggggtttggtcccaaaggaagtatttagattgggttccaaactatagagaaattagtatggattctactgcttcatgaaccacgttaagttttcagaaaactgaaatactcgtaaggatgttagtgcatatgtagattcctttaagaccttggggtaaaagctcacctaagtcttagagaaatgactgaatactatgaagtagatcccacggaccccttagtcatatgtaattcctgaagtcacggcccttgttgcagaagcttaagtacgtcctcggccttctcccctttgtaaaatgttctcttttgctcttgaccataaacttgctcttataaaattgtgaacttactagttttcctggagtcgggagagtgtgagtaggtgggtgtgaatatactgtttcccctgcacttgagagtgaacaggagttaaaggccagtgtgggccacagagtgaggtgtggttttaacatacatatgtataaggagatagagaaagaataattttatcagagtagaactatgaatacatatgtatttttttacttaatagtaaaatatagtatagtcagacttttttttttcatgccataaattgtccttcaaacccctacagtaattttgagtggccactacagacttagcagtgatttctacacactcaagttatttccaacttttaattataaacacatgatgctctagcagatgtttctccctgatctcagccctgcagccacatcctcctctatgggcattcactgctcctgcagcgtgggaaggggtccaggcccagcccaaccacccccaaactgaagctgattcctagggccagctgcagagaggcaggacgtgctcaaagggtcaaggaaactctgtcttccctatggggcagggagttaagagtctacaaagcagaattgaagagaggaagcaaaagtcccattaaactgccacaaaaagagacatgctaattagatattacctgaggatactcgccttgttcttagggacagacatctcaaaaggactgtgcctaattagggaggagtggggcatttgagctgtgctattctgttgtaaattgaaccagcaaggcttatactaaaatggccatagaattttatccccaaatttggtttcccttttagtttgcatccactattttggatgtaaaaatatttggcgtggatacgtcattgtaaagcagtatctaaggttagatttttgcttctaatctagtcatgtgtttttacaactacgttacttaatgtagctttctgatgatactgaaggaattcaagagttcaggtcaaactctcccactggtaagtttcataagcttggcctgtcattgccaaagtcattggtctgtccagcattgaccagatagtctcattccatagtccccatgctagatcttaaaatatattaatactgcttgtgaaatcgggagactaggttctctttgtatgatacacacaaacacacacacacacacacacacacacttcaacactgtactcaggacctaaaagctgtgttttctttctctgcagtgtgcccatgtctcactctcctgcattgggattttggttataaccttgctagagtgcacctgccccagctgtgctctggccactgctggtgccgcacgtgcttcagcctcctgagggcaccatcctctcctcctttcccctcatgtcagtggtcagccactgttaccatgggactcctaagataactgagaccagagtgtggaacccctgagtgcttggagaaaattcttccctctaatattttaatggcttgtctaccatgagaacctgagctcggtgttgatccttgtaaaagctgccagtgggtgtgtacagaatcagatgtgcgttcaaatgattgtctcactgttttaaaatattctgaccaatattctttaaatagcattgttctagtggtaaattatagcaaaggacatgggatgttcttttactttgttctcaaaagcaatatatgtttgtgagaaattagaaaaatataaggaggaagttggaaaaccagaagtagtccagttattaatgaactagcccctcttctgctggttgatagtaaagatgtgtgtatttagtcaagagacgctaaaccactggagctgtgtaggacagcgcgccacatttccctgtaaatctctctgttcctatctatgagtgaggatgactgacaaagggagggacatggtctgctcctcagccctctgagtattgtgcaggttcagtgccctggtgatgatccagacaacattagtgtgaaaatatgtacacacacatacacacacacatacatacaccaacttaaaatatatttctctgtaacaatacaatctgataaactaaaagctcacctaactttcaaaaactataccttattataatttacttcaatcacaaaagctattgtatatacgtgaatataggacactgtctaaaaagttgtatctcttgtatatatttaaaatgaatggccactgggcttctacatattcattttgctaatttggatccttgtctgagaacctttttgaaaagacaccccacagtgtacaataaatacactattgtgtcccagatcctggaattgtagcagaaactaatttacagatgctgttcccagaacttgtagttcaccccaagtggctttaaagtagcaacacagcttcgatgtgtttgttttcagctacatcaaaagcacaagaagaattagcatctgaaatcttattatcaagagaggtagagcttgaagtatttatttttcccaggaatttcttactgaacaatattaaaataacttggtcatcagtttataattgatatatcaatttataattataagaagaaacaagatgtgtcacaggtcatagagggcagggagatgaaaactgacctggacagctacagcctgtacaagccagcatcttggcttttccttgaaccattttccatctaggttgtgaggaaaggagtgtatagcctgggcaaatcctggctatctgcacagttgggtgaggctggctcagcatgctgattttgctgtctggcctctgtagttctcggttgataaagtggagattgtagtgactgctgtgaagattacatggggtgacttgtgtaaagtttctagatagtgcccgtcaagcacacacaggggatataatataacaaaggctgtttaattccctctcctcttctgacagtgagtgctcatcaagttatcttacatagtgacccttccatctctgccttacagccatggctttcctttccagcttaactctttttaagataaataataataataataataataataataatagtaactcagctgccatgtattaagcacctgtcatttaaaaggcattgtgttgaatacttgattaaaaattttaaacagtgcatatgacatagttcctattcctaacaagattaaaatatatttgagaggaaaggggggaagttaagtagatagatggaagggagggagggagggagggagggagggagnnnnnnnnnnnnnnnnnnnnggagggagggagggagggagcctccaatggatgagttaggattcttgcttttctgatatgcagaaataccagatttgtttgagaagatgagtttgattgcattttcatttagaccatatttagatagctgattataatagaactttctagtatcaagcagagaaagttgagtggtctgttctatattttatttctacgttctgttacagtcgttatagtaacaggagaattcaaagtcacatgatccacaagctccaactcccccagttggctcatcctgtcgtgcctctcttggaatcttttatgtgcttcagaagtgctttttaaaaagtgctctttaattcatgacatacctacagtaagaactacccgaagaacataagatagtaccaaactcctccctttcactgtgatttatacatagtaccaagctactagctgccatagtaaaaaaaaaaaaaaaaaaaaaaaaaaaaaaaaagatttaggcagaaaagaggcaccagcccaataaacaaacaaacaaacaaacaaaaaacatgtggatctgcacagttaacagcagccagcacccacatgtggctcttcattgtgggaatgaggccagtccaagtagagatgccttggtaagacacacaccagatctcaaatgcttgtgggtaccctgctcactgctattttatattaattacaggttgcaatgaggatattttggatatattgggttacagaaacaattattaaaattaacttatatttttattattttaaatgtgggtactaggaaattttaaattatatacatggttgcatttgtggctccttttctgttagagagcagtggtctaagtttgtaaggagtatgtatggtttcttcactgaatctcaggggtttcattttttgtttcttccttagtgtctgctgtctctgcactgagccaaggacatagagtgtcaccagtgacgcgttcctttcattcattggctgttctgtgggttacttcgtattagatccttggcagtgtttccacatacgttctttgcagcagtcgcttgttcatatttgtaatgcttttgctgcagttggcagttgacctctgaaggtggccctgggacttgcagcagcatcatacggccatttggccatttgcctagagagtttttttcttttctttttgtagttagtgcatctttgccaattggctaagtggtatgttgtctctgtttcaaaggaaaactcaactaaattttatcctgtgacaggagctgctgctctatgtaaggaactggaagggcgtagcttgttctaattcacttgtactcgttgtagaaatacatcagactcagtaatcatcccgagctttattcctaagaaataataatttaaaattcatagagtcctcccagggtgaatcttgtgggagccaatccatagatatgacctagaaactacatcacatgtagctttagaggcacataatgacagtcctgggggaaagagtccctctcaactgggaagtttttaattggcatggctacttgggatatagttacatcaggattgcacatccaattagccaagagtttccaaaaatcttccctgtactttctgaagttgagaagaacgcatggaaaagaaccctgagcacagtctagcgcacctttgtgtttagcaagagtaatggaagtggataccaagaaagtgatggtcgctgtggtctctagcatgccagtgtttgtctcacagccacttgaacaaccccccttggaacttcctggcctataattttcatctctgggttgtctctggctggctgtgtctccatgacagtaccagcagcccgggcgtcagtagacagcttagatgctcccagaccctggtttgctgctttccttctcctgagtagcatttgatcagctgaaaattatcacaccttggcatttccaaaagatggttcattactttcataataaactgcatttaaggaaatactcccccgnnnnnnnnnnnnnnnnnnnnnnnnnnnnnnnnnnnnnnnnnnnnnnnnnnnnnnnnnnnnnnnnnnnnnnnnnnnnnnnnnnnnnnnnnnnnnnnnnnnnnnnnnnnnnnnnnnnnnnnnnnnntccccctccctctctctctccctctgccttttcaagcaataggtagcacagtcagataaccatttagcctgagtaattgtgtccccactgtgcttatagctataaataatacctcctctcagattgtaaaactagtcctccttaccgtgttgtgaagtcttggtggaatagtttttaataactcatcattttgctcttgttacatggtgagctaaaggatcttagccatttttttttctaggataaataaatatctttcttccctccatttcaataaaaaatcttaggtatatattatatagcattcagtgtttcacttaaagactattattgaggtggtctcctctgccccccataatctcttcaagtccctacttgtttttatatgaatttaaacgtcataccctggatgggtgtgactaaaggattagatgttagctttcgtgttccctgaaggggagagggttaacatgttgcatgctttcctcagctggcacttttcttagctagagtcccgtctcaggcctagtaatagtctgttctgttttggctaaccatttccttaacacacattgccactcaagtttggcagctaagtaaactccagaaggagccttacacaaaaccattctttctactgcagacttacgaaatgatacggtttccctgcctggcgtgtttccgctgcagggaagtggaaagatgcgtgcggtgtgttggtatgtttccctgcgcagttctcggcttcctttggagcacaggactagcgctgtgcctgctttgctggctgccaaaggttccacaagattgcatgtggaaaccctcccagggttgactgtggagagctaactcagagctcatcgcagcagcacttggcatagcttttcctgactcttaacgctaaatgctcacatattccttacaaattcagcacaaatacaaatcccacattgtccaccagtttcatcaatgttctgtcgtggcaccccttgtagagtgttgtatcagagaaatagaatagaaccctctggtactgtagatggatactctacagttagtaacacagtatgtcctcatttaaaaaaaaaccaaactgttcctagaattgagttctcaaattgatcatcatggaatgatgtacaggcgtgggcatcttgggacacgacacatggctctaggttcgtctttcagacaaatcacgcatctgctctctttcctgttcaggcaggaaagtcctgtagcttcatctctctgaagcgcttgctggttttcgaaagcctaggttgtcacttaataccttccgagttcctgtcaaaagttgtttccgattcttctgttcttcagggtgtcttgtgttttatgcccagccactaggaggagaaagtttgatatttcattgagtgaacctgaaaatgcttattctcgtcaccctgccctgctgcttctgtgacgaacccggggtttgaggagggttgggagtcggttctaggcattgagctgcggtttaaggctgttctctgccttctttctgaatccaggtgttttgagaggaagcacacaggacttgaagcgattaatgagcccagtgtagacctgcctgggtgttaaggggggcaattatcacctttttggatgtggtttggagcaggcactgacctgttggaaggtctcaggctggcctggtgggcctggtcaggtgaaagaaagcagtgttttgataagctgagctcccaaccaccaagtagtaaggaagatacttgatttttgtctaggactgtattttgtattctactgcagttctaagacaaatgccatattccttataggagagagttgtggtatcatgattagaatgaagattatatgtaatttgtattatccaaatgagcagaaagccagcccaccttggggctgtggagatggctcaggggtgctagggaaatcaagtgcttgccttgcaagcttaaggacctgaatttggtccccagtacatatgtgaagatgcaaggatgtagcaatgcccttgtaatgccattgcctcagagacaagtataggaggagccctgaagctcagtggtcagccagtctagcctaattggtgagttcaaggccagtgtgtgaccttgtctctaagaacatgttcctgaaggtgacaccgaggttgttctccaacctccactgcacacttatccacacacacgaacatgtatacacagacatgtatatctacacaaaaacatgtatacacacagacacaactttcaaaacgaaagtctacctaccatagttgactctcaattacaccattacccagcagtatctggggttgggtctacaaacagtagtttcacctccatctgaattgtttcgtagccagtcccctccagagaaggcacacttgaactttaaagggcaagtagtttacacttgaaaataactgttagtgtgtgtgtgtgtgtgtgtgtgtgtgtatatacgtatatatatatatatatatatatatatatatatatatatgcgtgcatacagtgtctgtatagctgtcctgtgtgacagtcttactgtgttcattgatgtcattccccattcatatgatgtcatgctttcaaatttccttgtaacactagtatttcggatgtcttttgagtagtagtcattccaggttctaaggatccatgaaatacttctctcacatttaagacacattttactttaatttaaattgtctttcactctagttgtgtgtgtgtgtgtgtgtgtgtgtgagtgagtgattgagttggaatgtgtacacacttacaccatgactcatcagcagacaacttcttgggatcaattcttgcctgtcacccttctgtgggttccaggaatcatactcttcttcatcaggctgcaggcagggccagcctccttcacctactgagctgtcttgctgggctcagtcttttaagcataaagtttaaacaaagcagctaaggaagcaggaagccaaggagctgcctctctgctgcctcagcagggtggagacaggaagtgtgtggagacaccattgctgacccaccccagcctggcctgcagggacagggaagtgtcaagccttcctggctgctgcctggattctcacatgtgaattcttttgtttatggtctgctcagttcatagactattctacagaactttactgagtttttttgttttgttttgttttaatttaaaggtaagaattacacaaatcccatcaagtgtgcttttttaaagttattttgagcttccttttccccttggttatctatagaaataacccttgttgttactgacatgaatcctgttgattactcttggtccacttgcaaagcaagagtgcccagctcctgctctccaacacagaatagttttaggcttttatttttttttaactttttttttatttaactattagtaaggtaaacaaaactagggctttttggatagtttttcaggtagagttaaagtttttttgtgatgttagaaaagaatccgaggccggccggtgtgaacgttcaaggatgaaaagccagaatcacagaataaatttagctcttgggaaatttcttacacttacttttttggtcaccactggtgccctgcagtgaccatgtaacccctcttaagtcagtttgtaaagaaccttacccaggcagtctcgtagcgcatcctcagagctctgccaacacattccccactgcttcccatggaaaacggcctgcctacagtctcctctcccgggtcagtacctgcaaggccttcatctgtggcttcctctaggataaggctctagaccatggtacgcgatgcttactcccttcaagtgctgtggctcatgctatgagaatgcaagtctcatggaggaatggcgttatggcagaacagctctcagctctagtggcaggagcagaaggctgctccctgacagcctagcaggccaggaagcagagagtagatatgaagtaggccagactacaggatgtaaaggtcaccctactgactcacttcctccagagggcctttgctccctgaaggttcttcaacctcctgtaagagcaccaccagctggggtccaagtctttaaacacagagcccaaggagggcatttcacattgaaaccacagccaggttagtggcagtgttcagaataattctattcagacaggaagcacttcatcaacacaggctgtgggtacttctccacgattttcttctgactgttgagactctctgtgtgtgcagacgtaaacaaagggtcaaagggtgcaagtctaggacagagccgtgcagggagcacagtggagctgagaatgctgctttctgtgcgcacgatgcagaggcagcgcgtagctcatctgcaaaggtcaggaggagtttgccgtggggaagcgctggtaagcggcagagtgataggacggttaccatgggaggtattgtcttacagagcagagaatgaagattgagcagaacaggttcaaaggcctataaagaaatacaccatggagctaaagctttatttctctgtttagctgccataaccaagcaccacaaagctgggaagcttagaacaagtgtccatgagcctgcagttctggaagacagaaggctaagtttgacaggtcgggggcaccatgtctaggagaagcctcccttgtcacttcctagctgtggcttgtggagattggtggcttctctcggtactgccagccggagcagcaccccattctctgcaggaccacatggactaccccttgttcttatgcaacaggttctctctgagaaaggtgccagtcatactgacgaaagactaaaggcaggggtgggaggacggccacgtgaccttgattacatctgcaaagggagccctctttcaaaagaaggcagagggcttaggactttgacatagcctttggtgctgacatcattccactaataactatgtagggaggaacactgaacaagaaggccaagagcataatttacttttataaccagggtccctgcagcataaattttagttatttggagaacttggcatacccctatcagaaaacccacggttgttttgtgtacgtgagccaaaccatttttagttgtgttttgccactttagaacttagggatggattatttttacctattaagtgttactgggccatcattagccaagtattaatcacagtttgtcaaagtcattaactacactgtcccaactagctctaggacattgatatttctgatgatatgcgaccgaccagtcacttgatgtaggctgtaagttttgggtttttaatatgctggctaagggctgggctttcaggatggccactctgcacgttgctctatgctaactgaacactagtttgatgagttattcacttatccaaaccaaattgcatctttcctgatctcatgtgtctaacaagcaaaacaaaacaaaaaaattttttttaatttggcacagataaagcagccctttctttctccccacttccccagatagagtgaacatttactgcacatggctgcgtggttggctattaaggaatccactggttgtgtgagtcttctaggaagacatgaacaaatgtgtatttaaccaagagagaccacagatgacacaccaaggaaccgttggctttacagaggccagtttgggtggggagacattggcatgttgctcctggggctcaggagcaatttgcaggccactccactatggcgtctcctcacttcctgcagagctttctgcctgcacactttgtgggatggcctggtgagtgtcctgtttccctagcttcctgagtccatggaggggcctcctccctccaggaaggagtcttcccatttggaggacacagtcccacacactggtatttggtctttccccaagacacgctagtttttctcttctcgggctgctccagatcttggctttctgtcagctttcatttcccagcttctaatttctaacatctttctaacatcttggggatttttttttctttcaaagaatagcattttgcaatccatgattacctgtcctgtttcgcaagatttcgcaaaacaactgagactggaggaaatttcttactgcctgagccatatagtagataagcatttaacacaccatggctacccacagccctctctgttccaaagtgtaaccagaacaccttccagaaaatccagtgactctgagttacagtgagtgaagcgtggccccttcatttaggatgtggcaattgagcgaaactgacatgaagtcattttgcagcatttgctccgcttcagctgcattccttcagacagagatcatttctccccgcctttctcctggagcaaggttctgagcccttgcgtctctccccctgtgcctttagagtgcttggctcatctttatctgcaatatctaaggacagtgtggttcagggacaaacctgtggggaatcaatatgggagcctcatttagccctcccccccccctcagctctgctcttggagctgcaactactgttacaagtgaccttttgagctaaataaatttaaagatgtcaagctgctggctgctgttcccttatgtacatggaccaagtgcgcccttcactgagaggtatttataccatacttccaagtgtgtcagaagtgaagtgaggaagatgggtggatggatggatggatggatagatagataggtagataggtagataatagatagatagatagatagatagatagatagatagatagatagatagataggtagatctgtttctctcaccagtctcttctctgcctgacttcctgggattgtgggacagtggagaatctctgtcctacaaaaggatggagtgtgtttggtagtcagtatattgatgccatattttgtatcacagctgactagtataagtccaaaaatgtccagtttgatgcctgtattttagcttgtgactggatcaagagaaacgttgaggtaattttgcattttgttccaactgttgtggaaaacacatttgctttagccctctatcattctgtcctggtttaaatgaagtaatcacgtatggctttcagtgctgaacttgtacacattcagtgtctaatgtctccggggcgtgtgtgtgtgtgtgtgtgtgtgtgtgtgtgtgtgtgtctgggtatctgtgtgtcttaaggttttctggtttgctttattttaagttcaacatatgtatagctgtttgaaaaataatcacctgagcttctcccatgccacaactatgtaattgtctttttgttactaatcttttattccacgttacacttctaaattgctttccttcctatgtttccttaaaggatacaattgtctaccagtatctgttttccaagacaatatgtaatatttcttttctatttctgccagtcccttcccccttttttttcctttcaccaaagtctttcattaagggaagattatgttacctgtttatgttttatgtactcgacccatatgcacgagtatttatatgtgatatgcaaagaaaactgtgctaaaaagtaacaaaaaggagtgggtctgttcttcctcaatgttttgcaatatagggccacaccacattaatattctgattttaaaaagtagtccgggttgctgtcactggattccatatttggagtcggggtagaggacaagccatgatggaccaatctgtatcgtcttctgtgatgtaggtattttgggcagttctatagctgaggataccaagaatgtcatagagctgctcgttgactatactagaacttgaggccatatctgcaaagttgtaactctttgccttctgtctcttataaccaagttttccttatggtagatcattacaaaaggtgaggttatcaaggcagcaaaagaaatacattatatattgtggtgagaggaaaacagattaaaagatagtcatgatggtttcatcaatccagagaaaaaggctactttctagccgagcagtggtagtgcatccctttaatcccagcactcaggagacatcggcaggtggatctctaagttcaaggccagcctggtctacagagcaagttcctggacagacaagactactcacagagaaaaaccaaaccaaaccaaaccaaattccaactaccttctaagtcaagttgtctttgctctaggacttacatgctactcagtgaatgagactttgagatcagttcagtgacatacactttaaaacacccctggctctgtttccagcatacgttatttccctctaacatagtagtgttgggcaacactgatttggctcccacgcatctatgactgtaccctgaagagctgcaggacagtcgtttgtgaaatggtgttaggttgtgcgtgaacactggtgtgctgtgtgctcttgagaagctacctcagcttgcttgccagtttggaaagaattggttctaaactgtaatcaatcataaacccatgcaataagtcaaagtctctgtagtgcttttgtttagaagagacgctctacatttttcacagaccatatgccccacccacccaatgggcatctttgctatttttagcgagataatttaatgttcactttctgtgtgctttttatttctagccaactgtggtaggaacagtagtgggtttcttcaggaaagttgatgagcatagtcttaaggttagtgagaaggtttatcatttctagaatctcgaagggaattgccgattttatttgagtttgaagggtggattaaccttttgaagaagcagcatggcgctttgtaccagagcctccgtgatattgtcccatcagctcacctgctgcaagacagctgggctagctgcccctgagagagaacatgtgacaaggagctgggttctgctacatatcccagcctgcagactcggctaaagtcattgacctccctagttcagaaacgtgaacttgaaggtctcctttctctgtcttctgcattcccgagcaagctgctggctctccataacagacacctgggactgcttctctcagaagtttaattgagcatttaaggctccttcagagaagccatttgtcttaaatctctgctggcctctggaaagcccggctctcatcagtcatccatactaatttttaagcttacagcaaagttaaattaaaaggcatatctctccttgctaatcctaggcatcaactttttcatgaatcctgctaataaaaatcttgctttttgccgtttcattctacagttgttttgacaaaatcgccagccaagagtgttccctttctctggaaggcaggcgactccaggcccttcccactcttgatttctgtcgttctcacataggtttgcatgaaaacatctgctggtcgtggctcttcgtagcctgcttgggtttctgtgctccccaaaggctgccttgttccacttgacactcactctgtatttatgccttctttgttcaggattctgcacacaggatttttatttagtactaaggtgagtttatacggaaattcctcctatccctcaaaggattgctcccttcatagtagatctggcatcttatacatttttcataggtcttgtgtggtgaaggtcacacgggggcatgctatgaatattggtgagttgcgttcctgatttgatctcttccttcgtgctacgcttgtcttttcctgtgatcatgatgctggccttccgcaccagggcttcagttgtatctgaccttcaggtcctgaggttggttcccttgccttccggaaactctggcttcttgtctagctgggtacggcactgtgctgtgtgagtgccaccccttgcagccaaacggcacaagcagatggggcggttatctgagcttggctcaaacaaatgaaatggaaactgaaatgcccttatatgtgcttaatattttcatgtcctagaccagttttctggaaaccatgaaaactgtcagcatgaaacataaagccctaggaaatctgtttgaacttgattgcctagtttaaatttttcatatcttgtatctcatttttggatccttattctttcttttattaaatagagaaaatgttaccagttgacttcttcatggtagtggggattcagaaagaacatgggtaaatcactcctcctgtgttacttgttaggccttgttcattaccaaacctttctgttaaatgggacgccacttctgcttcccttcccttcctctgtccaaccacaccgttcagtaagctaaagcatagattaggaaatcccttttcctgaggagcccttgacaaaataaagcaagagaaagagtagctagaaaaccctgtcctcggagtcacctgtgtgcctgtcggggtaggggtgaggttatggttgtgtgggggcgggtaggggtgtgagtttatcacaatagatgtagcatataacgcatgcaggaggaacatacatttgtgtttgtgtattagagctttttctattttcccctcacaattccaaaataacaacaagcggggactgacagatagtccccgtattttagttcccatgaaatagatccatgaatgattcctttgagactttaaaggccagttgtacttcctctcaccgacatatattattgggcatctgatctcaaggtagaccatgtgacctctctctgaatgtcatcagcacccatcctagagacgtgagcagtggcagtctgccctttctccatctaaagcatgcaaactcaaagtggaattgctttgaacctctccgtgctcgatgacccaagtttctgtaattgtcaacatgcgtggcctttcaactccaaagcaaacttcctgccctgtgtgttttcagcttgctagctgtgtaaccccgagtagactcactctgctcctgagtttcacgtgtacaaagtagaatcaaaaaaccacctaatcagaggttgccgtgaggattaaattatgagacaatcactcagcagtctgtgcacaaaaaataagagcttattaatatgacgtatgcctttgatctcactaagtcatcagcttctaatgttttttcccttagtttatcctcatttcatgctgtctgtccatcttgctgtctgtcaccacttacatcttgttcttaatgggcactcctgagtttgaacatgagccatcctcctgtattcatgagcaatagttggctgtttcagatgcatctttttctgttagcattatgaacacattgttttttgaatatgcccattgcctatttatagtaataaataagcaataagtggtgctttaagaatgtcctagtgtattccaagtctagtacgagcactgccagtatttaaaccttggaaatgccaagtgttaaggtaacatttcaaccatggtcgccatctgttggtggtggctggtgtagactcccatttcctaagctcctaactgggacgaggggaaggatagtagggaaggaaggggacaagagtatgctcacctttgcacatacagagtgctcacatcctgtaaggcgatgactgccacatagacctggggctttaggtgatttgaattttgtcacctgtgctctgatcctagcagtctgtagctttggtgattaagcaaaatccaaaggaaaggggtgggggacgattttgaaaggagaagctccggggacagcagatacttctttaattaaaactaaagtgtgtttggttttattcataagcagggatggtggagagagaagtaaagctatattgcaaaccggagaagcttcagtacccgcggagcagttcttcagccacgtccgcaggagcgcgagggcccaaatgtgaaatctgacttgtgatcctctccctttgaaattctaattattctgtagtcacgtctcttaattacgctttatccttttcctgccagccttcctctggagtggattagcttctcttagcaagagtattataaccagggagagtgagggctgtggtctgagcctggttactttgaagttggataaaacctgaagagtcagtgtagacacactggcttcgccacagccctacaccttacacactacattcctgggtgtgtcccgcatggtgttctcagagtgtgcatttatccagtaccgtgtacatctctcttccttaataattttttttaaattgcaaatgggaacaaaggtagcttaaagtgtttattcctctatggatttgtacccaaacatctgttaatcttgtggcctctggtgattgacagtagatttagattaggttctaattacctgtaacataccccacccccgtcaccctcaccaccccagttattaagtcttattgcaaggaaagctgtcagggcaatggtgagcatgtggcactgtgctctgagcgtagcttctgagtggacaacatggagatgtttaatgaaagcgaaaccggttaacacccctcagtggctccagataatcacctcaccgtgtgcaggagccagcagaccgtaactccgcagacagtgaaaaccctccgtaactttctgagaaatcagtctttcggtcttagctcgtgagctgatggaagccaccaatggaaagtaaaactggcaaatttcagaaatgccttctctgttcctttgctctttgtcagtctcgaactgtgtgtttgtttcatttgaaaagtaaacactgctcactcagccttggggggagggggggaacgagagtcagggggggagggggggacgagagtcagtactgagatggaggagactgtctgatcctgccaactcctgtcatagctgagcttacgaaggacaaactgcttctcacaatcacttcatagacaggttgcagtgaaaacttaaagacattttttgtgaactttggaaatttaggcaaactcgtaggcttaaaccatgatcttgactgttttttacccttcacaaaaaatgggggtaggaatcaattttgaaactaaataaaacacaacatatataacacgtcacgcataaccttactgtttctcgtgacatggcttgaagagcataagcagggactttggcaactgtaaccccctttattatttcctcggtgaatcagtgagacaattagggctggcttctgggaaagaaagatttgcacaggtcctctgggatcaaggtgggtaagctgaggtaatgggcaggtggccaggacatgtctaacagggtgcgtgagggagattgatgcagcagatgggtcctcttagaaggaccagtggcgtggaggctgggggactttttagtgctgtttaaataagtctagacagtatagggaattttggaagcatcagagacaaaactcagcagggttaccgtctgccttcagagttgacacagtccctggtaacctgagcttggcaggaacaggagagtaaagtgctattgaataaagatacaagaaggagatggaacatgtgtttgggatgctttttagacagtggtgggcacgagacaatttctaaccaatacttgatatccttggtgtgtattctcaaaagataggaaagagaaatagcattagttacagccacatctctggataagtatctaaataaagatggtcaggggtcaactattaaattaaaggaaggagtaaagacgaagaatggaccaggcacccctgaacagaccacgggaatggaatgggaagcgcctctgtgggtaccatctcccacagtgaggagaaacacagatagcataggtgcgagggtgagcgtcaatgtcacaggcggcagagaaggaagagctcagggatgtggtgtggccagcatgtcacctctccacttccctacacctttgccatcacaaagtgttcagagcagcagcggaggacacagtgccaacccctgacctcctgaacatcctattctctagttgacaaagaacagtgggttcttagagacctcaggcatagtatcatcccttcagtgactgtgcccttactcaaagctggggtcatacaagcccttcctgcttttggaagtgtgcgacagaatctaagaaatgcttccgttgacgactgcccatgggggtgaatgctgggaatagggaagcccatgaccttggaaaaggatcgactgccgaagggccatcgttatgtctggctttctttgtttttagcttctgtgcttcctttacatctgtttctgtaaacccagcgatccgtagtgatgtcgttaggagtgctcagggtttctttggggaattgaaggtgtttgcgctgctgtctcttggatgtaattatcatttgaaccttacattatccttacttttcatgcctagttagaactcacttgactacgtgattatacagagtggaaggaggggacttaaatggacaagagaggtggctcgcgccatttggttctttcggacaaatgtatgtcagctgctttcacatacaagcataagtaccgaatgttcagagcggcataaaatgtagtggagaactctttgattgcctaacacacttaagacacttgaggttctcttcttcctcgggacctcagtgtacttgtgacacacttgacaagtgctcagccacccagctccctcctcagctagaagactcactttttttaatcctcaaaaggtaatcatgagaaaggcagaaaagaacatgtcttaaaacgtataaattaagcaccagggaaaatggaattgtagaactttgtatgcagatgtgaggaaattttggccccggattcaggaaggatcgcctgcacagtcctccaaagttttccctgattttaaaattgtaaatactagatttcagagtgccctgagtgtttggaaatcaagtacgggttgtagcgcttttcctcagggtttgcactgaggggaggtggggctattctgtctgcgtttgtaaatgatatttaatctgtagcaggagcgcactaaatcagaacattgtgcatttttccctctccccagtttctgtgacaccttaagggatttaacgccatttctcatgaacacaatcatataactagtgacgagtcccagttggctgtcccgtagtctccacagcccatctcatacacacacacatgctcacacttgccacctgaacagttattgctgagttagatttaattttttaattttccatttgttttgagaatttttttcttttttttttttttcttttttttcgagacagggtttctctgtatagccctggctgtcctgggactcactttgtagaccaggctggcctcgaactcagaaatccgcctgcctctgcctccccagtgctgggattaaaggcgtgcgccaccatacccggctcgagaattttttttaaagatttatttatttgtgtcatgtatataagtacactgttgctgtctttagacacaccagaagaggacatcagatcccatttcagatggttgtgagccaccatgtggttgcttcgaattgaactcaggacctgtggaagagcagtcagtgctcttaaccactaagccatctctccagccgagaagtgatattagtaatatttataaatatagaagtctttggcaaaaggagaaaacccctatcttttgccattaaatttggtaagcagaatacatatacacctgccactcagcctgcaaccacacagctcgcttttccgagccgggatgaatagaataatgctgtctgtgtttcataaagagctgtgtgggtcatagaactttaatagatcggtggccttgtattggctttgtagttggccacagacataatgttatcagaagggagatttttttttttgtatagagtatttcgttcatttttttttcctgaagattgtcaggaaagtacctgttcttcaaagccaaacatcaaacttgatatagagcttcaaaggggaagcctggccattccttttttttttttcttagtttaaagttcagaattcgccttgtgtttcccctcagtaaagaacattttgtactttaaagtttgcagatgtttgaaagaaaattgtgtgttctttggacttagacatgaataacagctccttgtaacttcttccttttcccttttgttttagatatgggaagatcgtgtccacaaaggcgattttggataaggccaccaacaagtgcaaaggtacggttctgtgggccgccttagtatactcagtcctggctgtagacggatgacgccaaggccttaggtttcacaaccagcctcatggtatgaaaaagcacatctcacgtggcgcccagtctctctcttgcacaacgtctgcatattgcttacgtttgttttgtccctagttgagttttggctggaaacccatcaactcccagtttgccagaattctggatttggcgccagtagagttaacacgcaaactacaagttggctttcagcccctgcctttaaaggggggaacagagctggagaatagcttttctttcctgagcctggggagattagagctgcttactgaagaccattggactgtactaaagaactgaaaagattacatattgtgtaaattggctctattaattagaatagagtagttttaagcagtacttaattacatgtttcaatactcccgattgttctctgctgaatgcctgttgacaatattggcagcggggaggagagacccattttcactgaccaaattgtaccagggagaggaggtcatgtgcccctttgaaatctgctgctgcattaatttgatgcactgaccttcagttttccatgcaattaggatgagctcatccggcttcttgagccgggagtgcgagcggctggagcagggcagcgcagatgccgtgcctctgacttttaatgatccagcatcttcacaataggcatgtgatttctaggaaaatggaagaatggagtcagctgactttgactctaactactgaccctgggaattgaagcaaggttgacagaaataggcagagaaggcaaatctgctcattaattagaccctggctcttcaagtagtagtgatggggcactggcttagcattgaaaaaggcagggaacataaatggagcctatggtgaggcctccgcttgtaagccggtccttccctttaatctagacttgaagtggtccattgtactctctcctcttcaaagtgcctggatttaaaggagctattgtagcaaatatctaagcccatgtttaatcaacatggcatattaaggcagttttgccttaggacagtgaatagagtgtgctttatgtagaacggtacccaataaatatttaaaatgaattaaaccggagagagtcaaatgcgtgcagaagtgcatgcacttagctgccaagattagtcttacttagcatcaataaatgatttgggcaatcagacacacacacacacacaaaaatacaaacaagcaaacaaacaaacaaaaaatgttctttggttttatggagaaaaataggctcttgccaagcccaaagcaggaagctgatctcacagtcaacctcagactgggagagaagtgatagtgggtaaatggctgtagcccaccatatctctctccctttcttgctcaccccaaagggatctggtgaaacagctcaggatgctgaaaagccagagctgctgctgtacgtagcaaagaacccctcctcccagttaaactctccagcacatgcgacaccgaagggcactgccgttctcctctccaatgactgctgctttcctagattctgttccttgttcagtgtggtctaggcaagggcctgagtaaaaagaaatgacagctaatctcacactaccatacgcaaagctgcagggttggaaagtgttcacagatgaagtagagagattaacgggccttctaaataaaagtaagggtgattcagaatcgacgttcaatccagcaagtggcctggacaccttcctgttagcaggtctcgggagatgctgccctgtatggggtcaaacatgatctctcccaagattctctgtctcctagcctctgggtagtgtatatcagctgtgtaggggtgtggcatgtgcataagaggagaaggtgatccaaggtgggtttctaaagctatgcaggccagggtgagtttgtgagatgggggagtaatgttgagacaaatgggaagtaatagtttggtttgtaataaagccagataacatgctacccatggtaacttgctatggttggtataggtataagtgtgtgtgtgtgtgtgtgtgtgtttgtgtgtgtgtgtgtgtgtgtgtgtgtgtgtgtagactatagataacttagaacatattatagaaaattactataagtgagaaatactatgctatgtataatttttagagattaaatacatttaagaaatttacatatgacaccaagacatcttagaaggtcaggaaactttcacaaacttatttggggaaggcttctattttgggtgaagttaggctaaagaaaataactctgcttaaggtatgttagttattgactattcagttggtattttatgtttcagttttggtcaaaatttagcaaacacgtgggttttaagtgcttaccacataggcaggtcacgacagagaaactcacaaaggatcgacccggaaactgggttacagatgagaagagagctcatacatacattaattaacacataaggaaaagtggatgaggatcaattaaactgataaagcaagagtggagacttcattttatcaccaaccaccctgtgtgtgtgaaagaagccaaggcagaaatagaaagcacagctctgccagtagccagtatccacaataggggcagacttcagtcagcaagataatcatgacagtcggtgatcttaagacctgatgatttatctcctggaagcatcagtgagcaaatctgcgtattacttagtaagcctcgccttcagagacagcggtacctgtttatataatgaaattaattaatcctgtagcccctgtataaactgtctttacttgaaagtagcaagacgaacagaaagcacacggttgcgcacttaccctgttgtgcttaccttcaataattatggattcttaaagtaagcttcagcaaagaccagaaacacacactagcgatgagtgaatgcaacagttgtgtgttcctcttaagtcagtacaaagaataaccattctgctattacatgaacagagtgcaaccacaagtacaataaatagcaccacagaagagatgctctgctttgtgtagcgtactggcagtggcagagttggtggtagaggtgtccgtcagtaggcgctgcatcgtttcacaagagtgaggtgtccctgtatgatccccagatgttgtgttgtatgaggaagacagatacagaacttgcctgactacccagagagatgcatattagcataagccccaaacatgttcaacctgccttctgacctggcagttgtgggtggccactctgtgctgtaactaggatcagctgcctcctctcccttcctaacctggctgtttctgtactggatagatcccatgaagctcctctcaacccagtgctaagtaacataaagagccgctgctcagtgtagcttccgcatctgtctctcctgaaatagccacttctgcggtcgatagtcttccattacagcctacctcgtgaagaagcgactcttgaggctagtgctgcagcagcatagctgttgagtgttctgtttggcttcattgctgtatacttgtccctctgataccagtaaaacactctcaaaactactgcttcttcatgaattctgaatatcaatgctaagcctggctcctcctattcacaaccttctaaatagtgccattctttttcaaattatactcatcaaaatgaattttagagccaagtatggagtactcatgaggctgaggagcaattcggggccccatagcaagaccttgccgcaaacaaaattttcaaaaatttaaataaatacattgcatacatatatacacatatgaacatgcaagtataatagagatatgtacctatacaaaaataaaacgtcataagtgacttgagttcagagaaaagctgatatttgggcgagtctgcttcacattgtactaagtatacttacatgttcctcggtgtgtgaagagttactgcatgcagtttgcttcttaccctgactgtccttcttgctagtctgcactgctaggtgccatacatgtgtatatcttgcagtcctgcccacctcggccctctgcctcctaatttcctgttttaatttattgtggcctgggaacagaattaataaactcattagcagtgtttgtgaaatcacaggccaatgagttcagtagagtgacctttctgaggtggttctatgcaccaccacactgcatactgtctttagactccatgcagagatgggtggaataactgtgccgggtatcttaaggtattttcgttatctcctttttgaaaagagctactgttattttaggtaaatgagtacttttacctagatactagagttaaggttatatttgagcatcaaatatttatacttattttaactgctaaatctaagggatagtctatagaataaataatgtttgtttctgtcatttttcacctcagtaagatagctctatctttttttgttgtattctttaaaactttgtctgaagttgtctgtcattacacccctaagaccctttctttcttttttttctttatcctgaaaagcaacttaactgtcaggttttttccaattctcagacacctgagaagatctttaagaagataaagctcagagctacccctttcccaacactctctctctctctctctctctctctctatctctctctctctcttctgtctctgtctctctctcatatgagatgttttgaaggacctgaggaagccacttcaccatggctgtgggtacctatgtgcctgcaggacacctctgcttctgttgcctgtattggaaccaaaatgaagtccttttttttttttcaacaccttatataattaaaaagtaatgacctaagaagagtgtcttttgcatttcaggttatggttttgttgactttgacagtcctgcagcagcccagaaagctgtctccgccctgaaggcgaatggagtccaggctcagatggcaaaggtgagtggaggcctgtgcccctgaaggtcattattcgtctatccctctaaacactgagatgcacccaggcactctcagcactagcagtgacaaaaaggctttcttcctcgtagtccaaaagataattgattcatgttctaaagaattgacaaatgtatatattttatatcctatttaactcaaatgtaaatccaaaaataggccctgattttggtgggtaatcaaaattccagaaggctttcagatctatactgttttcttaaaatagaacgttacaattctttgtccaaggatttaatccattgtcggcaggcctcaaagagaaggtaatagaatatgtatgtctcaaaaccagaatggaaagctgtctgaagggaagagggaaaaacagtaaaaaggagagagagaaggattggggagggtaaataagaacaaaatatcatagtatatctcaatattatgccacaaggaaacccatttcttgtatgataatcgggaaattagtaagggaattgggggaggcaattggaagatgactggctggtcaagtgattgcaaacataagggcttggattcagatcccttgcaggcatgtaaaaagctggggactacctcggtaatctctgtgctggacagggactaggaagaggccatgggcttgctagccaggaagtctagctgaattggtgaactccaggttcagtgagagagcttgtcaaaaaataagctggagagctatggaaaacggcatccagttaaagctttggcctccgtacatagattaaagatagaaagtgacaagtaatgatagaaagggtaattctgcacagaatgtcatactttgaagggatatatacctggctcacatgtggatttatacaactgagaggttgggtgcaaatggatgccatggatgccattttatgtatttggatattttctttatttacatggatgctgttttacttgtataatagtgagatggtgatttttacgtgattatttatataatatgactctgtccttcaatagttttatgtagactttattcaagacttgtttctggtgaacttttctcatcctagcagaggactattgctgaaatacttctccaagtgagggatatgcctaagtgatgaagggctataaaacagaggccatatgttccatgcttcataagcattctagcacagtatgcatggggtttaattactgtaagacataatgctttccctgagttgtagtctcttttgctagtttcctagcaaggttaaaaacctaaaggaactctatctcacaaacaaacaacaacatagaaacccctgtctcgaaaacaaccaaacagacaacaacaaaaaccctggaatccaaaatgtcatctcttgggaatgtgaagggattgactgactagtgtgtgtctcctttcacctcagtttcatcaacagagtcacggtgcttctggtgagatggctcagccaatccccgtactcactgccaagcctgataacgtgggctcagtccctggaaccaatagggtagatgggaagaactcctataacctcccctctgatattaggaagcacactgtagcacgtatgcgcaaatccatccacatgtataaaatgcttaaatccttagatgatttgatagacttggaagagttagtttgtcgtgatgaaaatcactgatccagtatagttacagttccaaaagtgttcacctccaacctgcattcggcgagccttttcgttttctatgaggtagggtctcacataacccacgctgctcttgtacttcctatgtatctgaggatggccctgaactttagaatctttacctcctcctcctgagtactggaattaaagacataaaccaccctatgtagctttccagtaagcatattttatttatttatttattttggtttttcaagacagggtttctctgtatagccctggctgtcctggaactaactctgtagactaggctggcctcgaactcagaaatctgcctgcctctgcctcccaagtgctgggattaaaggtgtgcgccaccacacctggccagtaagcatatttttattaaagagtcagaagagacagcccttgaagcaccatgcatctctcacatgccatgttcagtagcaggagtttcattatacactaaatctgtttcagagtcatattcactaaaccaacacttaacttacatcctggtcttcatagaccacatgtaagcgtggatgatatacttacacctagtacctaaagtacattaatgaagataaccacgggttttttgttgttggtggtggtttgttttggttttttttttttaaccttttccctgcatcagttgtcatggcaaatattttcaagcctaaaattttgctgtatgttatttcaagtcttttcaaaagagcagtcgttttctattaccaggctttatgaagtgcagaggaaaataactgagtactatccttggttacttctgagtagcagcaggtgctcactccctgaggagtgcaggagagaaggcttctggaagcttcaggacagtaaggaagacatatatcacctgcagggacctgagaggtaaggtagctgctcaaagttctacagctgccaacatagaggtactttggatacaaccatcagcacagataaagttttaggaattcataaaagggattccttttctaaagtaatcttttccatataatcctcagggcgtggccctaagatggcctatgggtattcttcacctccagagtagaaatttaggaaaatagaaacggaaagtagaaggcatcctggtcgtcagacgatggcctcatcctctgagcaatgtccagtttgatgctgaaaacgaggatagagtaagcaagtgtgatgacagggatcctgctctgctttctgatttgtagcacatttactctggccctgcagtcagtacgtgactagacatggacaagcagaccttacccagaaaaccacaatgctgcccttccctctccatcctgagtcactctgcaaatctccccctttctctttagatgatatccaggacacagttcccatggcttctgcagttactcccatttcagaaagtcctgtcccttgatttttcacaccataaaacctagcatctctttcagtatgtttacagccattcctctgtattcatgttgcccagcctcattcgatgtgatatttaaataagggtctattagggggaaagccttactgtgttcagaagcagtgtaatgtgggggcatacatagacataccacaaactgcccagagccctacaagtccatgagtgttggctgctgctggctctaagggaaagggcaacacagcctccattgcaattagttgctggcaactttgccgacagtttggtgatctggaagcagcattgtgaaggtttccatcccaacaatcattaattatatgcatctatagtccgacatgtgatgaatgggcttagtttcattgtagctcaatctaattacattttagaagattggttgagggggggggggttgtcattagtgtataatgtattataatctttcttactaaaataacgcaaaaatattttaacatttgattaacattttggagctaaatacctgattttcaaaaagagattattaatatatgatgtatagtgcttataatttaaatatatacgcttatttcacagaaatcctgagtatcaagccacaatggtgaagtttcccttcccgcgtttatgtgtttctacccagtctctctcagctccttagctgtgttttttaaaccccttcatagttgggaaggtttattggcctgtcactaacctagtctggttagtctggtgttgacttctttcctgggtagtaacacattgatgctctttctcatacagtactcttgggagtttttctgagctctctacctaatctactatccacccccgaagctaaccatcagccttgctctgatgaactctctccctgcctcctaggcagccttccacagggaatctaattcacactaggatcactctgtgtggctgcttctttggggtatttgagtgatcttacacatagcccagggtggctttcaatccaaaattcttccccctctggctcatgagtgctaggattattcagtatattgccaagccagcttccagtgagtcctagcttccatctgcctctgccagccatcgggaagagagtaattacttcccagccattctggtaggccctttcaatcagcttgctcctttcccattgttcggcttttgagtcacacatagacccattgtatacagcaagctggtgggattcagatcaagctttgtgtaggtccactgacagccctgttgcttggctggtaacaagagggtagcagaccacatgtggaggctcagaacatggctgcgtttctctccaagtgaatggcattctcagcttctgtttcttttagacagagaagagcgggatgcgcacatcctaatccaattcacagccagattcttgcaggctttctctaggttgtctggtttcttcctgtggatcctgggagcaccaacacgcattgttgaaactgagttaggaaggagcctgttttatccacaatgccaaggcctttatagggtagtcccctacatacattctagcacctaagtagcatagtattttaaataatctctggaagaaatcattaccattcgcttattcaaaagaggattgagtgtgggttgacaatctaggtcatatcagtgatgcactttgaatgccagccccactcaaggactgcacagctttattctgtgagctagctgagggacgtgtttccccatcatctgtgaggaaggccagtgcacaggttcagggatgcttgctgtgtgccatcgttctgcagcatatagatttcagtacctggtttcttctttttcctttatttttaaggttacaaattaacgtcttaatgccagcagctctcttgttcttctaaccatcacatcgtgggtttgagtatccggacttgattctcttaggctgatgcagtcaaggattgccttgagtatgtcttttggggagagggattttttatgaaggaagtttaagtctggctgtgtggttgtgttatcagggaccagtcactctccattctgttcttgcgaatgagttggggatgctgcagggtattaaaaggccacacagttaaaggctttccctcttgtgtgatttgaagcagtgacacaggggtggggtggcagagatgagatgttgctgataacactgggttctggggtaggcaggtgtatgaggagcccatagacacacagctgtaaactgacaacactgaggtagctgattctcttaactccacagccttgctcagtactgccatgtggtggccatgaagtgcttgctcttattgattttaaaaatagctaattaagagaaaagttttattccaaggttggacagagactgggaactcggacggaaatgcttagaagttctgtgtggagcagtacctggatgaagcctcacagacagaaacggccccgggcctcctggaaagcctcggtgtgggaaacatggtttaaatgtgtgtcttcttctcaaaagacccagattggaagccagctgtggtgatggctatgctgaagtcccagtgtgtgggaagttgaggcaggagaattgctatagtttaaggccattctgttctgagctccatactaagttccagtctagcctggcctacaaagatgagagactacctctgaaagaaaaaagagaaatcagattctattaaaagacacacagataactggcttaaaagatgtaaggcacggctttgagggtgatacctgtgataagagtggctttctacaggcctttctctgtcacctcctgaggttggctgggggtcagcagaacatcaggggtggcaggcttgcacacttttctcaacaaataagcaggcaaatgagcaggaaatcggttcccgtcaccaagaggcccaccatgctctgagcagtcggcagtcacccacccgtcagcggcgatctgctggtgggtgaacctattcagtacaagagaaaacagatgtctactctttctgccaagtccctctctcgcatttcaggaaccattccacaagcacggggagggtttgttaatttctttcagatggtgtctgagtgctttacaccgggtgggacctccgagcctggcttttctactcaagtgagcattacagccatttatccctgtcacagccagtgtgggacccatttttccatgtgctagaaaagcccctaaacctcatctgtgcttgggacataaagaggccctttgcacccactgctcttggctacctgtaattgacacagtaactttttcaggcatcgtaatttattacttagacataatgaaacagttagggttgtgactgattttaaagagactaaattaatcttcattccaaacaccaccaattactataaatactttatgtcccatttcctgtgaatacataaagtaatgagacttcgtggatgtttagaggattggatggggtggggggagggagactgactgatgttaccagcctgggggttcatcccattcgttggtggtgtaagttttaaattagtgcaacactgtgggtagtgtttgtaggacaggtcaaccacatagacagaaagaatacataatactagctctaatggtcatcccaggtgaggaaaattaactgaggaggttgttgctatgggaaacaaataccagcaatcttagcaggcctaggacaggagtcagtggaacaaggtctgcctagtcataggaaatatttacatattcttacatatatttagtccattgtatattgctctgtcagagtgagtgaaccctctccattcaggttttaacagttttaatatttgggtcccccccccattggtcaacattcaagttaaattaaaactctacaaagtgtatagctgcctgtttatcccagaagcaactaaaatacatattagaaagtactcctacttaccttgtcagtcccctttttaaaaagatctagatgtgtaacacattctgtgagcatgcttgaatatgagccattgaaatttttataatataattttttaattatatttttttaatttttataatataataaaagtataaagaattttagtgtgcatatctcatgtaacatgtttaggtcattacagtatatctgggcctaaaaggtgtgtttcatgacctttaagtagccagttcctgccttagcatgacactaagtatggtctaggcatattaatcctatccctcccactgtggtgcctctaaagcttccctcttccgcagagtgtggctgtcaggtgatagtcactcctccattctgacccaatccacctataagaaaggaaactgctcaaaacatgtttgtctccctgaaatatcaataacttaatggtgtcaggttatcaagcttgtctctcaaaattcaaattgttatagactagaaagtaagggttaacagccttgttgggtggggagagatgttgagctatggcctatgaactacctcaccctatggcctaggctagcctagaactaactcggtagccccagatgcccttcactttacagcagttttcctgtctcaagttctgagagcgttgggctcataagcacaaactctaagataaagtacagggcttcaaggaagttttgtagctaaggctattatggtcattttcttcaatgtcagcactcttggagtggaaaaaaatctaccccagtaactgacaaaataaagcaaaactgtagggaaaaccttgcagtctagttcagtgttttgactttagtttgttctcagtgccctgtgtttgctacaaacttcctctctcatctttaagagagccaccaccaccccctctatcctcccaccatgacatgtacatatcaaaccttctccacatgttttctgtcgcctctgttaatctggaaagtattagaagaggagatttgggtgacagtcttagatgcgtggcatgcattggaaaagtcccttttctatgaagctgttttcaaggagcagtgacccaacttgtgtaggtttccaccgtaacaaagcttcagagacttgggaggttgggtccgaaatgagagggctcatggaggaactgtgcggtttgctgggcgccactaggagaggcagcatctgaagtagaaagaaaggggcaagacttcccttctttacccacctcaggagagtatgaaaaatttaaaacccaaagccagcttcattgtctttccttgtattttgaaacactgcatgtattattgccctacatctgctaaacaacttggcatgttttcaacattaaagatacacttcatctaattgacaggaagatgttttgttcagcattgagttaacccaggtggcaccacagtatactcttaatctcggcgaaagcagagatgctaaagcaaagataggtggttttgattgcctcatgaatgggaaacgaaggagattgttgctactgagatccatccatccatccttccttccttccttccttccttccttccttccttccttcctttctttttttctttctttcttttttttctttggatctgcccataacatggtctaagaacctgtgttcaggttcctctgggctcagagcccgtgttctctgcctttggcctgtttgtacattgctttctttcatatcttggccaggcaggtctcagggcagtatatgttgcttgtatgtctgtttctgttaactttagctcttgagaataccaggacatatgtcattctgtgggaaactaaattactccatttgtccatccgtccgtgcttgtgctgatgtatgtcaagcctaggatcgcgttccgcaagagctctcgcagtgaactgaaggccagctcctggtatcctaaatcttaaacagacaagtagagcacaaaaggtcggtgtgtgttgttacttgaaaactataatgaaaggaacgatttcgtttcaggtttaattaatgctaagatatatttacaaagactatgcaggtcaaacatgcataatgtttcacgtatgtttttagaatgctgtgtactccaaaaatcaaggaagccataatgaggatgttattctgttgctaaaggctaagatatcaattaatgactttaccaatagcactcattaaagagaagtcaactcatatgctttaatgtgtaaagataaaattggaggactggagatacagttctgtggtatgacagttgcctagaaagcacaaggcactgggttcatcttcaaaactatggaagcaagggaaatgtaagatcgaaggaaattttcaagtgaagattgtgccaacctcagttgcataggtgaatattgattcagtcaggaaatactcttgttgtcaagtgggctttccctctcgactggaacaccatactcttcatatgcatacatctcggtcactgctcatctggaaattcagtcatatgtctttgtccagcatagaccatgctaaccaaagaaggctgaatgggaaatgatcagatgagagtcacttctcagacttgatgggcttcttagtcaactgagcattctgttcaaatgcagcttctgcttctagaggtgcagtgtgggcctgcggctctacatttctaatccagttctcagcaggtgcagtccactgacctgtgggccgacgacagttgacattttgtagaacagagattaactaaacctgccctccccagctattctcgagtgtaatgtttccgcccgtgctattcatttgctaaggcttacagtttctagtttaggttagaagctatcttttcctcactggtgaccactatttaaaatagaacactacccaagcagtggttgcacacacctttactcccagcactcaggaggaggaagcagaggcaggtagatctctgaattcaaggccagcccggtctacagagtgaattctaggatagccagggatacagagagaaagcctgcctccaaaaaataaaatggagccaaatatggtcccaggtctcagaaagctgaggctggggataatggtatagtgaggctatatataagaaaagaaaagaagagagaagaaaagagaaaaagttaaatagtgttgattctaccataaggcagtagagggaagttgcacctagcctgaactggactctacagggttggtccagaatcttccttcacagatttctaagttggattattagcagtagtagcataaccatgaacatgaagtggacttctgacaaaagcagaggttagttaattttggaatcactgcatgatgtcaggagtgcccgtttctaagaacatcctccccaactcagtgcaggccagtggtgtcacttccacagctaagaatgacactggacaccatgtcaggcctgtgctggttgttcaagactcagacacaattttcaaatgtccagggtgacttgagtgttccatacatacccagcctcgctatgtagtactgaaaggtcttgcagagccagtggctgaatgaaaaggtgctactgtgagcgcttcccttctgttggaaagtgacagtgtctttctgctctgccttagcaacaggaacaagatcctaccaacctgtacatttctaacctgccgctgtccatggatgagcaggaacttgaaaatatgctcaaaccctttggacaagttatttctacaagggtcctacgtgattccagtggtgccagccgtggtgttggctttgccaggtgagtggctgctctctcctttttaactgtagtaaatctgctacgtcactctagacagaagcggggaaaagactggaaagaacgcttgaggcagggtcataggagcccgttgtactgtggacttaaattgcacgtgactttacatgtatcttggaacttttggacttttctgaatcttggaacattttggactgctcaaaccaagtacacctagcacccgctggcttgttgctggaactatcacaagaacagtggccctggacccagggtcctgacagtttgattcatgacttcacgatgcttgtaacttctcacaaatgaacagtctcctaagattcatagacagatcagtatctttttctcagatagaaatttggttcattataactacttaggttttaagatagatatttctaacattcaggaaagaaaaggggatatattacctaaccatgtcatcaacttagcagttgttaacaggttttattttttaatgactgttctaggtataactgaagcacccccacgcctcctgtggaatccttattcttttctttctagaaagaatacttgagtggctaagttggtttctagagaattaaattaaaccgagtgagcttttgatttgtggcaaatttataatcctaaaggccctatacaaaagctgattttacagtgaattgtttaagatgtttttagcagtgggcactgacagataatatcagcaggcattaaattatgagctgatttttggagagaaaatgctgacattttacttaactgtacaagttacagtcacatcttaatgcaaatttgtgatttcagcaaagcatttattactaagggaccttattgtcacctcgccattaagtcacaaaggcaagggctgcaactaggtcctgttggcttttagtcacttgttctgttgggccagacagcttggaggaaaacccaaatacctttccagcaatattagtagcacatacttactacttcattggtcaagaggcaccaatcaagacgtctggaagcctagcctcgccatccttccaaggtgcttttctgaatgcagataagtgtgcagagtccagtggaactgggctgctctttaacccctagtactgccagttaaaactgagtgagtgggctagggtatggtgcattttgagtaggtgatcggatctttccgttgaagaaaagcaagtcaaagtactgaagtacccagaagtgcttctcaaatgtatttagttacctgtggatgtaaaataagttgtaaagtgaggcttcagcctttaattcctccttcaaagtcaagatggtgagataaataactgagttcactaattggggggggggggggtttgagggtttggttttttggttttttttttttggtttttgttttttgttttgttttttgttttgttgttgttgttttttgttttttgagacagggtttctctgtatagccctggctgacctggaactcactttgtagaccaggctggcctcgaactcagaaatccgcctgcctctgcctcccaagtgctgggattaaaggcgtgcgccaccactgcccggctctaatttagttttaaacctggattgaaagttaaaaacataaaaggtgcatcctctggttgacgacagccagtaccacagctctttaatcttgtcattttgtgagttcataaaggaaagaccacctttaaaacaaaatttctaaactgtcagctttaaatacaagttatgactaagtattgtgaattaatttttaaatttctaacaattagaagattataatcggatgtgagtgcgatggaacactgtggagaatttactctgtcgtttataattcaggaagtgctctggaatcagttgttttaccgtagaaatgccaaagcgatggctcacgaaagaataatccgtccccttctttatctcatccgtggttttctgctggtttcatttgcaccctaaaccgtccttataaaagtctctttgtgctgtgcgggtacagtttgtgagtttcttatttttatatgactaggatggaatcaacggaaaaatgcgaagctgtaattggtcattttaatggaaaattcatcaagaccccaccaggagtttctggtatgttgtttacctacagttttatcaatcctccttttacatagcacatatgtaactttagcacataatgggctctcaagaccaaaatcctctcactttactcttgaaaacatacttgtttgtactggcaaataagattttttttttcacattaactgattaggaagaggttgtgcattacctggggtacatagagctgacttgcaaagcattgtagaatctactctgttgaccacggccatcttttatcccgcctcaccaccatcctctgtgagcttccttcccatgactgggcacaccagtgagagctcagcatctttgtcttcagatgagctggacctcagcgcctatggcttttgtgtacaccctgcttcagtcacttccctgtgtcatctgcctgtgttgtcactaatcagaaccaccacacctcatgagtgttttatgccaaggtaacaaccagacttctggtctgaaatagaagggactcctgttgttgctgagaattgacttcttagtcagggtttgtattcctgcacaaaacattatgtccaagaagcaagtgggggaagaaaggggtattttggcttatacttccacattgctgttcatcaccaaaggaagtcgggactagaaatcacacagggtaggaacctggagtcagaagctgatgcagagaccatggagggatgttacttactggcttgcttcccctggcttgttcagcttgctttcttatagaacccaagactaccagcccagggatggaaccacccacaatgggccctcccaaccttgatcactaattgagaaaatgctccatagctgaatctcatggaggcacttcctcaaggaagttctctgggataactccagcttgtgtcatgttgacacacaaaaccagtcagtacaatttcataatctgttttctgtctctgtaaaacctggggtgtgtttatacagtcctcactttagtggcagacttagctttcttgaacactcattgttgcctgtggctactggaagaacgctgagactggagctatcctgagctagaccattttaactttctctgtgccaccatgagaagtagccagactctcagcaccactgcctctcctgcagttcctcaggcttctccccttctctcacctgtacagtcctgtagccactcaaaggagatgagctcgcttcctgtttaatgaatagagtcggagtatcaaagtgccactcagtttctgcatcctctagtgaaggaaggacgtgtgcctgagccttgctcttcctttctcatccataaggattgtagagcaatttgcaaccttgacccactggggccttgctgtgccttcctctcctataattctctctggttttttttttttcttatatcccattttttttccaacagagacttattttggatttataaaataacatgtttctgacaaaactagttggcaagcaaatggaagaaaatccacagataatcttctagtttcatttgtattgctgtgataaaattacccttatagagagcaaccaaaaataggtttattttcgctcagtattccgggttatactctgtcactatgggaaagtggaggtggcaagaaattgcatcatatccacagtcacgaatggggagaggatggatagattcatgcccacttggttgtgcttggcttcatttccctcttctatcattttgaaccccttgtctagtgaatggtgccacccacagtggacgtggctcttccacatcagttaatgttagacagagtaccccagatacgcccatagtcactgaactttgtcccaggagatcgtaggttgtgtcaagttaacaaaacttattacaattaaaaacaaaaagttgtgactatagctataataagattttcaattacagaatttagtgagtaggagtgtaaaatactttatgccaagatattttccagaagatgatatccatttgtgtttgaaatcatcttggtctttagtgatctttagtgaagttccccctctgccgtttcgtgaactgctttggaaggggcagtcttaactttccatcactcctcagttctccccagtgtgggatcttctaccatgtagcttaaatttgggcaagcattcctgtttgctagggcaactgtaacaaaatagcacaaatggtagattagtgactcaaaatccttggggactagatggccaagctggaggaatacaaggttagttccttctgagcactgggagggaagggtctgtactgggcatctccttggcttgcagttggccatcctcgtcctatgtcttttcacttcaccttcccaccatgtcctttcatttataagagtggtaaccttggtggaatggcccaacctagtggtgtcttctttactttgaaccttaagttcctgtctctgatgggtcacgccatggggtgctgggagtaagggctctagcatgtctttccgaggagggagaggaggagagaaaggaggagggagacatagttcacgtgctcatgactgacatgttctgctccatatcatccttgactcagtcactccctctgctcccacgagtttgctgtttctgcatcacgtttctgactgacctttgtgatagattttacacagtcttgaactccagatccctttataacctcagtcattcatctcttcctagctttctattgcgtatcagtctccataggtccactgtcttccaagacgggactccttcccctcattgttaatattcttgccttctttacctcagtagaatcagacacccaagtcagaaaccaagcactggactgctctgtccttttctctcccattcagataatcactcaagtccctgatttctcttgctaagtatgtctgccccatcccttcatgcctactgttactgcccagtgtgccttttgtctctcattaaagcagcctgccattggcttgtcctgtctggcctgacatccctcacttcctaaatagccagaggacttcagataaaatgtgcggttctgttcactctaaaagaccaggggttcccagaatgacacttgcccctcaatgttgtcctccatttctaccttttggcctgtgtcctcagtaatgagtcacaagtagaatgcctaatatatgtcattttacctgtgttctctctcatggctcctataccttgatcttgtggcttcccattaaaacagaagtgctctcctaccttcctggactgtcgagagtctgtcttctccctgtgggacctactctgacccagctgggttacattctgcttggggaatcccccaaaggggtcacacagccatcataacaatgatgatgtacatgcatgtcagtctcactgttcgggggggctcctagaaacacttttcttgtctctttatgttcacgccttgcagtggttgagctatactaagcaacaaccagtgttcattagctttgaataaattttgtttcatcatagcaccaaggcaacactggcaccttacagggtagaatgtgggaaagactggcatgccttctggtttgcagtgagtcccctgcatgctctgggccagcaggtgatgtctcagaattaagacaccacctcaccttgcttgaaagagaggcactgatgctgttagagtagaagaagagaggggctcctgctgcctgctgctgtgttacatccttcccccaatgtactggcagacttcttgctcggcaggcctaagacccgctttctgctactgggtctggagttggcaagcctgtgccagccaccaagtctgactccttacagcatcattgtctgcctctgcatgcccataccctgcagatctactcatgcttgtgtagaagtctggagatgggtcctttcatggtgtcctccagccctctgctcactagtatcttcagtaactcagctgcatcaacaagaattaactcaaacgctcctgtggggaacagtcaggtcctggagctcacccggaaccatgatggcccctgtaataaacaaacatgcaggaacccagaagaagagagtatgccattggccaaacgcatcttcacccccacagtctctccagcacctttcatatgcaataaagtaaaataaaattaaaattaaaaaaaaaaggtattgcagtagtaagtagatcctgtggattgaacctgaggaacataaaagactggtcaggccccacctctgaatggcatacacctaccctagcttgtcacatagaacacagccggaaagcactgaagtatgttgatgttagattggctccatcctggagtcccgggcttaggtggctgctctgaggttttcatgggtaatggcgttgggtatttattctcccagagctcccgggttccatcgtcaatagtatgactgatgaagatgattagaaaatcattttacttttctgtacccagttccattttttttcataaaggaactcatgtgtatgtctgtatagaaccatgggccacacttggtcttgtaacattaaatcctgacagcacatcacttttacagctgctactaaaggtgaactgcacataggtacacacttggaacttaaaatctaagacctgcatgcacagtgccttcagaaaaactcagcctggcggaagagcttcctttaactccctgacttagttatagttagctagttagctagttagctagttagttagttagtttgtttgtttttccatcaacaacacttagatgaaaggaaaacgttttaacctcaaactagtagacgcctgccctgtgagtttagctcagtgccagtttgagtcccctctctgcatgctcaggacaccagccacacacagcttgtgacctcctttggttcgttcttcatgcagcagcaagactggttgaaaaagggaaaggacccagcaccattgttatagccccagataaaatctcccagctcctctgtgaaggagacctcagacttatcagacttatcacagaccgactgaacagtttcctttgttctttgaaggactttgtggttgggtccttaaactgtttcctttgaggtgggtttacagactgctggccacacccattcaagaaaaacccctggtttccaaaccacgtgtggatgattgtaagagcctgggcagccctgcagctgctagagaagagtttcttccatgttgtaccaggggacaaatgagtacaagagacatgagtcccatctatattgcaggcctggctgcagaggccttatccggcagctgaggctgtgttcccatccagtccttaatgccacttcatttctaaattctttcaattctaatttctctcatttctgtgcactgatctgggttcgggactaggttgcaagttgtgtgggggcaggagcattggcttgtgacttttgtatgccaccctgtccctgcagggctcactgagtgctgtctctgagcttttgacctgaatgctcatctcagtactcagagctgctcggaggcctgtgacgtatgaatgaggttgaattgcctccgggctcagtgtgggatttggaagcacactcttgtagtaaactcagcctttcccccaaacaagtccccagcacatgttggaacccatgaggaatctgaaagttttctgcttctctgaacttggtacttccgtacccatagtgagaggagctttgaatgctagccagtgtctcagggatagatctcgcttcatctggggagagcttgagattatcgatcagattgggtagaaaataaaatgatgggggtgagcaggttacatcgagtgtgccttcctgaatggttaactaccatgggctccttgctaggtagacataacatcttatagacacagccagaggatggcctatttgacgatgccttgtttagctagcataagcagaattacccagtatggttcctgtcagagtacttggattcttgcacagttggcagtttgcctatgacactggagccaagttcagaaaagaaaggcactttagccaggctcacatcccaatacagcttttgccctggtgtgctagagtcctcaaaggatctgctggtgttgggtcattgacggaacctgttagcatccaagtcacaaccattaaaaaggaaaacgaaaagaaatgtggtaaagcccccaaagataagttttagaaataaaaggaacagtgtagtcttcttagctgtaactcatgtatactagcttctagaaggctaaagggcggaggtccaaatgggcatggtggtgcatgccttggaggtagaagcaggtggatctctgtgagttcaagaccactcaagcctacacagtaagttttaggccctgtctctaaaaaaggaaaaaagtcatgtttgattacttagctctgttacccatcatcctgccagcctatgtttttatattaaggtgacatcaggattccccatactagctatgcccaccgtagctggggctgtgacatagaacagaacatgttcatagctctgcaaaaaatctgagacatcacattataactgatataggagcattatgattaaatactgtcttcaattttataaatatttttaacatacagttttctgtctactgttaccatatcttaaggaggcatcgtgttttcttctatagcatctttaaattgcttataagtccttttcttccatccttccccatccattgtcccttgaaaatgctggggtactgtctttggttttgaatgcttgaaggtttaaactaggtcagatttgcctggaaagccccaggataaaagaactgtggtgaattccatagattttttttttcactgcttaatactgattgataaaaatcccgttatggaaaaagactgtaatagtggctctctacctaagggagtgttggaaacaggctgggaaatttcagtttggttgtgtagagctgatgaccaaagtaggaactgtgctgcaggcacaaacactggtcatgatcagaattggggaatttgtctcaaaatgttcttcttgtgctatcttcccaagagtagacatgttgtccaggaagaatattcttaatggcatttgctggaaaacccctggagctgtgaatgcccctgccaccttcctgccacccaacaccttacactcctccccaaggatggcagtgtgcctgctacttcaggacacaacaggtccacccatcgttctggacctctgcagtactttgaataagtccatgtgtacaaaggaagagtgggggttgctcatgcatgtacagccaccatagtttacattgtgttggctggcatcacctggtcgtgtctcacacagcaggttcatgttgggttggagttaactgtgggttgactgcattgggtgcagcaagtggccagcctatccatctgcggctgtgtccgccgactcatcagcttgaatctgtatccagcaagacttaaagcccatctttaccagcacttcatagctctgcacaaagttatacaccagggcattgtctaataccaggaaacaaaaggggtaaatatgagtgaacttttcaaagggttttattgcctatttaggcatgtattttttttttagatgtactttgtgtaaacagaacattttcacacctctgggacaaaatagaccaagtcctttttatctaccaactttacatacatcaatttaaccaaccacagatggaaaatattcaggaaaattcctcacatgtgctgaacattgtcattagtccctaaacagtatagtgttaccgtttatatggcatttatatcatcgtaggagttagttaatccagagctgtatacaggagggcatgtaaaggctctctgcagacccagttacatataagagacttgagcgaggtccttgtataactgcagtgtgtcttggaaccagccccagtgggtatcacagagtaagcatgccttgcaatgtgtgggatgctctggtagcattagggttccgtgaccattcccaaagaggtgctccctctccctcgaactgctacgagatcacagcatcattaaatcttgcctgtggaagtgctccctctcccactgctcaggagcacgggttcaagtgctcaccttggagctgcccttatgaggctttgctgtcatgttgggatgattgtggatggcccctagagcaagggcttccctgtgagacctcgatcgtggtgacgtatgcctgtaagagacactgtagaggaggggggagggttttattttgactcacttggagaggtttcgatccattctgtctaacctgtgagaggatagacttcatcatggtgctgagacatggtgaagagaagctgttcacctcgtggggcccaggaaccagggtggagaggcaggaatggttagggacaaggaatacctttgcaggacacatgtccattggctcttctccagcttattccacctcctctttaccaagtcccctgacaccatcagatcaatctattgatagtcagcaccctcattatccagtcatgtcccctaaaagtccacctgagaacatggctgcactgggaactgagccttcaatacacaggcatcagtgagacccacaccacagctgccctcagacccaagtgtagaaataccccctacaatgaagggaagtcagtatttgaatgtaacaaaggtgatggctcagcagctaaaggcatttgccgccaatgctaatgatctgagttcaatccctggaacccatatgatggaacccatactgcccactgccctccacacacatgcatacacacatcaatgctataactacccacatggctgtgttttctttcacacgagcttagtgccaaacccgacttggcatgagctagttttcagggatgatgtcccaaactgagcacagcccacatcatccctgcaaaccaaagctttaccaaggtctgcctctaaagaacaatacatggagaaattgtgttaaagcccaagtatctcagctttctaaaagacatttgccagtaaatttactcagaccccagcttgagtaggtctttatgctagaagctcattaaatctctcataatcaaatcctgcaacagcaggcagtccacacagtcattcgtaacttctgagcagccagtctcctgagaaattaccttaatcaaaagtgagaaaagcggcaagtgccagtgtcactttccttacactgtgtaagagacaaacgcaggtggggccatcagatccctccgcagcagctctgggaagagcgtccagagggagatgcacagctgtgccccctcggttggctagaagcagggcaccgcaggaagcagtgtgcatggagtggtgggcggtcacgaatggttccttgggatgcatagcccggacagttcctggtgaattattagctgaaatatgtttttaactcataataattatattcttttacttttaataggaagccatatttattacactgatcattaaaatattttttgtatgcatggctggctgaaacgtgttctgtgtagtccatatttataaggaacgccaagagtgcccatcacatttgaatagcttgcattgggtttgtgattcttccatattgtctcatctcaggagccagtgtggctaaggccttgaaattgttctgagctttacaggtcattctagaaaaagaaggggggcggggaagcccacacaggaattctgcttttgcatatgaagcatttttttttcctgtattcattttgtgtcttggaactgtgagcacatcgaggctagaaatccagtcagcaactctggatctctttgggcatgcacctatcacacatctgcaacacagacatggagtctgttgtcttcagcagcatggtaaagaagtcctctgtggaaatgcttccccttttccctgtgtttctctccagatgttctggttagggttttcaggatgcaacaccatgaccaaacgcagcttggggaagacaggcttgatctcttcttacaactcttggatcccactgtatcacagaggggagtcaaggtggaaactgcagcagaggtcacagaggggtgctgttaacctgctttgctccctgtggcttgctcagcctgctatcctacgcagtccaggatagcaggccgaagggtggcactgcccctcctcgcccatgagcggcccctcccccaccagtcatcaatcaagaacgtactcattggcttgttgtcagccagtcagatggaagagtttcctcaattacaccccctcttaagtgactccagcttgtccagttgacaaaaacctaattgtgaacactagacttttctccatgttatctgtgaaagctccaacagcatgtctacacagttttccacatcataaaccgctcaagtcgttttttccatacctcaccacattcagcagtacttgagcagcatagccaattacttccccacaaggaacaccaccagtacacctttaggtcaagacaaaatatttttagaacctgctccgttctcagccgagttctcacaacagagtggagatgatctagtaactccctctcaatccagatgatgaccgggttacacggtgtctcagtggtagccgctgcgtggagtcagctgctctctgaattctgagagcacacaagaggcatgtgtagatgctgtaaagcacaacagtagaatgttgatgggctcttcgaaaaccagggctcagattttctgggaaaagtccagtcactctctgtctctctgtctctgtctcactgtctctcactctctctctctctctctctctctctctctctgtgtgtgtgtttgtgtgtgtgtttgcttcacattgtataggtttataaaataacaaatttaaaagcctaaaggcagttaatgcagctgagatagatggggaaagcgccttttttaaagtagccattatcagaagagctgaccatggtatcagagtgcactggttttccagacgaggtggcgaggcttaccaagcgcagttcacattttgctatgtgatggctaaggtcaaatactgaataactagaaaagtgggggttttagaaggaatgggctctccagctgttcccactgtcaacatctaagcattaaagcctgaagaaaacctcatttaacatgcactggggaaatgaccccatgaaggaaggtagctaggtgagcacggtggcttgattccgttctgcaccacagcgcgcacagcaggcactgaggagcgctgtttagtatgaatagcccagaccttcacagcctgagctttggaagctgataaaatacatgatggagattgcagtgaggcattctgggtatggccacccctgctttcttaggagggagtgccagcatcacccaggcaggcatgagtaaagagtctctctctctctcactccagctctgttgagacactgcaaaaaccaatagtcccattaccttagatggctcccacacggtgccaggagatatgagatcagtgtctatctggggttctgcctggggccctcagcagtattcacggtaacactgtagtcatcagaatttgggaggggcgtgttcctgttggttccgatgcataagaaaatagctttcctgggttgggtgatgagagattgagacctgagaaatcacacaagatggcagaacttgcccttactaagggtaaattcagcctgagagttcttgcttacttgggaacgtcagttggttcggggtagttctttatctatgtatatgttttgctagtgaggcgtgcataaaaaagcaatgtatcaagggctagcgtgacggctctgtcagtacgcttcttgctccgtaagcctaagggcctgagtttgtgttcttagctcccacataagtgcatacgcctgtagtcccagcactgaactggtagagacatgaggatcactggggttgaaaacaaaaaccaaaaagctggagagtgatagaggaagaggataccaagcatcaccatgtaggcttgcatatacatgtgaacaacacacacacaaaaaccatcagagatttgcacaccaatgtgaagattacttattattcaaggagctgtagagatggctcagcagttcagagcactcagagctcttacggaggacccaagttcccagaatgcatgttgactggttcataactggctggcttgtaactcgcaactccaggggatccaacacctctggtcactaccctccgtgggcacatgcagtcatacaaacatgtacgtgcatataattaaaaataatatcaaaaagaattggtttttttttagatttatttattatatgtaagtacactgtagctgttttcagacataccagaagagggcgtcagatctcattacagatggttgtgagccaccatgtggttgctgggattggaactcaagaccttcggaagagcagtcagtgttcttaaccactgagccgtctcaccagtcccaagaattgttattctagaaaaatgaacatgttaaagattgtcaatactgatcctataaagctcatccagccaaacatagctgttgctcagtgtttctggtgcttctaccatgtcattggtgcctcagtttctcctttctgaaagacagtaggctgcctgaaaggatctgtgctgtagaagaagctgacaccacacagaaacacctgactctttagcctggaacccatgctttgggcttccagaggcaagcaaaggacctgcactatggtctggcctggaagcaccagagaggctgatgaagccaggctgcccattctgtaacagacttgcatacacgtaaacagaatataaaaacctggcccacatcttgttcctacccaccaaaaaaaaatctgaccaaactcatccaagggttgcacagtgccaagagaactgttagttacagtgaattaaaccctttgtcaccaagaaaatcaggaagttccccaactttgtatgacatgattttcctaaagcaagtgggtggtctcggtagtaaacaaggcttgaagagtttataagcatggactctttcttacccgtgccccccgcccccaagacaatagagtcgtgtcaggaaggaatgtcagctgttcttgcatctgtatgtctttcaatggagcatttttattaaagcacacatgtcttcactgtctgctgtcctattgaggtaaacaggctttcataagagtgggcatatcctcagctacacagcacaaaagccctgaggaagatctgatttatggactgctgcacggcctgctcctgtggaccgagcacacagtagactctgagtaacgtagaccgaagagaattctgaaagggaaagaaaactgctagggtttttactgtgtctcgtggagtacacggcactctgattttgctgaaatggtaagcttgcaactgtctggaagacatgccttgtcttgacggcttgcagttctttaggagtctgcctgaagtgaacactgctggtgtgcacaccgctttagctacttactgtttgcttttagagaggaaaagaatcttagtgacagcacagaataatggaggcgatagaactcacttgggaaaaagccagcttctcccggtctgttcgagtcacgttgaatgatgtatgtataagcacagcatcactctctggaccctcacctccacaccatacaattgttgtcacctgggatttttttctgagagggcagaatcccctggtggggcgctggtcatgatgagcacgttgagggtcttgccgcttaggtacttaacccaaatatgcattttagaatgagtcctgcctgggtgccttctttctgtgggagaattttatgctgataaaagaagtgtgcctttcagataagccacgtaaactttgctaaaggctctgaatgcagcatctcgtcactcagagcatggacccggttccagctcctcaccctgagagatcatatacaactaagtcttacaacctggaacagcactgagaacagtggacattgcctgtcccagaagacctcttgatttgtcctttgtcatcaactggggcattttctacaccatggccctatctagtcatggccacaagcttactcacataggagcctggaaggggtggttttagtattggggtctaagtactcattcttttattgccaattaaggctggttatttaagggaacatcagatgtggtcagtctgtcctctcagaagggtcttttatctgcagctcttgcttggatgccacattctcagccctggttcccttctgtggcatgatatggtccagttgtagagttataaggaccgtcagtgactatgacacagtcgtcctgatcagttgctctatctcatcagtacatttacctcttgcaattattggaaaggtagaatttcccaaggtatcaccttgctttgcttggtcacgtggtatagttgagttacttaggagaatgttggcctcggcccactcatccccaccatgctcagtttgcattgcatgggattccctatttatggaagcctggggtagaagagttagaatccgaaggtaaacaagagggtattctcatcagatgcttagcaggttttttattacctcctacaatactatatcagtccatttttcattactgtatcaaaatacctaaagtgaagtggcattataaacaagaagtttatttaggtcatagttcaggaggttgaagggtctggtgccaccatcagcgtaactctagtgagaaccatacttacttacaagagcgttcttgtacgctcttcagtagctttgctcactttggagaaaacttgagatctcctgaaagccactctccatgcttctgggagcatggccccagtggcctaaggtcctcctgcaaagccttgtcctgtaacattgccacactagggactaaacgtgagccagaggaagatgaactattacctacaccatagcgcatccacttaaaaatgccttacatctggagtatgccagggacagatgcagggtgctagaccctggggagggatagcagctcttgttgtgttgttttttggcagagaagtggtaaaagacatgatggcttgcaccctgtcattagtgggtgggtgatagtgatataaaataagagatgaattaggataatgagaggcaaaggagaaaggagtatatttttccacaagtaatgtttttctcttcatggttatttaactttgaaagaggacttgaaaggaataatcatagttcttcaggagacaaaggactgagtgtgggagccaggcgggaggtgtgagagccttcagtacattaaccgcaaacacagaggaaaacacacaacttccaggaatgcactggcgtgtctgtcccagaaaggcagagtggaaaagaagctgggactggcccagtgtgccacctgcatctcatttctctcttgaacatatcttttcaatgagtgtccagagggttttatttatgtgtgtgtgtgtgtgtgtgtgtgtgtgtgtgtgtgtgtgtgtgtgtgtgttcctttcttgggtgtctctcggaattgtggttgaatggatggtaaaacagctaagtgggaggatctgtgacattgaaggacctttaaacaagtagtgcgggtatttataactttaaatttttcactcatgcgtttgtgtgtgtgcacatacttgtgctcacatgcatgtgtgtgccctaacaggccagaaaagggtattggtccccctgtagctggggttccatacaggtggttttaagataggcgctactggggacaaactcaagttctctgcaagagcagcaaacatccttaactactgtctctccagcccctgcagctttcttcagtagagaggagacccgcctatatttatctattgacttaaccagcaataataaatgcctacaaggtgaccatactgtacacactgtagacatggtgataacaaaacagacagggaggaaagacagatagtcactacactcacagacagctgtaggtgctgtaaacagaagcatggtgtgattggcctgacatgggcttactttctgccaggggcagagcaccgtcagggaagctggacccatgttccagcttccttttggagattgtttgccgactgcccagtgatggaactgtagagtgcagagagtgctgtggtgccagagggattagagatggctttcctttggctctccaagttagagacaacaactattacatcagcctgcactgttcttcatccatagactcaaagggcctgaggtcatgccttcaaagtgttccttgataatgctaaccgtgttcctattgaaagaaaccccattacatattgttcgacgctcctttgaccgtgggctcacatcatcctcccctctgttcacagctcctacagaacctttactgtgcaagtttgcggatggaggacagaaaaagagacagaacccaaacaagtacatccctaacgggcggccatggcccagagatggagaggtgagactctgaggccttccttgacagttgagtgtgggtgtgtgatcctgagcgctctcatggaaggccctgcaagggtgccgtggctgggctgccacacttctgaaacagcccagactaaaccttccttctggtgctgcttcctcaggggctgacggcagctgtcaggtgcaggagtcactgggtgcccattccccaagagggtaggtagatgacaggaaccagccgcactgtgcttagtaaaaggatgactgggaacgtgttttgagcacagcgggttcagttttagatacagctttttccaataggtttacattaatagtattcaggaatctgtccttaatatcgagataaatggtatatttgtcattgagaatttagttttacatttttgcttttttgttattattgttattgaaaaaaatgttgtgccatactgatatattctgctcgtggttttccctccccacctccacacattgctttttaaacaaataggcaaacagtctttagaagctttctttaaacaaacagaaacaaaaaccttcaattttttttaatccaacattgggcttcctcttccttgtatttatttcaataagtttttatgtttaaagttgtcataaggaacccagaatgtgtggagaaaataccttggacttgtgctgtccagtgtcagccacatggggccctctgagcgtgtggtgtctagctattccaccggagagattggtttctgtttaattttccgtagcttcctgcagtaatggatgtcgtgtggggcagcacagtggaactctcacttttatcacatgtgccttttaccatcttgcgctctggggactgtacaaaatgcagtttcagacatcatcttcctagatgggttctcatggttccttctgcttccttccataaggctggaatgacactcacttatgacccgactacagctgctctacacaacgggtatgtctttaggataaatgcatcatggcttgagggacagtgaaggtggaaggtatcagacattgttccatgattgattccattgaaaggattacttaataaaggcttttgtgtttgttctagattttatccttcaccatacagtattgccacaaaccgaatgatcactcaaacttctcttacaccctatattgcatctcctgtatctgcctaccaggtttgtacctcaggactcgtcagcagtgcaccatgcatctctgctgcatttttatgtgtcttcaaattctgaacagtttttaaatgaaatctaagtcaaattggatgcagcttggatacctagtttggaataagctgccttttgtttggcatagcagtttgcttttccttgtaggaaagcgtaaagccagggtagtggttggaatcatcacatggttctaggaatcggaataaaccctcgtgctttctccatcctgtgccccagaaattgaatctttatgagagtcacaaaatggagagtgaatttgggcttctgtcttcatttcttcactagcaggaagagataaagggaacacagagattgtctctcttaggtgacatgggctgatacagttgagatttgaggtccttccctgatcaagaagcaagaggtcattaactcctcttcaattactttgtgagaaggctttaccttcagcctggagtgacccctcattaagctccttgtccagcactgatctgatagtattacagggctagcagggccggtgcgcctttctcttcctgtagcagagtcttccgcacagctctatatggcctgggcactgacgttagcactgtcactgagttcagttactgacctgcaagagagttctcttctgttgactgctggggtcttgtgtgactaaactctggggtattcttgtttttaaaactgaattagatgttgtagtcctgacatcaggggttaggggactacagcatctgatctatgttgtttgatagcaacaagcctcgggttcctcttctttaaaatggggataataatggcttctactttataaactagagagagttctgagcacctaacgaaaataaaaagagctccaccaagtactgacatatcactaatagtaagcatgcgctagcagcagcagtgttacatgttagttacccttttccaataatggccaaggtaagacaatgtcaaagttggctctgcgtaagttgtgaaagtaacactgnnnnnnnnnnnnnnnnnnnnnnnnnnnnnnnnnnnnnnnnnnnnnnnnnncccctccccctctccctctacctcctccagcctatattcctttcctttcctttcttctccctgagttgctacctgactctgaagtgtcagtcttctggacaaactatttatgtctcttcagctgttggggagttgagatttttgtctttttccctgtttctcaataagagcgcatggataatacagtacatttcccctcataaccagcatatatagctgatattagagtctttgatgacctgaaaatgacactttctgtatcattaaaaataatggcaggtataagctccctcttaagcaaatgaagactgtattactgtgtcgctatagatacgcccgctcctaatccatctgtctaccacttacttttcttcttttaagctgtttgcctgtcaaccattttatagagtaaacagtcaggaggccagcattggaaaccaactggacatggctaactgcagacagcctgtcatttcaaggcttcgtttcctccttggggaattctgtggtttttgtaagacccatgtgaaatttactccatttacctgacagaggcaaaacctctctgtcagtgctgagcagaggtcagggcatgcgccccaagtagtctgaggtcccttttagttgtgtgcaaaaaatgttatctatgtatggttagtttgggatgggggctctatttctttcaggttttcaaagaagcaacaataagaagttaatagattattattcccattttataactagggaacattgaggaacagcaagtgacagtggctactttgctgctgaaatataaacatgggattagatgtcatagctccctaaccctataatactataagttcataggcaattatggccacagaagcatacagaagtgggggcatctggcccagattggggttttcagggagccgcgtgcctctcgtgatgtgtccataagggcctacactcattggagttggccttctccactaaaccaccatatgcttatgcagttggattgagaaagaggcatctgcgagaacccaccagtaccccagtggggaaaggctgcagtccagataactgaaatgttaacaaggcagaagcacttaactttggtctgccttaggtggcaaaggaaaccagagagaacaagtatcggggctctgctatcaaggtaaatcacactacattctttccccatgactcttccccgtattctctctgtagaatctctgaagtttaacactcagggacaggatacaggagggtgctgtcttatcagcactggaaatggaaatggaccttaagatcccatagaccttgaaaaaccatgggcatcaagatgcagactcaactcctccgtggcaggaggggcatttctttcctgccacagagcccgaccctcacatcgtacttgtcagttcagagggttaccgtatggatgcccttttaacttaaccgttaacctcgagatcttctaccccccgccccccatttgatatcctaggtctgcatttcagacattctttttctccctacctagaaattgttgaagactacacagaattgctaatcttactttcctgattatcagagattgtatttggttatgcttaataaatagtagaatagcctgtgtgcactgagagggctagtgtctaactaagttctacgattaatcctcatccatcagtattcctaaaacgtagcccatagcttgattataacacttttcactaatttgggttgtttacatgtttatttcttttgcttagacagtcactttctcaagggtgaggcccatccgtgccttaccctcattgctccctggtgcctaatgttcagtaaatacgcacctagtgggcaaactgacattggttccaaatgattgcttcatctcgtttagactgaccagtttgtcaagagttctaactgccttaacctttgcaattgatagcattgtctccttatcttccttctgtagattttttttaacacgattaaaaaagaattctagagagttaaggctcttttggcagtagacatcaatgtttcttttgaaatcctccgttttctaggtgcagagcccctcttggatgcagcctcagccgtacattctgcagcatcctgtaagtttctcgtgtcagtgactttgtgtcctccgagtaagctgtgtgtgacttgttgctttaaaactctcggaccaaagatggtagggtagttgagaaaactcaaacatagaatatgaaaacacaccagtttattatgaaattttaacttgccttcctcttaaaaggaattattcgtagacattaatttttatattaagagcttaaaacacatcctcttctctgctcagggcaggtcagtaggattccatgagtgaccaggtgttttgcaatgtgtagaaagaaatagctcttccccttgatatcccttgtaattcagacctaaagttcagatccaggcagatcttttaatgtcgcttggcctgtctgtggaaagaataagcaacaagacaacagtgcattctataaatcacaaatgtgacgtcatcgatttcagcactcattaccctaaggtgtatagcattggtttttagcattatactagacctttctgtacaatatgtgtctctgagacacacacaaaatccagttcattgaattttaaacatacagtcaaaagttcaaaacaagtgtgtagaagaaattaacaaatcagactaagaatgccttggtaacacacacacttgccacaaaaaggccacagatttggccctttggtttctacttaccagtgcaaagtaggcattctcctatgcaggacacatcacaacatttataatacaaatcccagatgatttgtttaggaagagaatttggtcttggccttagaatgaaacagggagtttctctcactagtctgctacatggacactgaagtgtagataaaagagcaattaagaactaacaagtgctgcacaggaaatgctgagagagccttccagacacaagtaaaatatgtcctgtgcctgctcttgtgtacacattcaaaaatctacacagcctacatgtggatgtccataacatccaccccacattcccatggcagtctgtgtcctgaaagctagaagttagcccactcttaatttgaagactccttagtatgaaggagggagaatctagattctaataatctagacttctaatcattctcactattctgtgctttttgatgatatactctaaaaatgaaatatatactttttcttttagagacaaacactgcatatattttaatttagctgtctggggtgacctgttttgctttctccacccagatacaaactataaaaaacaccttgttggtgccctgaactggaatctgattatcagcaaataccactgtgtttcagggcaatcagctaccatgatctcaaaccatgttttcatattcctggcgttcagcagagtagttacacgctatagcagttggatgcttgcagaaatgggaggaagtgtaaaactcactgatcatgtagagaagtttaaaccaatgtccaagcagttccattttagttgctgtatagtctgtatagcatgatctagccattgacattgaagacagcaaggcagttaccatttcgagtagaaagctaagttaaaaacaagaacccaaaggaggaaatggttcatgttcccttagaagctgctaagagtgggtctgttagaaaaaccacattatgagccgtttctttctttctttcctttctgccctctgttttcttacacacatttcgtttgaattttgatggcaaaaaacgttccaagcaagggatctggagtgggaattactgctcctaactgaattggcttcccagacctggaacagggagttctgaaaattacccaggaaacaaagaacccactcttggtcctgacttacttagtcttgaaccagaatatccgtgaacaagctgctctgttggtcatgttatattgtggctgtagaaaacaaaagctacccttttctctttttctttttccgttcttttatttattgtttttttcttttaacatgccgatggtccacaggttgtttcgtgttacaacccttcctgctgggctttctggctttacagttaggttaggttgagcgcagggatttctgtgggatgaaataacactgctacctcctctcaactcttttatgaaagtttcaggaaagcagtctggaagatttaagggagttgcttgaaatacctcttgcaagtttgagggaggctgtgtttgccttaacaaagggttctcttttgcagattgtaactgcagaatctcaattctcgacatgttgtcttttgtccctcttccctccccttcccagggtgccgtgttaactccctcaatggaacataccatgtcactacaacctgcttccatgatcagccctctggctcagcagatgagtcatctgtcactgggcagcaccggaacagtaggtggcaaattaatatcctgttttcctgccaataggaaagtgaattaaagaagcccatgtcatccccggtgaaagtccagggtttggggatagcagtgattgctctgagccccttccccatctggcgtcgattttcgcaaagtaagatggcactcagaaaagtctcgattagtcgataacttgcaagtccatctctggatccctcttgctcacacacacagcacccacacatacccgggtctagcttttataacccatgttacaaggttgggttataaggctgagttaatactaggccagctggcagcttggcatttgtagagtgtagaatgtaaaagatggacgaaggcattcagcacagcctgtggctgtaaaaggcaaaaggccctgggttttccctcttattctgaaaaccagccacagcttctcatgaaagtgaatccagaacaatacacagcccagaagcaggccccaagccccagctgccttcgggaaatgagactgctggaattgactaagaatggctccctggcctcatccctagttcctttcaggtctctccctgcacagacagtatgcggtctcaactcagggagtgaccagaaaatagcatggccacttgaggagagatttttatgatacattgacactactaaattactgcagatgagaaacattaatgaccttcacatgggcaagtttttttgttgttgataaattcaaagaaacatggggttttcagtttgatgagttgaaagcattttcctttgcctttcagaagatgtatacagtagtcaagctttaagggctgtccatagagatgcattctttgagccttctaagtactttatatccatcccagttcccccaccaccccagtaacctgacctttgcatggcctgcctctgcataacctgaccaccttctccttttcagtacatgcctgcaacatcagccatgcaaggagcctacttgccacagtatacacacatgcagaccgcggcggtgcccgttgaggttggtatagagattccgagtggcccctgtggcagtgggtacttttacatttgagtcacttaaatagaacaacaacaacaacaacaaaaagttatcaagaatcaaatactttatcaaggcacagtggcacatgcctgttatcctagcaccagagagccaaagcaagaggaccgacaggttcgggccagcttagcctacctgcatagctagaccatccttcagaaaaggaaaaccaaacaaaagtaaagaaatgtgtgtagaaagagtatgcactttgtattattttggaactgtaacatactctccctatgcaaattagtattacaacatccagaccacatacctttccaatcttgtagcacattccatgccacttcaaggcctgacttgttcccccaaaatgatagttataggcacattaaagtaaagttggagtttgcagttctagtcctaaagattgaatcagtgataataattacagaaagaaataattcagatactggaaaaaaaggaaaaccttgcatttctaaattgttaacaagcatgcaaaagccatacctgtttctatggctgactactcgtcattattattttagaatatattgtatttgaagaagtctgatgcctacattatggttagacaggaagcacagcagttacctgcagaacatcctcaagagtccagggaagatatcagttcagttatcttacctgctgagcatcctccagagcccagggaagttatcagtccagttatcttacctaggaggcagagcccagaggatcctgagaattgtggttgtattgtttacatgatcatatagctctgaacaacaactgcctgaactcacagcttttgatatatgaagcctccataacaggggaaaacaataattttctttgtaactgcttcagcaaagcctgacttacggcttttcaaatgcaacttgaactgagacaaggcaaaatatccaaaggtctttgtttcttggttttattactcttattttagtaaaggtccagtcatggcctcttacatgccaggcaaattgttatgccactgagctatgtccatgacccttttaaagtcatgacctcactctgcaagccaggcaggctgtgaacccttctgccttccgtttcaagtcactgaggttacataccctgcactgcaggccccaattccatttgctgagttgattgacatttttctgcatataagtattgagattgtgaggtatagctgatgccttccggggggggggggggtgggcctacgacacacaacatatgcaccctgtgtcttggactctaaaatctgaaaataactgaattttaaactttatgtggctccaaggagacgaagccaagagatttctttgatcaatatttaagttaaacatttggacgggaggttcttggggtctgtcatatttcatctgcattaaggcaatgattagcctttaaaagctctatttgactttgaaggaattcactttgaagaatgtttgtatttaaggtgtatgtccttggactcaggccttagcagcagagttaagatttcattgctaacatgtctcatgcattctgctctgttgtaggaagcaagtggccagcagcaggtggctgtggagacgtctaatgaccattctccatatacctttccacccaataagtaactgtgaggtatgagggcaaagtctgtaactgcagagctcaaatgaagcagtctggggtactgttatcaaacgatgcttagaataattcagatccaatgtgtttatggatttgtagattctgtctagataactaatgatgcttatattgaaataaaatatgtttttctctacctcaaaattcataaaaatctaaggcatcatagaacatactgggtcccaaaattgccctgtactagaagcatcttatatcacattgcttaaatactgactaaggaagataaagcgttaagatgttgcctaatcaagtctcacaaggtcagcaacatctcggctatgaattcagattattagcctccttggagcaaaagatgacattaccagctctcactggagtcacacatttcaaacttcactctgtcacgcgtatcttagtcaaacaactatacgtaatccagctgctggattgtctggtaacaaacagtatgtgttgtttgttgatctcaccaagtcaccctttgagacccatgtggagttggctgggactcccttgaggaaggaactattttgcaagtcccaaatttgaaaggtagactcaagaaattgaaagcagtccccaggtccccagtttatgtcccttcgtctggtaccgtggatgggcacacagccttcatctctttaagacaaaagatgacgaagcactgccacttggttattaaatcagcaaagacattggtcttttatctttcttttccagatgtaccgaagggagttcttacctgaagaagggtgtgaaggctgaacaatcatggatttttctgatcaattgtgctttaggaaattattgacagttttgcacaggttcttgaaaacgttatttataatgaaatcaactaaaactatttttgctataagttctataaggtgcataaaacccttaaattcatctagtagctgttcccctgaacaggtttattttagtaaaaaacaaaaacaaaacgaaaaaaaaaaaaaaaaacggaaaaaaaatcaaagatttttatcaaatataatgatgcaaaaaaagaaaaagaaaaaaaaagagaaaaagaaaacttcaattttctgggtatgcacaaagaccacgaagacttatccaagtgcatgaccggatttttgtggttttgttcattttgtgtttaatttgtcttttttttttcagctgtatgaaatgggctttctgaagtttcaattgtccgacttcacccatggtgtcccgtgcttgcgagtgtcgcagtaactcagtgttggcctcactgtctttgcttagctctccgtttttttctttcgacgtagtgtgaagtgtcttatccttttctatgaattccaatttgccttaactcttttgatgctgtagctgtttcagtaaagttagttcaacctaatgatgtagaatgctttgaccaaatgggctggtctagtgcaccttgtaagcagcagcctagggcttttaaaaggtagtcaataaaagttgctgaaattttggcttttttaaatatgtagtaggtgtttttaatgatttttcacatagcgtgtaaggtagtgaagtgcaaggagggaaaactgttttgtgtgaaacacattttctgactggggggacttttaatagggtaaattgtttataaggctgtacactaacagtttcccctaatagtgtgactgatttaggatatctgctgtatgatgcaatgtaaagtcttttttgcctttttttcaggaagaaaaaaaaataaaacttaacgatgttctaggtttagtgtaggtagctgcggggatggggcgggggcggggggcgggggaggggagtcaccgaatgttttgtcctttatactaacatagtgctttagaaagagaaccacgcttgagatctgagaaaccgatggcgggggggaaaatggggttgctgttgaaactagatggtgaaagctaaaagtaaggatttctcttcaaacctaagctgagatatgaccagaaggaaaacgattggctacgagctctctctctctctctccttctccccacccccctctctctcttccccccacccctctctcactctcattctctattaggtaaatttgaaaaactaaacaaacaaacaaacaaatgacttggcacttttaaaggtaacttcaccaaagaccgacgagccagtagccagcagctccacctatctcagcgtcacatcctgtctgtcctttcttttttgccggaccagtttgcggttaggagaatgtgccttttttgtaccttcgcattaggttttataattttaactgatgtatggactcacagagacaaaatttaaaaaatttaaaaattaaaaaaaaaaaaaaaaaaaagcaagcatgaaggaagatttgaatccaggcagtgccgccctctgacgtcatcactacaggtgtttgcgtggaaagaaaaccaactttgaaactatgaaattcctgattcataaatacagttatttctactttagtacatacaagataactcactgttattaacactcttttttattaaggcagttgcatacgttttcaaaagcaatggtgaattaagttgtcttccaaaactgtgtacttgtctggtcagctgtacgtgatcagttatctacctcagaggctatttttcttttgtgctgggacaggttgctggccctccctgtttccaccgaccaaatcctcctagctcaggagctagggctaagcagttacttcttttgagtattttttagttcttaaattttattgcttgtatttgatgatagatgtcagcgacatttcatagtttcaaaaatccttgctgctctgaaagtgtagattctagtgaaaattacatagtcataagagaaatgtggggttttttgtttttgttcttgttcttggttttggttttgtttctgtttttgttttttttaagttgtggtattattggttttatgctccctaaaacttgtgctttgtgaagtccagactgaaggcagcacaccctccgtggatcgagtatgttgatcagcccaagactctcactacttgatatttttttccattagttaagacagaaagttgatagctcagtcagtaggggaggggagatctgctgctaggtatgtctgaactaagtgccatactcgtctgggtcagatttgggaaacaacctctgtacatataaaagaaaaaaaatgtcagttaaacatcacatagtagacagccattaaattataaaaaaaattaatttatgaagaaagaccttttgtacagattgaaaaaaaagattttcatagagatatctatatgatcaagagagttaattttttatttttgttctactagtgctacatacttgccagtggtgacttatttaccggttcaagatgactctgtagttttctttcctaggacttgttaaacgccaaaagacatttttgaactgtacatttgatcagattgttagctttttctgttttatttcttttgagaacctttgaataaaaacatctgaaactttcttcttcctgtcggttttttgaaagtagatggaagtcacacatcaaaatgtcacctcacctctgacctcgctcgtcagctcagtaggctggttcagaattgagttgaaaattaggtcagattccatatggacagaaaattccattttcttgaaaaaaaataagaaacctttccactcctgtgttgctacttgtttaaatctgtgctatgaccttagatatctattacatatcacctggccctaagtccagcccgaactaccccactcatggtctgctttggagcttctggttcttttgtggtattggcaacagtccttggcctcagacatcctaggtggtgctcttgcattaattacccattgcttggaacaaaataaagacattttcctatttgcagccagcactaatatgtcaaaataaccttatattaaaccacagccttttaaaagtgggttctttgttcacaattggaggcacccatgatgcacttgggggatggggatgggacctctcttttccctccctgacttgctttattgaaggcatataataccaaaaattgacacctacccaaagtagagtaaatgttttaatggagttcatatggtactgtccatatagttgactcgaccagagtggagggtagaattcccactacatttcttattttcagttgttcagttgctctgtgtatgtttgatggaaggctgctcataaaccacagtgcacacttgggagtcaggggacaacttgtgtaagttaagttctgtctctgccgtgtgaccctagagatcaaattcagtcagctcgctgcaccgtcccgcaggccctcgtttctgaatgactcctgaggtccgtggcgtgctgtctgaattaggtaagagacatgtagatccctttacttggaacagctgagaaaccctatacccagttcttgatggcttcttgagcagaggaaatatgtccccttgatgctgagcaatgcttcagagacaaaggatgccacatcccaggcggagcatggcttcagacaaaaagggcatttcggaacttaaggaatagatgccaccacgcttactaactacatacctatgtgcccttccctatgaataacagcagaagccagaggaatcactaagttgcatggcatcgtaagctttgttaacctaataaggtctcacgttccctgtgtatccaactgactacattagacagtcatcccttggtatccacagggggtatgggtcctaagactccatagatgccaagatccacacatacttaagtcccttaagtaataaatttgtgggggctagagatggttcagtggttaagagcactgactgttcttcccagagatcctgagttcagtccccagcaaccacatggtggctcacaacatctgtaatgggatctgaggccctcttgtggtgtaatggaagagagctacagtgtactcataaattaaatgaatgaataaataaatatttgcatataactgcctatatagtttgagtcattgctagatcttgtgtgatgcctaatgcaacaaaatgctgtctaataacagttatattgtaacgttcataatgacaggaagatagtccatgcatgtgcaatgcagaggtatttttcccttaaatatttcattgaggactctctaattctcatgcagaatgatggacatgggctagccatttccaggagtttaggaacacctatgtacatggaacttgacgtagttacatgttgacttagtatacaaagacaaggggcagcacttctgtggataagccaaagtttgctgggaggttagcttgtgtcaaaattaccttctagtcggcaaagtggaaaggttgaactgtgggttggaaaaaggaaaagtatggatacaacagttctctagtgtgtgcttgctgcctttggtggcattgcagagtgctagagtcccggtaccccagcatccttgacttgatgagtgaaggccctctgtatgtccaagggagcacaaatacaatatcagtgggagaaaggtgaggctccctagccccttagggactgtttaaatttggacacacaaccaacagtaagtagcttctccccgtctgcacagcccaaaagagacagacccagaaacattgctacagagatcatcagcctatcacactctccctcttcccctttccacaaaaagcctaatgtatccagtagttgggggagggcagaagaatcagaacttgggtttgaagaaagctaagcggtttcttaaataccaaagcagtgagatcagcatcttcagccatggctggggacagggtggtgaccatgtgctctgtggctggctgctgtgcactggtcaggatcatcagtatctggggtcactggcacagccaggaggtgtgcgtgcatagccttctgggggatcaagtgctcagcagtggaatttgaatcttactcatgggctccagagtgtctcaggcactagagctccatctctgtaagataagatcatgtttgagctggagccactagagggaggattttattattcaaccttcagtgtgagcccagaaagagaccagaggcagtacgaacttcaaggccaactgccagagagtgttgaatgtctcagagcatgtcctgctcaaatttgggcttcaacggaagaccccaaatagtcgtattaatcatagagatgggagcaagcacccacattgtgggctttgttgcttagactgcagagtgactttggtgggatttctaaggccagaggtggccacggaacagcaaaagccaaagagctggcaagcacatagctaggcacaaagtaccattaggtctccctagctgctccgaattaaaagcaggtggcattggcttaaacacacacagtagtgctattattattattctaaaatgtgaagacttgatcattcacatgggcacagaacataaagaagaatagacataccccaccctttggtgcccctaaagctgttctgctgcttgttcctctaatgatgcttccccacacttcacagagtatctctaacagccttcacatcttcttgccaagtggagactcttgccatttcacctcctagtgttggttctgccaactggaataagccagaatcctgttccagaagaagtcagtctgaagtgagcaactgtcactcaacagcgctgtacttctctgggttgaacatcccagagaagctcagttttatctcttccccttactgctggctgcacactccaccccagcagctcgccgcccccatgtacctcaactgacagcagtcactaggtcaccaggatcgccccctgccctgctccatccaaagactcacaacagtttccttcctgactaattgggagcatgatagattcttgaaatatgaagcgagaactttggtgaccagaagagtactcatgccaaggtgttgagtacagaattgtaggtacaatacaaccttaagtatgaaatatttaagtatgaaagttgagactgtatttcagagtgcttagtggataaagaccttatggaaaggcctgtggaacatttttatttatgtctaaaactatgcaaattattatgcaaatgcaggagagatggcccattcgttaagactggagcagctcttccagaggatccaactttggctcccaatacccaggaagcccatgaccacctgtaactccagattcagtgccctctaccagtctctgtaggcacccaaatagacataaaaatatttttttttccttaagatactgtataacacattggaaagcaaggtaacatgacatgatctcgaatgaattgttccttgagggagaaatggtaagtttatcgtcttgatgtggcaatgtcaagtaacaaaatcaagagctatgtaagaagtttgggagatctgtgaaggaccacagcatttctcctgagaagctctgacacaccaacctattcctcatctctgataagaactactccagagcgttcactgctttctagaccttgtgacaggtacaaacacctacctcagctctgcccttgcccaagtgaggcttggagcagaagtcccgagagtgggcattgctatgctgctcctggtctgaagccactgatgtaacaagaaggcgttatgttgtctcctatttgtgtatttaatcgagtagcatatcagatgctttctatacagcattctgaattttttttaaccagctatcatttgtcctcaattacagattatgaatcagccgatatctgtaatggttcttgaatatctgttcattgaataggtggtttcttcttgggtacggcaaaggactgttctctgcaagtgattttgagatgctatagactcttaaccggtgtgctgaattatgttccagtcaaaggctcttagcccatgtacttcatccctcttagagctcctttctcttgcttgacactcacactgagagtgtgcatgagatcacaatacctctagtggcttacagagcattttaagctactctcaggacactgtctactctgcttcaccagaaacagttcaaggctgtcactagattgcacatttgggtaagaggccttttccatagccagcacactggagaacaagcaaacagtaacttctgtttccttacacggtaccttttccgaggattctcagaaatgatagtgcatccctggtttgccagccggcagacccttgagaactgaggacaggaaacacagggtcctgaatggcctacggtcaaatgctgttaacattagtcctcattccttctcctaaattaacaagaaatgtctgttttctataatgtgtgtccccattgggaagacatttgatgaagtaaatatttagattatttttaaatgccaaatacagtacaaagatcttctctgatctgtttgaaagaaaaataccggcttacgacaccacacaaaggacaattctgtatgatcacaattcaactatgaaaataaggtaagtaatgttaccacagataagccctccgaccacagtcaggttccatcaatgagtctcgagttgttctttgttgcaaaaagatgcagctggaaatcccacaatgcactcaattgtcccgtttttattttctctcagtatgaagtagctcatctgtccttgactttcatgacttcaatacaattgaggattataaaccagttatttggggacatatcctccaattggtatctgacatttctgggtcatctgccgctggcaggattaccaccgagtaaagctggcttccgtcaagaaagcatgatgtcagcttgctttgtttctaggcatgtcctgcttctcacatagccacagtgacatctgccagccagtgtgccatacagttaccctttgctacttggcagttacaaagtagcttggagaaagtactttgaagtcatggaaacactctcaccctgttactcattcccttatctggatgaatagggattcaagttctcttattttattcagtgggttgtaagttgttacattttttaaaaagatttattttatatatataaaacaaataatacatacatatatatatatgtatgtatacatatacatacatatagatacatatacatacacaaatatatatatatatatatatatatatatacacacacacatacatatatatatgtacactgtagctgtcttcagataccccagatgagggtagcagatctcattacagatggttgtgagccaccatgtggttgctgggatttgaactcaggacctttagaagagcagtcagtattcttacctgctgagccatctctccagcccctggttacacttttagtacaacattatcccgagtttggccagtgccaccagctagtgtgtctttcaggcacacctgatcagtttataaacactgtcttgcattctggtctgccctggtcactccctactccagctagaatcatctatctctctcaacctcttttcagtagaacctgggttttacatgctaagatctgggcatgtagagtttattcccaacatgtcactgttcctaattcttgacattggacagtgcagagggagcacatgcacgtaattacacacctgccttaatctaaacacacattggaaagcacagatttaccataaataccagtaatttcaaaacaacaccatagaattcactttccttcatgtttatatttctgacaagcagaaacctggtatccctggttaacttgtccattcgatcagtcctcctctaactagttagtctcccatcttggttacttcccaagttacaagtttcagtctggattcttcaggctccatctcctcccactgtggggtcagtctggcaaggaagtggccctgtatcacccagagcaggcagctatgaggggctctaccatacagtgtcacatgagtgccctctggattaagctggtcccctgaaatctcctcatcgctgtcctgtgacacatggcaaaggttgggacagctaatgagcaggaaaggtaactgggaaactgagaggaaatggaaagtaagaataggagcacaaaggagagagagagaacggaacaaaatggtgggtggttctaaggggcctgccagactggaaagtgtaagaaaaatagaggagggagagaagatacactgagcagtcaattccctcagctcccagagctgtgacctagcaaacaaactgctttggtggctaagttccattaaaggagctgtcgtgtttctaagataccaacaaggagctgccattttggacatcataaagccaagtcccacactgatcttcagagagacctgaacctcccagttctccagaaccagcttcatggcacttggggacatggcccgccagttaaaccacttgattaaacattattttttttttaatattgcagtttgtggtagttaaaatatgcttgacccagggagtggcattattaggaggtgtggacttgttggaggaagtgtgtcactgtgggcatgcgctttaaacccttctcctagctgcctagaagccagtcttctagtggacttcagatgaagacatagaactcccagctcctcttgcaccgtgtctgcctggatgttgccatgctcccaccttgatgaaaatggactgaacctctgaacctgtaagccagccccaattaaatattgtccctataagacttgccttggtcatggtgtcttttcacagcagcaaaaccctaactaagacacagtttttagattttaattgtacctcattaaactgagagagggcaagagtaaaaaccgatcttgagaattatttttggttttgtgtctattgtgtgtgtgtgtatgcaatatgcatgtgtgtctcttcagatgtgaatgtggagggtggaggacaacctctggagttgctggtcaac

SEQ ID NO: 28 - DNA, 1369 bp, Mus musculus
cagtctctggtcccagcacaccccatggccccacccagtcccagcaccaccagcagtaataacaacagtagcagcagtagcaactcaggatgggatcagctgagcaagacaaacctctacatccgaggcctgccccccaataccactgatcaagacctggtgaagctctgccaaccatatgggaagatcgtgtccacaaaggcgattttggataaggccaccaacaagtgcaaaggttatggttttgttgactttgacagtcctgcagcagcccagaaagctgtctccgccctgaaggcgaatggagtccaggctcagatggcaaagcaacaggaacaagatcctaccaacctgtacatttctaacctgccgctgtccatggatgagcaggaacttgaaaatatgctcaaaccctttggacaagttatttctacaagggtcctacgtgattccagtggtgccagccgtggtgttggctttgccaggatggaatcaacggaaaaatgcgaagctgtaattggtcattttaatggaaaattcatcaagaccccaccaggagtttctgctcctacagaacctttactgtgcaagtttgcggatggaggacagaaaaagagacagaacccaaacaagtacatccctaacgggcggccatggcccagagatggagaggctggaatgacactcacttatgacccgactacagctgctctacacaacggattttatccttcaccatacagtattgccacaaaccgaatgatcactcaaacttctcttacaccctatattgcatctcctgtatctgcctaccaggtgcagagcccctcttggatgcagcctcagccgtacattctgcagcatcctggtgccgtgttaactccctcaatggaacataccatgtcactacaacctgcttccatgatcagccctctggctcagcagatgagtcatctgtcactgggcagcaccggaacatacatgcctgcaacatcagccatgcaaggagcctacttgccacagtatacacacatgcagaccgcggcggtgcccgttgaggaagcaagtggccagcagcaggtggctgtggagacgtctaatgaccattctccatatacctttccacccaataagtaactgtgagatgtaccgaagggagttcttacctgaagaagggtgtgaaggctgaacaatcatggatttttctgatcaattgtgctttaggaaattattgacagttttgcacaggttcttgaaaacgttatttataatgaaatcaactaaaactatttttgctataagttctataaggtgcataaaacccttaaattcatctagtagctgttcccctgaacaggtttattttagt

SEQ ID NO: 29 - protein, 376 aa, Mus musculus
QSLVPAHPMAPPSPSTTSSNNNSSSSSNSGWDQLSKTNLYIRGLPPNTTDQDLVKLCQPYGKIVSTKAILDKATNKCKGYGFVDFDSPAAAQKAVSALKANGVQAQMAKQQEQDPTNLYISNLPLSMDEQELENMLKPFGQVISTRVLRDSSGASRGVGFARMESTEKCEAVIGHFNGKFIKTPPGVSAPTEPLLCKFADGGQKKRQNPNKYIPNGRPWPRDGEAGMTLTYDPTTAALHNGFYPSPYSIATNRMITQTSLTPYIDVSAYQVQSPSWMQPQPYILQHPGAVLTPSMEHTMSLQPASMISPLAQQMSHLSLGSTGTYMPATSAMQGAYLPQYTHMQTAAVPVEEASGQQQVAVETSNDHSPYTFPPNK

SEQ ID NO: 30 - DNA, 21402 bp, Homo sapiens
gcagcacaccggcctgccaaacagaagagcttggcagagaaattccgagggcagggaggcactttcttatctagaaatgagagacatgaatccaggcctctcttctccatcaattctctaaggagatcccgcttggaagagagggagacaattttatcacagagaacttgatcaaaaaatgaccaagagataggtgccaggatgaaaacaattcttaccagctggatatgttttggatcatctaacactactctacatcctgttagaacttccattattacctacaaggaatatatagaaagtcagctatatatcttaaaaatatacacacaatttgttgcaactattaaccatgactatgaatatagttcattctgattaatgattttatattttattaattgcttgattacacaaaattaatatataagatgagctaacaggaaatcaatgagtcaaaagttaaaactctttaaaaaattcttagaatctagaacattcttggcaataaactctcctttgttaactggcagttggtactcacaattccaaagctgtagacatctgttttaatggaaagtttcccctgtctgatgtactcttctggcatgtaccacagatgtttactgctgctgctggtcatatttatggtacaactctgatgttctaggtgggaccggaagtgtgccatggcaaaatcagttagtttgggttgaaactgatcatccaaaaggatgtttgcactaaaattgtgatcagggacaaacaagacaaaatatcataaaggcacttcagtgtaaacaaacatactataaactcaccttcttcatatctggttaattcgaaacactgtcaaaataaagccaaacaaatttccatgaactggagaacattctttcatttttcttaatgtacaaatccaagtgttatctgcaacctagaataaaaacctgacctatgaacagtgggcatttcaaacttaaagatacatatgtgaagttgctggataaagctgatgctttctcactaagagaaactgaagttaaccaaaacagctttccttgtgcttttcttacacttacggagaacatgaactgagttttaatcagctgattatgtgtctgttatgtgcaagagctgtgctgtgaaatgcttagcttatgagcgcagagccactaacttggaatgatttgaggactctttggtagtccctgccctcatggcagccctatcccatggtttcatctctgttttttggtctttgagtcttatttaaaatacaaatgtttgcagagacaaaggcaaagtgcttatagtcaatataagcagttgtcacattaaaaaccttaagaatcatctgacattttggctgggggtaggcattggcttacttttaccttcaaagggctgtcaaagcaggaaccggaaaggataagccaagagagagatccatttcccactgcatacagccaggagctctgcctttccctggctccatgaccacccacagtttccttcgccatgtaagcctcagtgccctctctcctctcatgtgaaatgaggagaacagaactctggcagggggaaaacgaagtgcatagtgtcctccccagcacttggtaatgctcaaaaaatggcagctaggaggaagattagtaatcaattctaagagaacagatggatattgagaaggaggtggggcagccaacagaaaggcatgcaattcccagctttgcttagggctcttcagagcttgctctttatttcctgaaaccaaagcatctaatagtacaccttcccatccaaaatgccaagaggcatatttgtagtacgacatgctgttactaaaagtgctacagcaacagccacgggatatcaagaagttcttaattctgaacaaattttggatcttacaaaagctccagaagtctttgctatccctatacaggtaggttaacgggcaggccccagttccataggtctgaactgcaagtgttcttactgttcagaggactcagagtcctacttctatttagagagtttgggggaaacagttcaatgtatgaagctaaggccttaaagattctagtccagactttgtctagggctgagttgacaacagaaaaaacaaaggcacttccggtggtctttttttttttttcgagacaaagtttcattcttgtcccccaggctggagcgcattggcacgatctcagctcactgcaacctctgcctcccgggttcaagtgagtctcctgcctcagcctcctgagtagctgggattacaggcgcctgccactacactcggctaatttttagtagagatggagtttcaccatgttgaccaggctggtcttgaacttctgacttcaggtgatccacccgcctcggcctcccgaagtgctgggattacaggcatgagctactgcgcccagaccccgcggtcttttaaggataaagacacattttaaactttatttcactcctccttccgctaagggtggcaagggaattgtaaaatccaaaaagcccaccttctgagctctagggcctcttatcagctgtgtgctcttagcatttatggaaggaaggtcagagaggcctggttcccaaggctcgtatcaatgagcacagttgtcatttctctccttgccttctcccttctccctggagaacccagcagctgctaaagccagcctgggcctcacacacccccatctgtcactcctcacccactcttactttctcacttggagaactgttgactatcctgacatacctcagatgaggaacagactagagtcagatccgacttctctccagctctagataagaagagactgtcagttcataatcacttcttccctaggttgactcttcaatggatcagatcaagtctgaggctcctggagatgccctgagggtttcagagtcctgggggcatttgaatgcaggagtttgccggtgggccaggaggcgaggtgggaaaaaaaggttctccaaccttcattgccaggaccccaccttctgcccttcaactttggagtcacttctgcatgccccatttcatttcagcacagggggagggtgggaatgttctgaatggcagatattcaatgtcaaacacctaaacatcttcctctatcacagctctaaaaaaaggcatagaattataattgacaatgccagaatcatgagactgcaaaagctgaatttttgaaacacacacacacacacaaaaaaaccctgaatcttttaagtacaaaaagggagaaaagagcaacagtaataacaacaaaaccttcaatctaattctttatttgacccatagcaaagctggtgggatgctttcagcaaatggtgagtcagcttctgtgaaagttgggcagaagggagttgagtaaccacaaacaatgcttacaccataaaacccagagaggactttgggtcagtgaaaggccatcaacaagatgtgaaattattctagggtactgaatttacaatttgaataatgacaatcggtgaaaagataagtcgtttttcagctgactttagtgtataacataaattttgagtccagtgatttattctgttctaaataaaggttagcggtagctgaggaagaaggatgttctgttttaggaaagcggaaattgcaaaaggcccttcaacgatcaatttctaccttaattcttttcccctgcatcaaccttaaatagaatgttcaaacacaaagtgtcttcagcttccatgcaggtcagctgagtaagttaatcctgtggggtgaaaataaactaacaaaattaagaacctaacacaactacagtcatggcaatatcatgcaaaagggcagcctgcaagcaactgtggccaccaaagagatagataaaagacatctttgacccatatccatggttcatatcctcaatttcatgcttctacaatcgatttgttctactctttatcacaaggctatttaccttaacagagaggccatcccctctccagataattcctttaacagaatgatcattggttgtacactgaggaagtatggagaatcctacacagatgatgagtttgtaacctgactctaggatgttacttaatctctctattagtaggggtctctaggacaattttcggggggacctgaatcccccaaacaaatgctactttgtaatgagaattgctttctttgctcaccagtttatctcctaattaagttcaatcccttggaccttaaacataagacaagatgctccacctagattataatgcaggatttgaattcaagtgaaaataccatatttggcatgaaagagcatgattggtttttaaagagagagatatatatatacccacatatatataatatatataccgatatattttatatatatatatatgtgggtatatatatagtatatatatgggtccagcagtccagcgcctgggtgcctggaaactctcaggaaaggccaggactccacagaaggacctagggaagagggggcagggagccacagattggctccagagataaagaggacccaacggcccctctgggacagcctgaggcaacagcacacaagtgctgtctgtattacggctgttgcaacactgagacacccctcaccagatgccctgcctcccctaaccagatgaggcaagactcagtttctcctagaacctgcaggctactaaaacagttgtgcaccccaccccaacttaagtgtgcactgcatcctgcctggaatgctacaaatctgaaaccctttattcccctgtgggactgcggagctttctttttcatccccactgaacctaggcaggtctgagagacacagtattcaagcttgtttttgcttgttggtgccttctgagtctaggcactcggtgcaaaggcccagtaatgggtgttcctcctttaattgtgaaactccaaatctacccacaactagcacaacccccctaagcctgtttccctgttggtataaagatctgatactgcttacttcacggggttcttaccagtattaaatgagaaaacgtaaggagtgacactcacagagggctcaaagtatgctttaaaggatacaggctggccattgtccatcctatgtccattaccttaccttaaaatcccaaaaggcttggttgcatgtctctagaagtccaaagacaccaactcaaggaacaaaaatacagggggttgtaggatgtccctggaaatctgaggacccttcagttagttaatgccaacaaattggctgagtttcaaatagttccaggaagttctgggcaaacgtattttccagacattttaagacaatggagagacagaaaaaaactggcatgtaccgtgcatatgtgtatgtatctatgtatataagtaaatgaatgttggggattagagtggtggcaaatagaattaataggggaaattttaatttatgtcatatttaattgttttggcatcccttagaaaaaatcatatttggatattttagaagaggggaggcactgggggaaaacaggaaaaatctgaggaaaaagaattatatatatctaaaatttttctgaaagataaaaataggctttttgagggggttatgagggaaagggaggagactgattaaagaatcttatcagtcaaacaaagaaagacactttgcattccctgtaggctttgacatgcctgttaaacactgagctgggctccaaccttcccgtctggggataaaggcaggaggagcctgggtcttcaggcaagggtgtcctggtggcagggaggggccaatctgtggccccctatgccctcttcccaaccactcagtttttctagtcttttggagaggaaattacccatgcactcactcactctgaccttacatctctgatcaatttccattaaaaaaaaaaaaaaaagtccattttgaagcaaatggcttcttctttgtttctttcctagaccatttcccttgtataaaagactgtttcacttggcaggagacaaatggcaatactgattaaagaacatgattttataggaaacattagaaatgttcaccaagattatctctttgctttggaaacattagcaggaatgaaatgtctgggatggaaaatgctaaggataaaatgcatttccatttaaaatagttcataaatgtgaaaacaattaagctcactaagggctaggagggaaataacaaggaagtttactgccttcagatgcttttaagtgatcctgtaagtcaaaaacatcttcgtttctccaataaaaatgtgagggtctttggccaagaatataggctgcaacttttcaagattcttttctttaagtcctttccttctcaaattccaccacctggaagcaggttttgtttttataacattctctttgaagagttcaaattactaagacattttttagctaaataaacccccagacttgttgaaaacaccttggaaacatgggcactgcttctcctgtgggtgtttctgagctgtgtctttgacagcttcttccttagaaagctatctactctcaccgctttccaggcccgatctcctcttcaatgcctcttgcttctgccaggagtccaatgtcagcatttccaagtttctgcacactaattatgctctcctctccttcccaatttccctgtctctgctgatgacgccaacatgcttccattaatcccagacctttaattccttaaaaagtgcatgatgattggactcacacaaacatggaatgcaacctcccttttcccttctacagccatgagacagaggccagtcactaatctctgtaagcctcagctttctcctctatcaaatggagataataactataatacctgaactcaggcttgctgggaggattgctaacaagttattcagcaggcgttgatgccaggtgaaaagtctctggctctcattgagctctctcatctgactgcagtctatctgctacccttaaggtattagtacttactatgcagtcaggacaaactatgctttctgctgtcttggcctctccccattctgttcccctcatcttgaaaatactctcccctgctttatttttatctgagtcctctctgcagccataagattcacttcctccataaacttttcacttgactgctccaaattccagtgctcctcctttctccaaaattcctgctgtacagctccaacgacattgtttgacacccacagggagcccacctgatgttgtttacttaagcataatgttgagtctatagaagatactaagtaaatatttgttgatataatcaattatgtaaagaggatttgaaactgagggtagccctagactactcagtataggaatggtgaatatgtggcttaaatgttgccataacatttatcctcccaaaacatcctcccatattcttggcaaacatcaaaaatttagttcagaaagcacccaccatagattctctttcaaccctgcatgtgggaaatcattatcaatcaatcagacatggaacatgagacaacactgacttgtcatcactgctatagaatcctgcagaggaggtgaatgaggcccacagggttgacatgacttgttccatgcaaaaccgcttaatagcagggccagaactaacacctagccccactatttttctgtttggtgctcttttgatttactatagttaactgagacatctttttactcagctactcatgaaagactaagagactattgatttcaaagagaaatgaaatgagcttttatctcctttttctttagctgtatatagataattccagcggcaaatgggcaagtcacaggattttagctccacagaaaagaagtctgaataatgagagctgcacccaaatggagctggacccccacaacatgctgggcccaccatacagcaagggttcaagtacaggttggatgaagcacttttctcacattgtggggggataattacagctcattgccaggcctgggttgtgctttcagtctatcacctcacttcctcctcacaatgctgggagaaggtggagcactgtcaccccagttccagatgaggtaagagactgagcctcaggggattaagtgacttgcccaagatcacagtgccagaaagtagaggagtagggatttgtactgagatctatgtgaccccaaaggccacactcttaaccagtgatgagagacagggacaacaacgagatcgctagggtggctggtaaagaaggggaaggacagatgaaagactagggagagggtgtttcagaaaaacaggcatttcagaactttgactaaaacctgctccagagtgggcaggtggctggaggcacctccctaaacatatctgacctcattctgatttggaagctgatcagggtaaagcttgaccaggatttaagagaatacagggtcacgttctcctgtaacagtcctagactcgtgagtacagagcccagtacaaaaataggcaggtgtaatgtcaaagaatttgacagcaacaagaggtcaccttaagactgtcttggttggctccgaatgtgcaagtgcgaaaacttttggccactctctggccacagaaagagaaaaaagacctgggtctgaactcagatttctttttcttttccttttttttttttagacggagtcttgttctatcgcccagactgtagtgcagtgatgcaatttcagctcactacaacctccacctcctgggttcaagcaattttcctgcctcagcctccagactagctgggactacaagcacaagccactatgcctggttaatttttttttttttttttttttttggtatttttagtggagatggggtttcagcatgttggccaggctggtctcaaactcctgacctcaagtgatctgcctatctcagcctcccaaagtgctaggattataggtgtgagccacctcacccggcctgaacccagatttctggtggtcttcccacatccacatcctcatcctcatcctccctcctccctgctgaagacatgagaaccatttcactttgctttagacaaaagatgttattcacactttgggcaccaggctgctgaataatgattttccaactttcattttaaaaactattttaaaaccataaaaatgacagattatcaagcttctttactgataaaattaattacagagaatgattgaactgataaggatttcatttagtaacttgagactgtcttttggaactttttccaattaattggtttgagacagtaaggtctgacgccaagttatttttgtctaataaattttatgttattgctagactagaacatacttctttaaatacaatctaaagaacataaagaagtaaaaaaataagccattgaaaaataagctataggttctccaaccaaacaaaacgttgttgatatttcggtatattttacttttaatatttttttaatgcatgaatttgtagttatacaaagttataattataaactatacgctactttaatttggtcttttccacttaatctcactttatatacattgttccatgctatttcatactatttaaaaacataacttaataatatcggaggacgcggcggcgctgctcctccgctgccgccgggagagtcggcgacgccgccagctccgcgcgcgaactcccgtccatggcacgcagagcggcggctgcccgagctgctcgagtctcgccccgcgccgcgccgcacttttagacgagtgcggaggggaagtcagcgcggagctgcagcccccgccggccgccgccgcgcggcgagagggagttcccaaagctgcctcggcccggggcccggccggccccctccttgcgtcctccccctcgcggcgaggctgccccgcgcccaggctgccccgcgcccgcgcccgccgccgcggcccgcagcgatgatcttccccagcagcagcggcaaccccgggggcagcagcaactgccggacgccctatcgcaagcagcagtctctggtcccagcccaccccatggcccctcccagtcccagcaccaccagcagtaataacaacagtagcagcagcagcaactcaggatgggatcagctcagcaaaacgaacctctatatccgaggactgcctccccacaccaccgaccaggacctggtgaagctctgtcaaccatatgggaaaatagtctccacaaacgcaattttgcataagacaacgaacaaatgcaaaggttatggttttgtcgactttgacagccctgcagcagctcaaaaagctgtgtctgccctgaaggccagtggggttcaagctcaaatggcaaagcaacaggaacaagatcctaccaacctctacatttctaatttgccactctccatggataagcaagaactagaaaatatgctcaaaccatttggacaagttatttctacaaggatactacgtgatgccagtggtacaagtcgtggtgttggctttgctaggacggaatcaacagaaaaatgtgaagctgttactggtcattttaatggaaaatttattaagacaccaccaggagtttctgcccccacagaacctttattgtgtaagttttctgatggaggacagaaaaagagacagaacccaaacaaatacatccctaatggaagaccatggcatagagaaggagaggtgagacttactggaatgacacttacttacgacccaactacagctgctatacaaaacggattttatccttcaccatacagtattgctacaaaccgaatgatcactcaaacttctattacaccctatattgtatctcctgtatctgcctaccaggtgcaaagtccttcttggacgcaacctcaaccatatattctacagcaccccggtgccgtgttaactccctcaatggagcacaccatgtcactacagcccgcatcaatgatcagccctctggcccagcagatgagtcatctgtcactaggcagcaccggaacatacatgcctgcaacgtcagctatgcaaggagcctacttgccacagtatgaacatatgcagacgacagcggctcctgttgaggaggcaagtggtcaacagcaggtggctgtcgagacgtctaatgaccattctccatatacctttcaacctaataagtaactgtgagatgtacagaaaggtgttcttacatgaagaagggtgtgaaggctgaacaatcatggatttttctgatcaattgtgctttaggaaattattgacaattttgcacaagttcttgaaaacgttatttataacgaaatcaactaaaactatttttgctataagttctataaggtgcataaaaaccttaaattcatctagtagctgttcccccgaacaggtttattttagtaaaacaaacaaacaaacaaacagatttttatcaaatgttatgatgcaaaaaaaaaaaagaaaaagaaaaaagaaaagaaaacttcaattttctgggtatgcacaaagaccgtgaagacttatccaagtgcatgaccggatttttgtggttttgttcattttgtgtttaatctgtgttttttttttccagctgtatgaaatgggctttctgaagtttaactagtccgacttcacccatggtgttctgtgcttgcagtgcgagtgttgctgtaattcagtgttgccgtcagtgtctctcttcttagctttccggcctttttttttttttccgagacggagtctcgctctgtcgcccaggctggagtgcagtggtgcgatctcggctcactgcaagctccgcctcccgggttcacgccattctcctgcctcagcctcccaagtagctgggactacaggcgcccgccactatgcccggctaatttcttgtatttttagtagagacggggtttcaccgtgttagccaggatggtctcgatctgctgacctcgtgatccgcctgcctcgtcctcccaaagtgctgggattacaggcgtgagccaccgcgcccggcctgtctttctttcaatgcagtgtgaagtgtcttatccttttctatgaattccaatttgccttaactcttttgatgctgtagctgtttcagtaaaagttagttcaaactaatgatgtagaatgctttgaccagatgagctggtctattatgccttgtaaaacagcagcatagggcttttaaaaggtagtcaataaaagttgctgaaattttggctttttaaaaataataataataataataataataatatcaaagggttaggataaagtcttttgtgactcatcactctgaagcccaaatacagaaaagaaaataaaggtaacagcatcttccattgttcactcctccaataaaaacagagccctgaattactctgggaaaaggccactgtttaacacagattttgagatgtccttttctcagccaattatcaaagccgtacaataaaactgcatccctcctagaagctatcttcccttacatagatttagaaaattaatatgacaaaggcaaaacaggcagggatttggacagctcagtcctaaaagcactgagctacacacagagggaccaacactcagggaggcctaggtttagagcacagtggaggattcatttaaaagagattcaggagggtaatctaggtcagccaatcacatctggccgaggctgctggggactgactgtcattaccatctgacaggtgttcagtggcccaaatgaactgagttagtttcattccagcttctagagaacaggtgtgcatatcaccaaacacgagggggaaatctactgttatagttggcactaattaacatctttgctggcaggctcagcagaaaggccaaaagttcaatggccgtggaagggactgatttgctttggaacaggcagggacacattgatgagcccttgtgaaaccacagttctcaaacaaatgcccacagccatggatctccataccctgacacatgcctgggtgggcacattctatggatgggttacattgaagtccttgaactctttggaacactcagaaaggcaacaattgtcagcagccccaccaccaagtaaaatataaaatacattgctagatgcatttcaagccttgtctcttccataatattcttgtttctgatcagatctctctgggtactctgtatctttgttacctgttgggcattctgtctagcagtgttgcttaaatgatttttatagttctgcacatccagacaagttcctgggatagtgacctggaagaactggcctcctcttaagttgtgagaccacctaagagactctagaacctttcagtttccacctatatcctagacaagctgcagactttcactagagcccagcttgtcaaacctagttcctcagcctagtcagaatccaaagctgcattccatcccctgctcaccacagtcctcattcttctgtagtctcaccttatcttattctccaaccttgtcctttcttttccaaccaactgatttctcttgcttttactatatacgtggcaattctttactctgttcctttgaacaaattattgcctccaccaggaatattctctccgcttctttcaaccaatccactgcaatgacccactttttccaagacttggcttggaactctctaacgagaggaagccttctcagaccaaccactcagtgggcatagttaccattgcactacacattttgtgtttgtgttatctttctgatcaccaggttgaaccttcaaggacaagactattatcatcactgtctctccccctgtggtctaacacaatgctctgcacacaacagatgttctataaatatttgtgaagtaagatgaatgggattgtcaagatatttaataaacactttttttttttaaagtagagaatggggtttcaccatgttggccaagctggtcttgaactcctggcttcacgtaattggcccactttggcctcccaaagtgctgggattatggatgtgagccaccacacctggccagtaaacatattaacagagaagtaatttttcttaaactagagcttagtcagtgggtccacttttcaaacactataaattgacgatagaggtaagagtgttaagtaaaaagactgattggccaccacactacttggcctctgtcactgtgccactcccaccacttctcaaccagtcaggataggaattaccactgaagatgtgtgtgctctttgtcaaggaccttatgccatttaaccctaggagatagaagctattattctactactaacattttgcagagaggaagattgaggcttagagacattaagcaatttgctcagaatcgcattttaagtggaaggtctctctgatttaaacattaggggacactgagctaagagaaaaggatgggaggagggtggggagcaaacatgtgaaaaagaaaaatcttcgagtcacatttttcagaactctgtcctgtcaaatcttccttcatagctgtggtggctgccatggtgcactctcccaccatgactccacaccgccccccgaccccttccttccccaccctgtccttccccaccctacttggctccctccttgggttccagggaggctctggttccccagcagtaagagttggctaaagatggctcacagctgagccacagtctgggaactgtcttggtagaagggagctgcctcacccagccacattactgctccacaagagggctggtcagatgcaggggtgcaaagctcagagtgccctgcctgcctctgggatgtctttgatgcgccaccccagcttcagtgcttccccatggcatggactgaggcctctatgacaataatatcccaactcaacctctccagctgcccaatcctgcctttttcctttcctcgcttcatttgctgtccctgagagccctcccttaaaaacctcctgcaggtaaatctgtgcttctgagcccacttcctggacctacctgaagacacgaaccaacagtgagaaagtggaaatgagggcccaaagcctgtgctctcaccaaataccagcagagagacactgttaggcacatccaaatcaccttgcccagtttcagctgtgaaaaagaacgggacatgggcagagcttgcctctgcctccctccctgccctgatgctccctttgcttcagttagtgaccctctgtccccatctcccatcaagagccaaaaccccaacaccttctcttttctttcttcttcaaactctgcattcaggaaaggatttgatgaactcagtcacacaaaaggaaacttaataaaattaatctattgctgcttggggctttaaaataagctaatacttattttaagtttagaccaaaggacaaatatgtttagcaacattccagatatttatttactcagtaaaacatatatttgagcacttagtgtgctcagtgttggttgcaagctgagtggaggagggattgttttaggttgtgggtggccacctcagccctttgaaagcaattccaacggataactccactgactgaagaccctcatggtccctctatattcaggtcccatgagtgtgcattaattttatgctgattctacaaagccattagcagttgctggattgccacactgcaacaggcacagacgtctatgggtaggtcaccccgcccctctagaactaagtaaaacctagagtcttttcctatggagttcatttcatcagaaaaacaagtaagcaatcagctccttttctgcccaagtcaaaagcatactacaagtttttttcaagatactgggaaatggttcagaagcagcagcagccttttaaattcagtcttccttgatattcagcaaaggtgtattcatgtacttttggacaggttgaagataaagggcaaatagaaaaaaattcaccgacagggggtatttactctgggtgaatgattctttatgtctagaagaagaaatgtgggagatgttgcttctaattttctcatgtctcaaaaatgaacattggggttgctgctcagcttgtcataggttaatatataaagttatgagacagcaggctcagtaggatgagcaagacactggagactcaaggacaaacaatttttattgctatttactactgccagcttgctaggaatccccatttaagttgcttaatttttctttaaacttcagttttaaaaaaagtacataaatacaggttcatttcacaaagtgccattaataattactaaaatacagatgcttctcaacttatgaggttacatcctgacaaacccatggtaagtcgaaaatgcatttaatacacctaacctaccgaacatcccagcttagcccagcctatgttaaatgtgctcaggacaattatattagcctacagttgggtaaaatcatctagtgctaaggctattttataataaagtgttgactacctcatgcaattcattgaatactgtactgaaagtgaaaaacagaatgattgtatggggatactcaaagtatgatttctacataatacatatcacttttgtgccattgtaaagtaaaaaaaatcattttgttgaatcatcataaattgggaccatctgtacacagaattgtctatcctacattgttcattaataattaccaaagataatgtaaactctctttttggcaacatacatatagctttttaaatttggtagacacattttcattaataaaaatataggatttttaaatacctagatgagaattcttaacacacacacatacataccaggagaactacagcagagaatagtgtgaagtatgactcacatgtgaggataaaagaagctttcaggtataaccaaaagctctggaataatttaccttgatatactgccacagatgaccgagcatggttgaacgttgtgcaggtagtgaatggctttggatattcctattaatataccgattcgaatgtgccaagggagtggggccgtgtcaccctaaaacaacaacagcaattggtttggttgcactttctgagtaaaaactacctatgtattcattatgcagacatacaccagaatagaagtagatagcaaggtggggtgaggtgggtgaatcaacgttttggttttccaaaacctatttttaattccagatgggtttccttctgctactgatgacagttctaggcctcttttatagacaacgaaaatactcaatacttctcaatattagcttaatcaaaacatagctagtaaggtaacactgcttaaaagttcattaaataagatttttaagttacttgtggtacaacagtatgagtaattgagacaatctgcttttattctcatcctaactgaaacaacctatttggaatcaatttttaaacttaacctccaaagacatctaacgaggaatcatgacatttattcaacctccttctctctctccctctctctgtctctctctcttttttttttttttttgagacaaggtctcactccgtgtcacccaagctggagtacagtggcagaatcatagctcactacagcctccatgtccctgggctcaagcaactctcctgcctccgcctctgaagtagctgggacaggcatgtgccatcatgaccagcagtttttgtttatttatttatttatttatttatttatgacagagtctcgctctgtcacccaggctggagtgcaatggtgcaatctcggctcactgcaacctccgtctccaaggttcaagtgattctcctgcctcagcctcctgattagctgggatcacaggtgcctggctaatttttgtatttttagtagagacggggtttcaccatgttgttcaggctggtcctgaactcctgaccttgtgattcgcccaactcgccctcccaaagtgctgggattacaggcgtgagccactgcgcccagccaatttatttttttagtagaggcgagaatctggctatgttgtccaggctgcctctttctctttagagtctgtgtcactgctatggtgatcctttgtattgaaggatactttaataaagttatacaaattaaaattatttaaggaataagagtagttgatgccaactcactggaggtacagaatcaaatataatataacatggttgccaaaagatttgctgggttcttaccatataatgagtaagaacccaacatggttaccaaaatgttgcacagaacacgttaactcaggtatttgctcagccttctaaaagtaagaaattaatccaagaagtactgcttccttgggaaacccattcttggctttcccctcatgcaaacacatcttgcctcccaactctcccagacggtttcagcagctctcccagggattcaaggggtcagaggatcagacagaataatagatagaacttactacacactgcaatctgtcaaaaagtgttccatttctcatgtatggataaatcagacagaacttctcagtctctgtaaaatatgcagccaactctagtatgtttgggtgatgaaaccttgaaacaaaagatgttttaaagccatcaaattgcttattcagacaggaaatgaacaacacactggtgtgggggtagtaaggtgggatggggaataggcctaaagcggaatataaattcagccggacacattgggtacagacacagatttgctttccaaattggtctaaagagttctaacggccaggtgcagtggctcaaacctgtaatcccagcaatttgggaggcagaggctagctgatcacttgaggtcaggagtttgagaccagcctggccaacatggtgaaaccccgtttctactaaaaatacaaaaattagctgggcatggtggtgagcacctggttatcccagctactcgggaggctgaggcaggagaattgcttgaaccggaaggcggaggttgccgtgagccaagatcacaccactaccctccagcctgtgcgacaagagcgagactccacctcaaaaaagaaaaaaaaaaaaattctaacaaatactagttactgcttttggttgactgtaatcatgtaaatataaataaaacatccaaatataaggcagaaaatttaaaaaaataaagatttttaaagatttgtaatgttggaaagtttacaaaagatagacaacactattcaatattaacttatttttatcaatatgaaagacaacatgacttattaagtaaaaacagtgcaactaaaattgttagcttgatttatttaagtatataagtttaagtcaccaaaacataagaataaagaccattttcattcatccacttattgagcactactatgtcaggtactgtgctagataccagctacacagctcaaaagagatgtcagtgtcttcacaaagcttgcattattgtctaaatccatatgactagtaatgtttgatgttgagaacataccattgattttaaatcacagatttctatgtcagtgtagtatgcatttctcaggcttttttttttcctaataattatttattagcttattaacaaaaactctattcctcgattgtgtgtgccatcactatgagcccaggtaacaactatgaaatataaaatgtgaaattcacacatactgtgaactcggtttaattcaaaaattacttatgggacatctactatgttctgggcaggcttggggatattaaaataaatctgtaaaaaagattctatttataaaaacctattattcatttctgcagtagcaaaattttcctataaacacacacattcctacatatattgtgtgtacgtggcgggggagggggattctgattccttttcttcctcttcaaggaaggaagcgtgtgtgtgtgtatgtatacatacacacacacacaatacacatagagaagtttttatttttaaatatatcaaagtcttctgtgatacaagatccctacacctattatgattccaactatatctatgaaatgaaaagcagtggattgaaaggaaattgaggtagtgtatttcacagtcggtgtatacctggttggttctcctgcaacttaaaataattcagagagactaatcttttggaaggcagtagatagtggacatcagatagacagagccacggcctggtgctctactctcttgctcagagaggagaaaagaacatgtgcttatttttaagtattactgatcaaacagaaaaacggatactttagaggttaccaaggtatggaacatggagataccttggagaaagtttgctggtgttgtacctatggacccatgccacccaatcttttgctacaaatttttaaatcagtagggttttagattatatacatcagaaggttagcagatctgataccttctaaaatcacttcagcaaatgttctgggtgccttgttcagacaaaatgatgcagaccccatggtgtggtaaacagatttgaacaactaacctgggattgaatctctggtctttttaacagctgtgttaacttgggcaagttatttaatcgctctgagcctgttcctttaactgtaatcagtaattaaaacatctatttccaaggttcttatgaaaatgaaataaaaggttaagccaaaagccaggtccacaaaaattattagctttttccccttccctcgagaaaggagggaaaaaaggaatcagaagccacattctatggagtttacaattctgtttaaggtaattcccttaatattaaactaaagaaacctcatccttcaggtctcagcttagatattatttctatcaagaaacctattctgctgctcatcccccaagttatcattccctcctctgtgctctgtatttcctcatcttatcccttaaattagattattgaaattgtctgtttacttaggggcttctctcccaatcccatttctgatagtacattctaagaggagaaagctgcatctgccttagtcacatctgagaagatgattcaggaaataacttggatcttatagaaaaggtaagatctacctcagtttcctcatctgcaaaatggagataacaggagaatttatctcattggatggtcatgaggattaatgaattaacacatgtaaagcacttgaaacagggcctaacacaaaataaatattagcaaaataaaaatggtaccccaggaatagccaacattataaaattgtaaatatctccagattaatctataaagttattaaaattgcattaaaaatgccgatagaatttttgaaacctagacaagctgttgttgtagttcacagaaaacacctcaccagacaaataaatggatcagacaaataaatgtaaaaaatgaaaccatgaaagtactgggaaaaaatgggagaattattttattagattggtgcaaaaattactgcggtttttgcccagctactcgggaggc

SEQ ID NO: 31 - DNA, 1402 bp, Homo sapiens
tatcgcaagcagcagtctctggtcccagcccaccccatggcccctcccagtcccagcaccaccagcagtaataacaacagtagcagcagcagcaactcaggatgggatcagctcagcaaaacgaacctctatatccgaggactgcctccccacaccaccgaccaggacctggtgaagctctgtcaaccatatgggaaaatagtctccacaaacgcaattttgcataagacaacgaacaaatgcaaaggttatggttttgtcgactttgacagccctgcagcagctcaaaaagctgtgtctgccctgaaggccagtggggttcaagctcaaatggcaaagcaacaggaacaagatcctaccaacctctacatttctaatttgccactctccatggataagcaagaactagaaaatatgctcaaaccatttggacaagttatttctacaaggatactacgtgatgccagtggtacaagtcgtggtgttggctttgctaggacggaatcaacagaaaaatgtgaagctgttactggtcattttaatggaaaatttattaagacaccaccaggagtttctgcccccacagaacctttattgtgtaagttttctgatggaggacagaaaaagagacagaacccaaacaaatacatccctaatggaagaccatggcatagagaaggagaggtgagacttactggaatgacacttacttacgacccaactacagctgctatacaaaacggattttatccttcaccatacagtattgctacaaaccgaatgatcactcaaacttctattacaccctatattgtatctcctgtatctgcctaccaggtgcaaagtccttcttggacgcaacctcaaccatatattctacagcaccccggtgccgtgttaactccctcaatggagcacaccatgtcactacagcccgcatcaatgatcagccctctggcccagcagatgagtcatctgtcactaggcagcaccggaacatacatgcctgcaacgtcagctatgcaaggagcctacttgccacagtatgaacatatgcagacgacagcggctcctgttgaggaggcaagtggtcaacagcaggtggctgtcgagacgtctaatgaccattctccatatacctttcaacctaataagtaactgtgagatgtacagaaaggtgttcttacatgaagaagggtgtgaaggctgaacaatcatggatttttctgatcaattgtgctttaggaaattattgacaattttgcacaagttcttgaaaacgttatttataacgaaatcaactaaaactatttttgctataagttctataaggtgcataaaaaccttaaattcatctagtagctgttcccccgaacaggtttattttagtaaaacaaacaaa

SEQ ID NO: 32 - protein, 373 aa, Homo sapiens
MAPPSPSTTSSNNNSSSSSNSGWDQLSKTNLYIRGLPPHTTDQDLVKLCQPYGKIVSTNAILHKTTNKCKGYGFVDFDSPAAAQKAVSALKASGVQAQMAKQQEQDPTNLYISNLPLSMDKQELENMLKPFGQVISTRILRDASGTSRGVGFARTESTEKCEAVTGHFNGKFIKTPPGVSAPTEPLLCKFSDGGQKKRQNPNKYIPNGRPWHREGEVRLTGMTLTYDPTTAAIQNGFYPSPYSIATNRMITQTSITPYIVSPVSAYQVQSPSWTQPQPYILQHPGAVLTPSMEHTMSLQPASMISPLAQQMSHLSLGSTGTYMPATSAMQGAYLPQYEHMQTTAAPVEEASGQQQVAVETSNDHSPYTFQPNK

SEQ ID NO: 33 - DNA, 145068 bp, Mus musculus
  misc_feature (1)...(145068): n = A,T,C or G
ctctttgagtttgaagccatcctagtctacacagtaaattccatgcaggatagagctacatagtgagactttgtctaaaagcaaacaaacaaaagaactgtcccctccaaatacttgttatagcatggataaacctagagaatcctgttaagtgaagaaagccatatgacatgatatgatatatatgatatgataataaagctatatgaaaggttcaaaacagacaaatccctatggacaaaaagtagattagtggttgccggggactggaggagagaagaactgtgacctcttgtggactcagggttgctttctgaggtgataaaaaatgttttggatttaaaggtagctgtaggactttcaaaagcacttaagcccctgaacagccacagtttaaagtgggcatgtacagctcctgtcctagacctgttctcagaatgtcttatatgtttttaaaggcataaaatgcagggcaagtgcacaagacatgtccctgactatataaacttaatgtccagttgacatcagtttagtgtactctgaatgaatagatgctctaagacttgagtttccacctgggattaagagaagaaatgggggagcgtgagtgcgtgtgtggcacacaacaagttcaccacagcaaccattcttttaaccaattttttaaaggacacaccagatgccaattcctaaaacagacacacaaaaggagaaataaaaacaggtcctgaatatccaaatagtaaaggaacaacttggagtaagtcatgccttcccactacggacttaagaagtagtggcttccaggcacctcaagggcccagtagctgagcaaaagagacaaaggctgggttgagggttcccaggcttgggggttggaggagaaccaagagattgaaaaaggtgaaagaagaaaaagagacaccatgggtcaaggaatcaagaaaacatggccctgagggctggccaattggaattaagagaagtccagataataacacacaataataactcagagttatcaattaaaaagttatttgaataacattgagggtagatctgccctgttcttatgttgtttaaggcttatggtaaataataacagttgtatgtcttttatccaggaactaaaggatcaaaggtggggtagagacatggagttgggattaaataatttctacaacacattccagtctttggggatgttcttgctaccttcctgcctcactgtgtgataggcttctccccctccttccccttgcacactgtcagactctgatcagatagctgagatgaaatgccacatacaactacaacccagggcaacgggtaagactcgtctcactattctacagaggaatttttttcatcttgctactcctacttctaatcttaaattcaaattatgttaaagagcttgccacttacctacgccaattacactatcagcatgagaatcacattcctactacctggcctatatatgtacctcagagtgaggaccaatttaaaaaaaaaagactcttagaaaataaacttataaatctcctctgaggttttaccatgcactagactgtggccctgagtgctagaaaccagaactaagttcttcccacatttacactgagtcgataatacctagaagacctgagctctctgcagtggacctgtctccaggcaccagcaaagcgctcactcacctgtcaagagcccaagcactgtctgcacctggtccagcagcagcttccgcaactcctccttccgagccacgctgaggtcctcacgtggacaagctagctcttccgaagttgtcttcagcatgatcagtccaaggggggttgtcacaggggactggatcaactgacaggaaaaagcaaatgctgagcagaatagaactaatgagctacaaagaggattagtaaaattcaactaaaagtgaagtgttgagcctcatatgagcagactacctcaagcaacacttttgaaaaagaattcagagggtcatttatgaaactttgctttactaacccttcaaattttattctcaagttctcatattctaccagcaggaacttaaaaagcagctggaaacaaccctgtctttatacaaacaggacaaattttgtataaatctaaataaattcccaaccaagttttggttacgtgaagagatactcatactgaatgacagacaattctgtcataagcaaaccgcatggacctttaaaagacgtactggtcttttatgattacactagacatgaaaaattcctatctggggctggtgagatggctcagtgggtaagagcatccgactgctcttccaaaggtctggagttcaaatcccagcaaccacatggtggctcacaaccatccgtaacaaaatctgactccctcttctggagtgtctgaagacagcgacagtgtacttatatataataaataaataaaaatcttaaaaaaaaaaaaaagattaaaaaaaaaaagaaaaattcctatcttctagtaggtttcctgtagtttctccatgtttatatatagttaagacacataacaacttaacatagtgttgcaactacctgtagtattcagtatggtgatacctggtgcaaagtcagtagtggaggaacaacaagctacaccatacagcctaggtacaaaataggttctatctaccacgcaggtgtgtgcaagcatactctatggtagtcatctaactgcacttttcacaacatccccctgtcacggacaccatggtgatatgcatggcagtaatacaaatattttacatactaatgataatgacagtgtatctttttgtgctatcttttcaacattcacattatatcaacttcatagttctacatcttaacatttttgacctagcatgtttcaagaaagtttagaattaaacatgaggcaagcctaggtgtggcataacaagtggcataacaaacttgttatcccagcagtcagagaccaaggcagacaaatcaagaatttaaggaagagacagctagctgggtgtggtggcgcacgcctttaatcccagcacttgggaggcagaggctggcagatttctgagtacgaggccagcctggtctacagagtgagttccaggacagccagggctatacagagaaaccctgtctggggaaaaaaaaaaacagaaacaaaaaaaggaagagacagcacagtaactgtaggcagaggtgctaccaaggctggcaatccaagtttgatcactgggacccagctggtagaagcaaacaacttttaagtttccctctgacttccacatacatgttaagatatccaccattcccttaccaaaaaagacaatataatttttttaaaaagagtttaagggcaacatggaccacatagtagtctcaaaatttttaattaaaaagggggctggtgagatggctcagtgggtaagagcacccaactgctcttccgaaggtccggagttcaaatcccagcaaccacatggtggctcacaaccatctgtaacgagatctgactccctcttctggagtgtctgaaggcagctacagtgtacttacatataaataaataaatctaaaaaaaaaaaagggaaaagaaaagaaccatgtggcagaacaacacatctgtgataagcaactaccatggtcataagttttagaaactttttaggtagcccaagctattctagtacttgtggccatcctcctgcttcagcccctcagatgctgggattacaggcatgcctagctacagttagttttgcaaatactcatgtaataaattaagtaactatttctatcctctgtaatactgtctgcaccaagagatggagaaggaacactttcaaaagcatgacactacttatagcatcctacctgtttttaaaaaattcaacaagatcattaaaagtgagcagttactttttcagaggtagacaagcatttgccacaattaaaaagcaaaccattttcagaacacctaaacctttcttcaagcatgtgcaactttaaatgtggctcttccctgctgtgctttccctgcactacaccacgtttctaagcttcagaaaagagatcatttaggaatcatatcaagacaaaccacatactctttacttctaccaacacaaggtatactatcctttccccagaaagttagctctctcttcccatcatagactacagaaatgtctatccatccctgaagagtaagaaaaacaaccaggggataacaagatggctcagtttttggtttttggtgttggttggttggttggttggttggtttttttaaaagcacttgccacacaagacagatgacctagacaaagttcaaaactcacaatggaagttaagctaccacaacagggcctaaactctgctgtgtgcccatacatattccatctcccctccttccctcttttcctctcacattcaaatcatgttttaaattcagtaatggaattcaagggcaattccaatatactcagaagcagcccaagaaagccagtagttgactataatctcagcaatctgcaggtgggaattcacaagtctacccaagaaccaatcaggaaaaaaaaaaggggaaagagaaaggaaaaaagaaggacagaggaaggagaggagggagggagggagctgctctctataaaaacaacctctcttgaaagttaaaacttctaaaaacaccctccacattttctccattctatacaaaattttattatttctaacacattcaaataatgtctgccttggtataacttttggctaaaataaagtaggagagacaccctctttaaggctctctgtgtggattatttctgggatgtcaaccctaccctgagattttttttttccttccttgtacctttttcttttctttctctattttcaactgagcactagaatagcgtgcgtgcgtgcgtgcgtgcgtgcgtgcgtgcgagtgaggtgggggggtgtgagtattttgcctatgtgctgttttgttttgttttccgagacagggtttctctgtgtagccctggctggcctggaactcagaaatgctcctgcctctgcctcccgagtgctgggtgggatcaaagtcgtggccaacactgcccagctcctgcactgcatacacctagtgtcctctcagattagaacaaggaatcaaatcttctgaaactagagttatagatagtgatgagccaacacatggactctggcaacaagtcctcttagccactggccatctccccagctcctaagcacttaaatctttcagggttgaataaacctattctgccaaatgatctacttggcaacattcactttcaaggtttgtgtatatgtgtggtgcatgtgtgtgttatgtggttatgtgtgcacaggtgtgcccacctatatgaatttatatgcacaagtgtccaagtgactgctgaggccagtgataatactgggaactgaatgaaccttgttctcctgtaagtgcttttaggagccatccatgtccatctctccaactcagttactcactttcctttagatatgaaatgcctctgtgctcctcacatatggtcagatcctctacaatatagaaaatccatcttaaatctcctttctttattcaaaggaaagaaagcacaggtaagaaatccagtgaaaaaagaaagccatcactaggaatggtggcacacacctagacatctaggcactaggaaaacagaggcagcaccaagatcataaatttgagggcagcctggactatacagcaagaccctgtctccaaaaaacaaacaaacaaacaatctaacaagagctagagctcaatagtagacggtttgcctagcactgtatggccctaggttccatcctgagggagaagttagcaaggaaggaattcattcttcatgaccttttttcttttttggtagtgctaaagactgaacacgtaggacataagacataataaagtcactcttgctaggtgtggtagcacattccttgtaccccagcactctgcaggcagagacaagctgattgatctccatgagttcaaatcatggttctcaaccaacaggtcgaaaccccttttcataggagttgcctaagaccatcagaaaacagatgtttttacattgtgatttataacagtagcaaaattacagttctaaattagcaacaagaataatttttggttgggatcacaaccaaatgaaaaactatattaaagggtcacagcattgagaaggttgagaccactggtttaaggccagcctggtctacatagagaattccaaacaaaccagggccacatgagaccctgtttcaaataaaaataaaaaggaagtaagtcatctttgctttccttgactgtggctggttccctggctccaggaaaaaggagggagctggcaagaggacaaaaccaagagaacatgtggcccttgcagctcacacaggaacagagcccatcgaggctagcctactctgctccaactcttacatgatcacatttgacggaaatgcttacagctgcagtgaaattaacctgtgccagtccggaagactgagatggaggagttggtaccaaagccccagacatcacactactcctggccttgctctttcttgtcatctgatacctctttgagctttatgtggctataccatcagctgccctcctgaatggtgaagtagcttagctgtgaggcacctctccctgaccagtggaagcagcccaagtaagtggggtggagcttttatcttggcaaagagaactctcagcaaccaggtataatcatgattcccaccactgttacactcaagactggcccatatccccagtcttctcaagtgtactcagaagcaattttacctggttccctttgtgctaacatggccatccctgaggctaaaccctgattctaaggcatggccaaagtttggaagagatacccgatttgggatcaccccttttcccaggactgaaaatactacatggctcaacttccattctactgttccctggtcaagttgaattttaagaaacagatcatctatcaggtggccaccatcattcttcttagtttctcccggtttgtcaactctgagcagtgacccttaccatcatgggtttctcatgacctgccagagacagccaaaatgttttaattacacagcatggaaaatatctagtaacatcttcctcatctttgccattgttttcatcatcacctggcaggcctccttgccctctggttcttgcaccacaccctggtatgcccactagagcttgctcactcaggccttttccatcagtaccacctcaacaccatgacgatgatgctgaccttctggacctacctctttttgcacatggtccacaagttcataaaagctagtagatgacaaacatactaacagagaagaaataaaaagctcagagaagaaggccacatcttcaataaaatcctaagagtggctagggagatggctcagtgaaagaatatacagcaggtctggagaaatggctccatgtccaagagcacttactgctcatgtagaggacccagttcagctcccaacacaaataccagatgctcctaactgcctacaacaccagttccagaagatgccacacccaagggtatctgcattcacacagtctctcacagatacatgcaaatacacaccaattaaaaatagtaagtttttaaaaagagcatattgctcttccagagaacctgagctcaattcccagcacccacattagtggctcaccaccacctatacctccagatccaggggatacaacactctctctcttctggcttcagagggcacatgtgcacacactaaaaaatctttttaaaaatcatcataagactgtataagtggtaggtggtggtgcatgcctttaccccagcactcaggagatggaggcaagcagacagctgtgaattcaaggccaaactagtctacagagagttccaggacagccaggaatatagagaaaccctgtctcaaaaaacaaaacagaatgactgaaccactgtcctagctaccgcccacaataatctataaagtgcaaaagctaatccacttcccctatagaggataccaggctctgatgaaaagagagagaaagggagaggacattcgttcccttcccttcatcatccagatgcccttaagccggactctcagcagaagcgagtctggttatagcttctgctagcagagctctcccactctctgcgctccctttctattgcttttgagaaccttcctcacttctgagaccttaagagtttggacctggttgtttgccttttaactccctgacctctaaccagggttgatcttagacctcattctgtcaaagctaggacaaggttccacctttctaaggttcaaagctaggacaaggttcccagctgggttacaaaccaaagccaagctgactttaacttcttccttcctgaagctcaatgaattaactgaatgtggcagtgtgaccttcccacctcctctaaagcaagggcacttcctggagaccgctggactgcctctgcagctgctttcccagctgcctctcgggcctcttctttcctgtccgttattctagctgctttgggtgattgggaactacttctaatctgtactcactaaatatttggagtttcagtttccaagacacagttgtagctagctagtacctaaggaaacatttcagagcaaattttactgttgacagttttgggttttttggttttgttttgaagctaaaatatagtaaaggctaaaacatgagaatgtgtcaagcaagtaagaatggagtcacacacctttgagtccagcattgggaaacagagacagaggcagatagatctctgctacttcccggctaaatagcacagtggtgaaattctgtctccaagagagaaaactaaggaactaattatagtagactttttttttaattgcccccacataatcctttacttgaaaaaactggagaaaacatttaatttttcatttttattgttcttttatccagaaaggcaattaatatataattaaaattctaaacacacttagcttctgcatctgacttagcagacaataagtacctttgagctgcagatcaaatttaggtttctagtgagccatccgtttttattacatacctattggggaagaagtagccacccttgtttctcagtaatctggccttaggtaaaatgtgtccaaaggtttggctcagcagacttcagaaatctgaggaacgaccttacaaaaggggcactgacccacagactacagggtggggaggagcatggtcagtctcaccttattacttcctttcccaatgtcctagaaaggtataagcaacctgcagagagctggaggctgatcacaacacaaactgcagattccctaccaactatcacaatatactcttgactgccaatggatcaaggtagaactgagtccaaagaaactttagatagctaacatacgaccgcctgatgatgaaatttactctaaaaccggtttggtcctgtttatcaatcccaaggctgtgtaacacacaccccagcagcaaacattccacaatacttctatcaatggctatttacagtttgtggttatttcctgacaattctgaaaccactagaaccctcctttcaccgccatcgccatcgtatcaggagccaggccttcagaggcctgctgagcagaactaacttcacaggtgctaaggaagtaactaggctcactctccctccactccctctctcctccactatgcaaagctacagaacataaagacagacaatgtatgaatccagcctacaacacttactacttactgcagccccaaagaataactataaaacccctcaagtcaagggatataatccctctgcgaacaatttatatgacagttcccccaggtagatccttacctgtaaaatgttagtgaaaaagtcatggtagaacatgggccaatcttggcgtccaatatcaacgataactttgcagagtttattccgaataaagtaaggtaaggttttatggtgagccaagagaagtttgggcaagcagctacggatttccatcttatcctgagatgggaccccaagccacattttattgattagattctgaaaaacaaatacgtatcttttaaattaatgagctttacacaaaatgaatggttttcattctataattacctgtaacgtcacatacacacacatctacctagctctaacagtttaggacatttagcaaaatgataaacacaaatattaaaatcttaggacaagccaaccattggactgagcacagggaccccaatggaggagttacagaaaggactgaaggggtctgcaaccccataggaagaacagcaataccaaccaaccaggtccctcctcccacctcagagctcccagggactaaaccaccaaccacagagtacacaaggagaaactcatggctccagtcacatatgtagcagaggatggcattgtctggcatcaataggagaggcccttggtcctgtgaaggctcgattctccagtgtaagagagtgccagggcagtgaggtgggagtgggtaagtgggtggaggagcaccctcatagaagcagggagagagaggatgggatggggggtggggggttcagaagtgaaaccaggaaaagggataacatttgaaatgtaaatacataaaatatccaataaaaaaaaatctgaggacaagctggacggtggtagcacatgcctttaatcccaacactcaaaaggcagaggcatgtggaactctgtgagtttaaggccagcctactctacagagcaagttccaggacaggacagggctacagagagaaaccctgtcaaaaagaaaagaaaagaaaggagnnnnnnnnnnnnnnnnnnnnnnnnnnnnnnnnnnnnnnnnnnnnnnnnnnnnnnnnnnnnnnnnnnnnnnnnnnnnnnnnnnnnnnnnaggaggaggaggaagaagaagaagaagaagaagaagaagaagaagaagaagaagaagaagaagaagaagaagaagaaaaagaaattcttaggataaaacaatctcatctctcctatctctaggaagatatactgaacaatttaagatacagtaagttgtatgtataaaaacttgctattatatcattgtttccaacatgtcttattggccatctggccaccatatagtaacagaaacaactgtaatgttcaaatataagtgaacaagccagacatgacagcacacatgtgtaatccaatcacatgggagactgaggctggtgggtggtaagtctgaagccagcctgagataattaccaaaataccactccctatcccataaagaacaaatgggttaatgagtactgcagaccatagcagaaaggacagtggaaaagaggttgatgtgacatgcccagcagacaaagcttggacgagagttagcatgagtagttccatggctggaagatggtagcaatacaaatactccatccaatgtgtctagctatctttgtctttcaaatgacaaaggaaaaaggtaagtcaccaactatgacctacccagcagacaagaaaagtcaaccaccttcctcatctttttggagtcacagctcaaaagatgtccccagacacaaggtgccacgtgggagggtcaacctactgcttctcagacatctatatactacagcgaaaacctggtgccaatagtgtacaattccactgtgattttcaggaatataaaacgacacaacaacttacctcaaaaaccgttaagctgtacatcattacatagtcattccttgtgctggacagaaaatataagcagaatctccaagctcctacttgctgggcaaagttattaagaagctcctctggaaaagttaaatagcacaaaacaagtctataaaaatatataaaattaatacaaagaccagactgccaccatttggaaaacataccaacctccccacataatacaaatagttcaaaaaccaaccacaaaacccacctgaagggattatgggatactcttgacactggggtgacccaacacaggcaatggaccctgccatcaaggtcgctagctttcctaaagataccttttgagaacacagaccattgttcaagctcttatttaaactctatgtgagatagcaatcctttccaaaatgtaaaatgtaaaatgacaacaactagcccccacagagataagcaatacacaccatcatattctataattcttcagggacatctatactatccacatgcccactgacatgaaggctagagaagcaaaaagagaaaactaacattccaagcggccatgtggcagctgacaactgtctgtagctccagttccagggaattggacacctttttttggccttcatgagcaccaggcatgaaagtgggtgcacagatatacgtgaaagcaaaacagtcatacactcataaaatagaagtatttttttacatttcttaacttatgtatttttacttcatgtgcattggcattctgcccacacttacactgagtgagagtgtagggtcctctagaacaggagctacagacagttggacagctgtgagctaccatgtgcgtgggtgctgggaactgaacctgggtcctctgggagagcagccagtgctctcaaccacaagccatctctacagccccaatcaaaaatacaacatatacaaaataaataagtaaaactaaaaagtaaaaaccctaagagttagaagagcagcccagactatgtatccagtcaaatgaaaatggcactttttctctcaggcctgacaacatcagctaaaactcaaaattagcaagcattaattgcctagctacccaccatcgcctgtgggcacaatgcctattaactaccttgatacatgcactaactatgatccctgccagcaagcctggccagtgcaaggtcgccatgacaacactgcagctgactcctgtgccagctccctgcaaccctaagtacaactcggcagtctcactaaacattattctacagaaggagggctatgaagacctgggttcaatccccaatattcacaacacagctcctaactttctacaactccagttccagggaatcctacaccctcttctgacctcctccatgcacacacaaacgtacattcagacaaaacactcatacataaattgtttaaaaaaaataagtcttgccgggcgtggtggcgcacgcctttaatcccagcacttgggaggcagaggcaggcagatttctgaatttgaggccagcctggtctacagagtgagttccaggacagccagggctacagagaaaccctgtctcaaaaaaaaaaaaaaaaaaaaaaaagtctgaaagtgaaagatggtggcatgtcctgataattaaaagcttctatgtaactcaaagacacaagaaaaccagagaatgtgagttataactggaaatgacattctgggctcaaatcagctgatccctaagcctgatcctggcaacaccctggtctacattcttcgcccattcccccactgtcaaaacacgctgatctcacagcatccccacttgaaaaattctattccactgagctatagccctagtctgcataaaagtttgattcagacatgaagattttatacaaggttccactttcaatccattaatgcacaaatgtaaacaaagtttcatgagcaaatcaaaagttcaaagaaaaaccaaaggcatttctattacaatgacaagagttcgaaagaatcagagtggaaaattataggagactaatatagagcaagatctgtctatttcggtaaaaattgtatctagcattttcactataaatgtaagcatgttagtagcataaacctgaagaggaggtcacaatggtgcaggaggataatcagggtaatcagagaaccagcatagcaagcaaggtgctcctcctcaggcaggcgctgcctcgctcctagccctttgtctagacacattctatttctctaccgtgtactcctcagaaaagaaaggtatgtagggtgcatgctatcagatgacatgatgcttcaaggaagctagcaaaaccaggctagagcaaagatctcctagacacctgaaaagtctcaaccccatggggacgactttgggtggtacttagactggaccaggaggtttaactgagtcaagccaatggaaacagaaatgagtctttaaggttctgaggcaaggacagaccttaaggaaagggaagcaacaatacagtgagtactgagcagtctctctcacacacacagaagaatgttcaagaaaggattcaaaggagaaagactgcttaagcagcacagtgggtgatgtctctgaggcaggtatgatacttgaataaattatcttctttctaatgtgcttgattaacattattatggtactgaatataaaaatcaaaaaagtaggcccccaagacaacaagtacttacacctccatgttctctgttgaagagcctttgttcatgaaaaccacagaatggggatggtggtggggaagagaaggaagagaaggaagagaacatgactgagaagtctctgaggtcgaccagctagggactcatcagactccactgtgtctcactgtgaccactctgacactttcataaattgttcttattctgaattaatggtgagcctctttcaacaacactactgagatcaggaacaaagcagaggcttttcctcgactgaaaagcatgaaacccaatcactatgctaggtgtgcaagccttacaagccctacctgcccaacatgaaccagagcaaagcagccaagaattcaaggggcacatataggtttgaccaaccaagggatcagttccttcttccccaaaccccacttacctatctcccgcttcctttcattggttgtgcagtcatggaaaaattccgtcatcaggctttccaacgccctgagggaggcttcttctgatgcctggcaaagggatttgagaaaaatcagtaactgctctgccctcagtgccttccaactcctgtccacaacaagagtaatttgcttcccaaaacatcttggttcaacattcttcaaatgcataatgcaagccagaaaaataggaaaatttccatctggcttagaagccaactttagtatctcctacaaatacatgccatgtaattttaattatttatgttaaggaagagaaaaacaagtaattcaaaatgtaattatagagtgaagctgaaagcaaatgaacagtcctggcctgggctgaagaggtagaacaaacatcctgggaggcctacaggccctccagagacaacctgggaccccttgcctgaataattattaatacaggcaaaggtaagccacatggcctcttgtggtttctgaaggtgcttcaggagtcttgcatacattcagctttcaatctcacatgaacagccaggagttgaatgtgtatacagctaagaacaaagcttaggcaggcacgcaaagtttaacttctgctgcagatccacaaaggacagactgagaagagacaacagctaagaaggaggcccttgagtcaggcatggtagtgcacatctttaatcccagaattccagaggcagagcaaggtggatctcttaagttttaggcctacagagtaagttccagtatagccaaggctacacagagaaaccctgtctcaaaaaagaaaaaaaaaagaaaatgaaaaaacccagcccgaggctgtgagtgcaccccagttccctcttgcacatagatctccacttccttttcactcagcaagagaacagatgcatgtaccagtaagcttgattctaaaccccatgcaaagtctaatgccacattcctgtggtcttagcactaagaaggctgaagcaagaagatggcaaacaagttctaggccaacctagactgcagaccagatttcataaaacatttttaagtaatagtatcggaaaccactccatacagtttgtgtgcaaaaaagttgaacatctacaagctatgtctgaaccctcattggcattatctacttgagaactcctgttattttagttagttcttaattcttttcctaactgtttcctttccccaaatgtcctttactagcagatagcagagccttttaagacaacaggatcacttttaaacctgtttcctgctgaactctgagaagtctggaagcctctagccggtcatttactactatggagacagaaacttcagccatctcccctaataagcgaaattacaagaacagcaccacacacaccaccaacattgccagtcaaggctgtgcctcccacactgccggcacagaaggctaaggtacaacccaagaggctccgtcaactgtaaggcaatgcagcacatgaacgtgcacatgcagcagaaccatcagaggcagcgccagctatttcctaacaagcacagatccaggctattgacattttgatcacttcaataattccaacactactgtgtttcacaggatattacaaggatcaaatatggtgatctatatacaaaaccgcaggataaactaagaaggcaaggatggctacactgatattgacttggtcttagatacgaaataaaaacaggcaggagcattgcaaaacaaaagtagtcagatctcctccactgtactcattcatgtctgcagagggtaccaaacagaatcactatcacttctcagcaatatcaaaattcaaattgtgttcatttacagtggttaaaaaaggagtcccagggctgcccctctctaacgccagcattgcctcatttgccaagctccagccgaaggagaaggagggtaagtaaggaggtgcccataccattgctcgtacaaagcagactgcccgaaaatccaccggtggtaaagaacccaggaaacaactggctacaaaagccgctcgcaagagtgcgccctctactggaggggtgaagaaaccttatcgttacaggcctggtactgtggcactccgagaaatcagacgctatcagaagtccactgaacttctgatctgcaagctcccctttcagagtctggtttgagaaattgctcaggacttcaaaacagatctgcgcttcctgagggcagctattggtgctttgcaggaggcaagtgaggcctatctggttggcctttttgaagatatcaacctgtgtgctaaccatgccaaatgtgtaaaaattatgccaaaagatatccagctagcatgccacatatgcagagaaagtgcttaagagtccactatgagggaaaacatttcattctcaaaacaaaaaaaaattgtttttcctcttcttcctgttatcagtagttctgaatgttagatattttttccatggagtcaaaagtacctaagtatatgattgcgagtggaaacatagaaaacagaatcagatattggcagtttctctacatttacttgtgtgtgaatttttaatataaatgcaagatgtaaagcattaatgcaagcagaatgtttcggcgaacacatttcaacagctccactttataacaattataaataaacctgttaaaattgtctgtacaatgccagcatttggatttttaaaaaataagtaaatttcttattgacaacaactaaatggtgtttgtagcatttttatcatacagtagattccgctcactcactatacttttctgagttgtcctacatgcaagtacgtgtttttaatgtcgtctgtcttctgtaagtttgttattaaaatacattaaactattaaaaataagagtcccagagttcacctgagtaaacaatcagaacagatgtagaagacaaacaggatacatttgagacctgaaaacagttaaagaatactggagatccccagccccttcggcaggaaggccacggaaacctttgccagctgtttcaagcaagtggcaaagccagatccagactggtaggttaacacaccacacagcactacactctcaagtaatgagacaaagaacatagaggaaagcccccacaactctaagttgcaacaggaagggtcagcatctcagggttcagatcaatctgctagcttcacaacttctgctgagatttctgttgcaggtcttgaagactaaaactaagtgaggggcactcacaatggctcagcaggtaaaggccttgacaccaagcctgccaatctgaggagagaacagactcccaaaaggcaagcatataagtatatgttcacctgaataaacatacaagcaaatgtattaaaataaataaataaaattcactgagacacatacacacagagatcaattagagggaaaaaacataaatttaagccacaaaatgtgaaaagtaaaacaacagagcatctacagaacaagctctacatgaccaaggttccagtttctttctatggttgggacaaataaagcactaaacataaagaaagagcagcaaacccaactgctcatcaaagagcacaaggaagctgcagaatgggagaaaacactgaatgggaaccagaattctcatcagagtacaaagtaacttaacaaagaaaagacaagagcctttggacaaagttacttatacaagaaagatctaaataagtgttcacctcagagaaatacaaatttaaaatgttagaggctactacacaaccaccagaatagcaaagttcgactcactgggctgaagacacagctcaagcatttaagaacactacgaccatctgtaactccagtcccaagacagccaatgccttcttctgaccctttcagacaccagacatgcacatggtgcagacaagcacacaggcaaaacacccacacacagaaaaataagtataggacgacatgaatgaatgagtcttgcagcaacaacaaaggatctcataaacataaatgaacaaatgaaagatgtcaaaacacaccctttcactatttgttttacacacacacacacacacacacacacctggggcaatgttgctctgtgtgaccctggttgatttggaactctctagtagaccaggctggcctcagactcagagatccacatgcctctctgcctcctgagtgctggaactcaagatatgtaacactatgcccaacatgctttatactaaaaacttaaacaacactgagaatgagttgtgtgtgacagtcagaacggtggtcactttggggaagaattaccttggatctaagaatgttctactcttggttggagtgtcccatgctgtaacagctataaattgtccaagaaaatgtacatgtgctttgagctttcaaactgcatcttcaaaatttagaccctgagtttcaatagtattttcatcagttagcacaactactcactacagtgtaaagagacacctacagtttccacctgagtcccactattgcctatatatccaaagcagccaccacagcaaagtcatatattgctgtttcatttgcctgtgcctccccaagactcacctggctaaccccaacagaaaagggcacacacacttaaaatctttgggcaaaatgggatgatgaactatgtctgtcctagaatcctctaggagagccatgcatatacctaagacaaacctacattttctgctgcagaattgttaatgggtacacagctgcctgcctagatttctgctgctgtctatttctgtttctggataagcagttcaaagacctgtgcttctgactcattaaggaaccaaagccaatcaaggctcagaatcacctcatcaaagaaaacttgaaaggaagagaaaggtcacagactctgacattttctttgactttttcctattttctatggctggctccattgagcctgcagtttcccagtgctttctcactttgtgccatcttccctcacaatttccactccctattttactgcctgtaaaattagcttcttttagctggtcactttgataccaacttttttccaaccctgatgcaatctgttcttcgtagccatataaactcccctaaaggcagacatctcaacctcggttcttctagatctagctttacatagcctttaaatctagaatgaccttgagaaactaagtcatttatttggcaaatgagcttgatactcctgagatgtaaagataaataagacagtccctgatttgaaaggatcaaaagggtcctgagggtgcagagtagaagctacaaatgagaaagcagagcctgatggttaccaccctactgcagtgctgtatggacagcctcagtgcccagagccagggatcttgcgcatgggacctggggaatgcagagacatctgcagggctggggtagacttaaggctgtctagttccaaggctcctggaaaagaaccatcgtggcatttgaacactcatggggacttccaccttgacctactgcaggagagaaaatttacagctcagccttcattaaattcctctcaaacattatatatagcctggacccctctctgtctccttttgtttttcccctttgtctttgtcttgtaatcagttctgcacacttctaccccactactaggtaaagagtgtatcttatgaaatcaggttccccgggctctaattcaaacacacctgaaccttggccaggttttttttttgtttgtttgtttttgtttttccagacagggtttctctgtgtagccctggctgtcctggaactcactctgtagaccaggccagcctcaaactcagaaaccccctgcctctgcctcccaggtgctgggattaaaggcgtgcgccaccactgcccggcttttaacagatacctttgtctcctatgtaaaaattttaagacactggatccttctaaggactaaatgagatcacttacataaagcacatataataagcataatgccagccataaagtagggactcaaaatcaggctactgatgtcagtgttatagacactgaatatttcagttctcagagcaattctaggtgagttgctactaaactactgccatcgctttggctcttgaggatcaccactgattcccacagagatgcacatgtgatattaatttcctatccaaaagatgtaagcacgatctctgttcacaaacaacaatctttttttgaaaaataaatatgtaaatagttgctaaaatatctttaacaaagcctaacagaaacccttaggatagatgatctatatgagcctttgcccctgtgacaaaatgaatagctaagttttctcaaaccttgactaaatctgtaatgtttcacctaatgacctctaaataaccatctcaggctgcagagaggcggctcattaggtagagacactagcccaagcctggttacctgaccttgatccctgaagcccacatattgcaaacagccctctgacctccacatgtagaccatgggatatacacccacacaaacacatatgttcacaaaataattaaagaaatgtaaaaagaaattaaaacaatcttctctgcaacatagcccttggctttaaagaaagtctttatcaaactttctgcttcctttcccgggagctacaacttgtgttcccagtgggccacagacatccttcctataggttcacagcctcactgatattgatactgattccacactacctgccaactaaggttcaaaaatacagaattagcaagcaaattcagtcccaagtaaacttttctctcaaagataccaccaccaccaaagatgtctccactctcaaatgaaccctccttccctacccttttaacgaccaaaaaaaaaaaaatgttcttgggtttagtataagatccaaagcttaaagtaacacacatggcaatcaatgtgagggtgcccctcccccacaccagtgctacaaggccaacagaaagcaagacagtagcaaagaacaggaaggaaactctaatcctgagatacacgcccttcaaagcccctccttcagttctctctgctcctctatgttgttgaactataaatcttgtgtttctctctaagcaagtcaatgaaaccagctgatctctctagccctagtagtcagaacaacagtcactcgcactcagtctctaaaggattgcactcagtatggtttgaatgctgactgacaattacaatctagaaataagactctgaccatggctgtgaaggattccctagactaggctgagattggaaggcccacctcaaacatgagtgcacccattccacaggcaggggtcccagacagcagaaaaggcagaaagctagttgagcacttacctctcactgattcctgactgcacaccagctgcctcctcaagctcctgccaccatgctttccccaccatactgttctgcatcctctatgagccaaaaagaaacccttctctttccttacatgggttttgtcaagttcaagatcacagcaacaagagtagctacaaggataagggtgggtggagctactgggaggagaaaagtactctaaggaggcagatgaaacagagttgcagtttcagaaacatgcagccaggacaaaggctgcattgtgtgcatgttcacatctcacaatgaacatcacctgaaaccaaagagcaaagagacccatctgccttggaaaagctccttgtctagctaaagttcaaagctcaacagtatttgccctttgggaacaattacagacatgactagacagaatctgcgtggatccttaatatctaatgaaaataaacattctggcccatctgaatccactcttcagcctcagattaaacttccacaaagacaagagcaggcaaaacacccctctagtatttcttaggtttatacaaagtgccccattagagtctctctcttcctgatcagaagagatcagattgctactgatcagaatcaagctagaagcagaaagaatgccaagggtctgagctagaaagcttcactagtcccactgcaggactgataaaagtcaaggtagcatattctatcttcatagggactaactagagtaaacatctttgtagacagagaacaatacattttctactgggaaaactgcctatgtactagggaacaatacataaaaacaagagcaactaactagctaccaatgcacagaataatgttttgaaaaataatattaacaaacctaaagtggactaaaaactcataataagcaaatgctacacctgaacccagattggaccctgaactacaggggaagcagctacattggacctactgatgacactaaaatagtgacttgcagaggcgtgtgtgtgtgtgtgtgtgtgtgtgtgtctgtgtgtgtttgatgcatgggtgtattcaagtgtatgatgcacaggtatacttcttgaggcaagagattgttatcaggtatcttcctctgtcaaagcatatctatacatgtgcctatgacagacagagaaagacaaaccataacacaaacatcaaagtgttaacaggcttgtttcaatctactactttgcaatctctcttagctggaaataacttccaattagcaagggtcattttgtttgtctgggggtgtttgttttaagacagtttcactatgtagccctggctggcctcaaactcagagattcgcctgcttctgtctccctagtgctagaatttgttttcatagtctatgcagtccaggctggcctagaacacatggtcctcctgcatcagcctcccaagcgttagaattacaggtgtgcacaagcatgcctagcgttagcaaggtgatttttaagactcattttgatttttgtgtgttctgcctccgtgtatgaatgtacatatttgtgtctggttcccacaaaggccggaagacagtgtcgagtcctctgaaacgagagtttacaggcatttgtgagtcactatgtgagtgccgggaactgaacctggttcttccacaagagcagcaagtattcctaaactctgagccatctttcttgtccacaggatgatgttttgttttgttttgaagactactattattgtttttgtatacacacacacagacagagtgcctgctaagaacagaagagggtgtcagatcctctaggactgaaattttcagcaactgtaagccacctggtgtgggtgctggaactgaactggggtcctgaggaagaccaagcagcaagagctgataagcactctccagcccctttaaaaaggcactgttttaaatggaatgctctgggaatgcaatgtcctccttgcacaggagtcaagacactctccctatcactccaattttaatgtatatgttgccaaaacaagcactaacacggtgttttgtttgcttgctttatttatttttatttcatgtgtatgggtgttttgcctgtatgtatgtctgtgtaccacatgcatgcagtgcccacagaggccatcagatcctctggaattggagtttcaggtggttggaaagccatcatgtaggtgctaaaaataacaccccggtcctttggaagagctgtcaggactcttatctgctgagccaggcccactaatcaggtttttaatcttctagtagaccattatcttccaccttgcttctcactgctccaagatgacttggcaaatgagaaagggtaaggagtctaacagacaaaagatgaacttatccaagccaagtacatcttcacccattgtttttgtttttgttttttttttttgggggggggggggattacacagcttaaacattacaaatgtctcccagagagcttcaattagataggcaaaagaatgataaaaaagttattctgcaagaaaactgtccaaaattagtaaggcatcaccaacaggcattctcttcatcacatctgcttctctttcacatatgcatatctcagaagacagacgtgtaccaacatgtcatttcaatgacactgagaatactgaaacaaagatgctatccagaaattctaaagcaagataagaatcttatgacagaaaaaatagccacagtgaacagcaagtgcaaccttgcatcagcaaaaaggaaaataaagctgttcgcccacagttacctagttattagtgaagtcagacccagagcagaatgccagagctccgacacagtgatggttcctccacacaagtgctctgctccaagtgtctgaagataaatgagctggcactgcactgaatgcaatcaggtaatgaatgtgacttagcagatcaccaaagatgcagatcacactgtatgtcaaaaaaaaacctaccaacaatattgctcctgtacaagcaatttcagttgttgttaccaagtgtcctaacagcaagcctcttttgtaaaagcccatacacttttatactggctagttttttttgtgtgtcaacttgacacaggctggagttatcacagagaaaggagcttcagttggggaaatgcctccatgagatccagctgtggaacattttctcaattagtgatcaaggggggagggcccattgtgggtggtaccatctctgggctggtagtcttggttctataagagagcaggctgagcaagccagaggaagcaagccagtaaggaacatccctccatggcctctgcatcagctcctgcttcctgacctgcttgagttccagttctgacttcctttggttatcaacagcaatgtggaagagtaagctgaataaaccctttcctccccaagtgcttcttggtcatgatgtttgtgcaggaatagaaaccctgactaagacaactttcatcctaaactgttaccagacatcacacttgaacaactaaaacagcacctgcctgattttggcagaagcctccagatggtctacagactggtgtgaactgaggtacataaccacgtcctttctacccagtggctttctatctcaagatccaaagtacaagtcaaagtcaaatgttcttattggcagtgctgtctacctcttcctcctcttcttgctcctcttcattctgaactgttttactaacccacccgcaaggctaggggaaagggctagctctacctcagcaaggatgcaggactacatacctggcagaagtagacccacatgtggtgctttccttagtatgccagaaggagaaatcactcctgagcaaaggacaagcaggccagaagaatatgttcaactgttcctccagcatgtggtactaaaggctacccctaaatgagaccacagcaaaataaaggatacagaaagaagctgtctacacaaaccagcaggtttgatgagcaccagtgcttccactgagagagaagcatgacagtaaaacagacaaactagagccaatccactgattcctggtaacctgaggaaatcctgcatgcttccagagcaccctgatatgaaagacaatcagaagtacacctcagtgtgcaaagttggttaggaccaatctctcccttaccacagatttcttttatacaaacttcatgtgaacacttgcatcttatttcatctgtctgaatccaaggccttacatataccaggcaagtgctctatcactgtacatccccagccttgtcactcacttttatgaagacaatgtcccaaagctgttaccactttgttcctctgactatactcagcactgatctaatattcatatttctattaatgctcagtcatatctgttaaggctttcaagtcaagataatgacatcagagtagcttatgcaatatagaaaatactgaactattggcactccactctccttccaccatgcactcctaggtaccaactcagtcaagctcagtgacaggcaccttactcacagagccatgctcagtcccttcaaatttacagtcactgactggtgttaaagacaaagtgtatcaatggtagcacatgcccacaactctgtgtgaacagaaccaggggtgttatctgcaagattcctaactatccccagcatgaaaagtgctgccatttcattcaaaagccacctttgtccttgtctcagattccttcttatctcagaccctacagtcattagtcctctactggttaactgtaaaaactacttcttcctcatggtacagcctgaggcagcctgcccaattctccagaattccagaatgctaccaaagagattacccatcttctgactataatacataggtgtgattcaatgtaatcttttctgttgttgttttgagacagggtttctcagtatagctttggttgtcctagaacccactctgtaaaccaggctattctccaaatcacagagatctgcctgcctctgcctcctgagtgccagcaccaccgactggcacaaatgtaatcttataaaccatcttttacatgatttaggaaaaaaaatacttatgtagttctatgtgcttgggaagctgatgccctaggcaacataagcaagaccccatggagggagaaagagactgagtggtcacatactgtatggtttcatttatataaagtattcatagcaaacatatccatagacacaaaaaccaagggcttggaggagatagacagacaaaactgagtaggtacaggaattcctctagagtgatgaaaactctacgtctcaaatgtacccaatgtcacgtgttgtttttttgtggtattgaaaactgaactgggggcatgctggatgggtgctctactagtgagctgcacttcttgtcctatgtcactgaatttggcacactttagaacgtcaagttttaagacaggcatgatggtatgtccagctgtaagtcagcgcttgagaaggggacagggaagatgtgatgtgaaagctagcccaagctactgacagatctatctccaaaacgagagagagagagagagagagagagagagagagagagagagagcgcactactactcctataacagaaaataaactctaacccaaaataacttttcctacatgcacacaatactgaggaatagttaagacgccactacaccctttgctagtagtactggttttgttttgttttgtttttttgagacagggtttctctgtatagccctggctgtcatggaactcactctgtagaccaggctggcctggaactcagaaatccacctgcctctgcctcccaggtgctgggattaaagatgtgcaccaccactgcccggcgctagtagtacttccttaagattaccaatgccattgatatttacaaacactgctggaaagaataagctgccataacctttctggaagacataatcaagtgtctttaaaatgtgcatattaaacttagaattatcccaaaataaaaggtttatgagaaagggtggagggagtctccctacccttgagcttttctgggaatctgtcctaaagcaactcctaatattcagaaaaggctttttgcaaagatattaatcacacattgtttattatggaaaaaatcttaactgcctcagaattcatgcaatgcaatgctatacaatcattgtaaatacttgggagacatttaacaatctgaaaacccacttctactatactgttaatgggaaaagtgcatttacagtgcaaaggcaaccattcagaaagtaaatagaaaataagacaaggaaacaaacatacaggtagtaatttcttgttttttttaaatagttatcaatcaagggctggagagatgactcagtggtaaagagcactggcggctcttccagaagacccagctcagttcccggcacccacatggcagctcgcaactgttgggtacaccaagatctgacactttcacacaaatatacatgtaggcaaaacaccaatacacataaaataaaaataaattatttaaaaaataaaataagaaagctatcaattattttagagttcaaaataacttgcaatcagagtaactactgagcaaaatcaaggggtagcaggatattacgagtctataagcagcaccagcttcaactgcccgtcagtactaggataaaaatggcgcaaaaactgaggtggtcacaaatcaactctcagggtgcttcctgcagggctttggtttttgtttttggtaactctataaagaagcacacagataacctcattgactttagaactattctaaaatctaaaattatcttcaaaaaaaaaatacctaaaataaacaaatccttgacagatcacttaattttcttcttctaagcagactgaagaactcagatgaataattttctgagtattcatgaggatgagggctcccttcccaggtcacaccctcaaacaacacctgtactgcctagcaaaaccctcattccacacttccattcatccaatgtgaacatcaataaacagtctggctccccactccacatgtacctgctgtaccatgtgcctcaaccaaatgccccaaactctctgcctagatacttcccatatctgctcagaaatccaaactgcaaccatctcttttaggaaacccaatttagccaggctggctttgaactcaactagccttgaactctagaccaccctacctcatctgaatcctgtgatcacaggtgtgtggcaccaacttggcaggaaaatctaaaattatcaaagcttctgttcacctttccccttccactattaactgctgcaagccagatgcatgtgtgattctacagccttgctggaatggatccccaacgtccatagacaatacttggtctacttcttaactttcattattaggaaataattacagacatcacacattccagcacctagactcacattaaagaggaggagggggtggggggcagtgccaggtgtcttagtattattgctcttttgctgtgaacaccatgatcaaggcaacttataaaagaaaactttaattgggggctagttcagtttcagagggtgagtccatgctcatcatggcagacagcatggcagttggaaggcaggcatggtgctgctaacaaagcagctgagaacttacatctgatccacaaacaggaggcagagagagaccaagagtgggcctggtgtaggcttttgaaatctcaaagcccacctccagtgacacacctcctccaacaggacctaatctttcttacagactacaaattgggaaccaaacattcaaatctgagtatatggaggccattctcattcaaatcactacactaggcacagcaacgtgcatgtttcatttcaccagtgggaggtggaaacaagagcattccccagaatctactggccagccagactagcctagtatgtgagccctgggttcaatgagaggtgcgtgctgtctcaaaaaaataagatttggaagcaattaagaaaaacacccagcatcaacctctggactctacacaatcatatacataaaatgtatacacttgcacacccatgaatagataagtgaacaaatacacaataataactggtaaacatcaaatgttactaatctcctggtttggacatgacctaggcacctggtaaagtagacacaaggttttttgcaccagttttgcaacttcctgtgaacacgcaattgtttcaaaataaagggttgttttttaacccaagtggcagtatcttttaactattataatgctctcccccaaaagtcaacatatctaggcatggtaacatactctgtatgataatgacatgagagacaaggcaggaggcctagctgaaaggcagcctcattattatacataataaggctctgtctcaaaagcaggaggttgctcctgctctctgctcttcttttgctcttgcccttcccttcctgctcccaccctctccccactcccttcccgctctctctcccagtgctcatggctggcatctaatcctctacttctcttcacttctccccctccccttctcctacccctcctttctctgcctttctctacctctactaccctcttaactcccctccccatgcccttaataaactctattctatactattaaaaaaaaaatcagaagcagattaggaagatagcttatttagaagacctgagttcaattgtcagaacacacaggcacacaagaagcaaggcatgcttgtggcacacatgtttaattacaacatgggcaagcagacaagtgggtccctaatagcaagatagccgacctggccaagatgagttccaaacaagtaagtgggagaagggtccctgagaacagtgcccaaggttgtcctctgcctaccatatgcaggggcacacatgcatccctacataagaacaaatgacaagcacagaaaacaagagcgaaaactatcactaccactttttaaacaaaaatactgattttaggtacttactctcctttttttgctaccttctttgtactttttgatacttcctggagttttcgttttaatgagcatgtggtcactttaaggaatgtatacagctgacactctaatagaaagaaaagagggaagtggtggtttggatgagagagtggcccccataggctcttatgcttgaatgtttgatcagcagttgatggaactgtttgggaaggacttaggaggcatggccttggtgaaggaggtggactcagagattttagaggctcataccagcctccgtctctcactttctctctgcccagtgcctgtgaattgggaagtaaaccaattactcagctactgctccagcgccataccatggactaaccctctgaaactataagccccaactaaatgttttcttttaaaagttgccttagtcggggtttctcttcatggcaataaaacaataactgagacaagaagagagaaagcttcccaggactggttagccaatttacaaagcactgatcttttgttctaccttcattcaaaccacaaaacatcccttggctacctttagctagagccctgcaccagggctgctggtcactgttaactgtgaaaatgagcctaccaaatccaacacagtggcattgagaggggagggcaggagaactgatccaagtttgaagccagctggtgcaacaatgaattccagctaactgtgcctatacaaaaagaccttgtctcaaaaaaggaagagggagggagggagaggaggcaaactactactgtacatgctaagcctaataagcttatctgaactaaaacttgaaggcaagcacctgtctctccctgtgaacatccattatgtgcaccatggggtcctcagtgctcacacttcctcaatcccatgttataggatagccagagacaagatgctggaagatttgaccatctcaacctagccactatggagagagaatgttctcaggttttaagttcagctggcaagatgcactgtttttctagaacagtctacattttcaggaaatgtgtactatagaaatctagcaatcttgtgtacagcatggctgtgggggttggaaccagctctgaaacctggctctgtcaatcaccatgtaactgtagacaagctattaaccttactctccctgagccaaggcccttatctttttcaactgtaaattgggaacagtaatagttacacagaacaaagacagagagattaaatgaggaggcagtagagccctacacaatggctatcaccaaatataagtaagaaataactagggcctggagagatggctcagcgggtaagagcacttaacccttccaaaggtcatgagttcaaacccagcaaccacatggtggctcacaaccatccttaataagatctgacgcgcgtctcttctggtgcgtctgaagacagctacagtgtacttagatataataataaataaatctttttttttttttttaaagatttatttatttattatatgtaagtacactgtagctgtcttcagacactccagaannnnnnnnnnnnnnnnnnnnnnnnnnnnnnnnnnnnnnnnnnnnnnnnnnnnnnnnnnnnnnnnnnnnnnnnnnnnnnnnnnnnnnnnnnnnnnnnnnnnnnnnnnnnnnnnnnnnnnnnnnnnnnnnnnnnnnnnnnnnnnnnnnccagcacttgggaggcagaggcaggcggatttctgagttcgaggccagcctggtctacaaagtgagctccaggacagccagggctatacagaaaaaccctgtctcgaaaaaccaaaaaaaaaagaaaaagaaaaagaagctattctcttcctctaaacctgtccccttccctgtctaccctcactctggctgccagtgcttcagcacatgatccacaacgcactagttctaactcccctcactcatgtcctgcacatgtccacctgcccagggcaaaagcttacaaactaccactcctcattcaagtgtccaaatatgctgaaccttactagacacagcaacagaaaggagtggcaaggaggctccaaccttctcaactgttgacacttactgcaaggctacagccttttaactagtacataggaaagaaataaaagcaaaaaacccactaaaatcaaaggtgacagatattaaactaatgacctagaaaacctcaaaaaggtggtactttatggtggtatcgatcatggtcttaccttgaaaaaaaaaagaaaatgtcaaagagaaacagaggcagcatgagagagaaggaaggaaaggccagtgtgtgccaagggttctgcgactgatggtgggaggctatgaggagagaatgacgtatgatttgtgaagtctaaaagacattctaggtccatcacttttagcatctaatacatcatcctctcccctactgagaagtcgaaagtcaaactacctgtgggaatcaatccaaagcccatgtgcttccaactaccctgcccaactaaaaacccagaaccaagggaacctccctcagcactgctctgaattatgtcaggaggcaccttatagttggctgagtggttgtagcaaaatggatttaggcagactgatggaaggagaacctgggagctggaacagctaccctacttcatttctgtagcagtgactaaaaacctgactaaagcatctggggcatttggtttctaattcagagtagtcaggacagaagcacaaagcagctagtcacacacacacagtcaagaagagacgaaatgaacgcacccatgctccttttgctcagttccctttccctggaggacactggaggacacaaacccaggaacggcacagcaggctggacaatcaccgcccagatatgtccactgaccagcttgatctaaacaatcccaggtctgttcaggtttgtccagagactcttcccgggtgactctcaagtgtgataagttgccaatttagcactatcacaaagctggtgtgggggtgagcacctgtaaacccagcactcatgcatgaggatcctgagtttgagtccagccagcactccaagttcctatctttaaaaaaacaaacaaacaaaaaaaaaaaaaaaaacagggctgacgagatggctcagcaggtaagagcactgactgttcttctgaaggtcctgagttcaaatcccagcaaccacctggtggctcataaccacccatagtgagatctgatgccctcttctggtgcatctgaattcagctacaatatctttgttatgtatttaatataacaataaataaatcttaggactggaatgagtgggatcgaccggagtgagcagaggtcctaaaattcaattcccaacaaccacataaaggctcacaaccatctgtacaggtacagtgtactcgtatacataaaataaataaataaatctttaaaaaataaaatacaaaaaatattaaaaacaaaacaaaacagaggggctggtgagatggctcagtgggtaagagcacccgactgctcttccgaaggtccagagttcaaatcccagcaaccacatggtggctcacaaccatccgtaacaagatctgactccctcttctggtgtgtctgaagacagctacagtgtacttacatataataataaataaaaatcaaaaaaaaaaaaacaaaacagagactgaggacctgacccaaccaaacaagatgagaaggccagaattgggacacaaacatattggcaataccatcaacaggtacagcagaagaggaagttaactatgactcaacattaagcatgcacagtggatgaatgaggtcatcattaagagaactaggccatggggaaagagcattaccctgaaggagagatgacagagatggtttagatggtattaactgatgcccacagcacgctaaggtgcacatccatgtccaaagaaggtttagtttctatgatacacaggtcacaactacagtcataggcaggaaaaagcaagggagactaaatcaagaaagtaatagcaaagctggacagatggctcagcagttaagagcatgcaccgctcttccagaagacctgattctcaacatccatactgaggctggcaacctccatacctcctgaaagatccaaaacctctggcctccaagtgcacccgcactcacatgcacacaaacacaagccttaaaaataaatattttctaataaaaaggagaaagacacatagatacaagggagccacacaaaaaaaaattacttcaagaaaaggaagctgggcagtggtggtgcacacctttaatcccagcacttgggaggcagaggcaggtggatttctgagtttgaggccagcctggtctacagagtgagttccaggacagccagggctacacagagtaactctgtctaaaaaaaaaaaaaaaaaagaaaaaaagaaaaggaaaggagacagcagataccaaggaccacaagtagttgaaaagcataaagactaaaaacaagttgtggtgtctattttttgcttttaaacagaatagtatgtagcccaagctggcctcaaactcaagactcctgcctcagcctcttcagactacagacgtgccattgagatatttacattgaacccaacacactacaattataggtggtcttaaaaagtagtctgcctgctgactaacaatttattgatgtattgatttcaaatcactacagaataggattttgaatattctcattacaaagaaatggtaattatgaggtaacatgctaactgaacacagtatcacactgtacccaataaatatgtacaataattgcttttcaagaaccttggacaaaataaaatactaagaatgcctttataagtcaatgtgcaatgggttatacaatgaatgatgtagaaatagcgagtggaagtctaaaataaacagaggcagagtatggagtgtagctccactatatggtagtggttgcctaatgtgcctgaagcggagttcaatcctcacggtggaagaaaaaaagcaaagaagcagttacatttgagtaactccctctcacctctacctataccagcaagctctccgtaacttaatgtgcacaccatagttcaattatctaaaaatcttcaagtcgaccttgtattccaaggtgccaatcagcttccccgcctccttacaaacacagctaaatccagtatttgtcagtatgaggccaatctgtcaactatttttttaacctttcatggctagcaatccaaatcgctaactgattcaagcttgtaattattcccagtctccatgttaaaggcttcccaaatcaattttgctttttacctttcttcactgattaattctgtaatcatttaagaggttttaaaatgacaattctcacagggcatggtagcacacacctttttaaacctagcactcaggaagcaggcagactgaggctagcctggtctccatagtaaattctgggccactctgaactgcacattcaagagcaggcctttgacacaccctacagacagtgttaatctattggttctctcaccaatgaaatcttggcacagcagatgggttattttccttcaagggaaatctcagttattctacggtaacagtactagaaactttcccccaactagcaaggaagatcctatacatcactctctccagctacctcacagaagtcagtaccataagacaatcagtctagctgatgcttccttaacatgacatatgttagccaggttgagcatggtgatagactccaagaatccctgcatttgggaggacaaggcagagaggattgggagtctgaggccaatttaggctttttggaccatctcaaaaagggaaaaaatggtcttaaagatgaaagaaatggtgtattactgtgctgcatgtaggtaatgctcaaagcctagaaagtccaaggacccaggtgtccattccccacaagcacttttacttggaaggcctttctcttcccttatcctcgagatccaaacacaccctctaggaagcctcccttctcccagttcccttaatctcaatcagtcattctttgggcaaatgctttttgcacccagcaatcttttacacttaatcttatcaccatctctagttatctgaccgtgactcatctccccactaaactcactcccctccaaggcaagcagataacattactcctaaagagtaacttttttgttcttctctttttggtgctagggccacacctggtcagagatgtagtttttacctgttatgccagtctactattaaaaaaaaaagacatttcaaacacttacatttagatcaacaattaccctaagtccaaatgtagccaggcctggtgacacaggtctataatccccacagaaggcaaaggggacaggagttctaagccaatctgggcaatttagttcaaaggcctgactagtacacaaccacccttcaagccccgacaggttttggagttgtaaaaatgaagaggaaaagaattattgaagtaaagggctgtgatccccaagaaaggccctcgtcctgtcagacacaagtcaggcaatagtttcctgacttagcaaacaaagatggcacccaatctcttgaccttcctcccctgaaacaacaacagaagaaccattagggtcttgacagaagatcctatcagtctcacacccacagtaactatcccctgcatgcttaagttgaggtctacatacaaaatcaaaagcttcacaattaattcctcgaaggtaatcatgcttgtaatgccctaattactgccaactagatgaaactaagcacatgaatgacttgatagctctaccgtacagaaaactctatcccagcaacaagctaagttccctgagggcaggacactatctgtgtatctcatatctacattctctagggtgtagagtatgaaggctatagaaaactaaccaaagccaggcagtggtggtgcatgcctttaatcccagcacttgggaggcagaagtaggtgaatttctgagttcaaggccagcctagtctacagagtgagttccaggacagccaaggctacacagagaaaccctgtttcaaaaaaccaaaaaaaaaaaaaaaaaaaaaaaaaaaagaagaagaaggagaaggagaagaaggaggaggaggaggaggaggaggaggaggaaagaaagaaagaaagaaagaaagccagccagccaaaggatttaaggatttgtacactctatttctcaccgcagattactcacaactgacaaagggggacacaaacaaagcaagcaccaagggatggatgggtggacaagcaaacatggcacacacactcgaagactgcaaggaaagcctgcacaccaacaccgtgcatgggtcttgaagacacttcattaagtgaaatgtgccagtcataggagagaagactcttctaccaaaaaaaaaaaaagggggggggggggagagatggctcagcaggtaagaggactgactgcgctttcaaaggtcctgagttcaaatcccaacaaccaacaaccatatgaaggttcacaaccatctgtacagctacagtgtgtactcatatacataaataaatcaatctttaaaaaaaaaaaaagtaggaagattagatcagaaggatagagacagaaagggagacacactggagaccaggggacaggagaggaactgctaaaggagggaccaaggtcagtatgtcatgataccatgttttagtttggggagatgaaattccgtggcgatgtaaataaaccatgagagctacacaacagaaatgtacatgtcagaaaactgaaaattagtctaagtccttaagtgtaccttatcacaattcaaaaattcaaactttcagctgggtacagtggcccacacctttaatgccagcactcaggagacagagacaggcgggtctatgtactgagtgcagaacagccagagacaactacacaggaagaccctgtctggggggagtggggatatttaaattcaaacatttcataaaattataatgaaggggtgggattcatatatgtttcctatctttaaattacttttggaaaattcttgtctgtacattgtatagatcaggaaacaaactgaagttcaacaaatctgtcaccttgtctagtatgtacacaaacacacacaccatatatagcacaaatcataccatgctgctcagctttaatggtgtattttacccagcttggttgtaaacccaggaggacaaagtgagtgccttagaacaacctctttccactaaccaggactttatgtaccccacccaccctcccaccccttaagagtttgacagtctggtctgatgtgtgcattaaaaaggtgcaccagccacatctcaatacacctctaatcgccaggcaatgtgtgtgtgtgtgtggggggggggggggggatcagtgctcaaacccaggctgggcactcactcatcatgggctagatgccaaactgaggcagataaagaatcagaggactaacttcaccttgcctactgtgatgggcagataaggctcagaaacattaaaatggcaaaagacaagcactcaaccaactgctctgagtacacaaaccccaaggactatggaaaagctaaaaagcctgcaagaagaggaggtattttcctttcagagaggttttttttagtgggacctgaaagtatgcatagttttccaaggaaaaggccagagcagaaaacaaaaagaacagcaaccaagatgtccaaagaccccactgctgactctgccatcgtctgtatccgtaaccagtaacctctacaaatactactttagatttctgcaaacgcaaacctaccgctggacagatggtctccaaaaatccagccagttctataacagattgcttatgttcaaatagtgctactaacccaaaagagtcaactgaccttgggcagagtaattaactgcttcttgcctcaagtatcccccatttccaatcagggggttgatatactaacaaaatacataccactgacttagcaaaggaaatgacacacagtatgccatcaataaataaatgatactgataatcacgacttgctgcacaagggcacagccaacagtgaggcagggggttgtatccgtggcgctactcaagacatccagtgggggtgggggtgggggcaatgggagcgtacagccggttgcacaccctgcacgcatgtgtcaccggccaggctcgcacgcgcctctccccgcctcagggaagaagagatggctcagctgctctgaggcccactgccacccctccaacccggtccctggacccactcaccatgctggccgggaaggggatggctcaggtgagctagctcttgggatccgtcgtgtcccgctcgcacagttcaggtcatggtcccggcaggctcggggagtcccccgcccatgcaaagacaaccggttccctacccgggccccgccggcacctttaaaaggagcacacgggccccttcggggaccccccgaagcgattcatccagacctcggcccaccccggggaaacgcaaaagcagaaaatggggttcagaggcggctacacgaggccccccgcctgggcccgacccccgagagggaggctgcgggcccaggcagggactccccggcctccgcggcccgaggcggcgacgggcctcagccgagactgaaggggnnnnnnnnnnnnnnnnnnnncagaggctgcctgggcctgggcggcgcggccggctcaggagagaggcccgcgggcccttgctgtcctcgccacctctgtcctcgcggcgggctccctccgcatccctgcgcgccaccagtagccgcggctcgcccctcgcggccaccctctgccaacagcccaacgcgccggaagtggcgagcaccaggcggcccctcagcccgcggcctgctgcggcgctggaaccggaccaatccggaatcaagtgagggcagaggagggcggggccgcacctgactgttcactggccccgcccaccacgtccccgcccaagaggccagggaccgccgcgttggtaaagggacacgcggccattttggtaaaggaaaggtttccctttcgtttcttttcactcattcattccgcaaatcttttctgagcatctttccggaccctgacaccggactagaagttcggcgatgctggtctgtgctctcctgggatcttattcattcagtccacagttctgggtcctaggaccagaaagtgtcacaggatgaaattgaaacacttagtgtcacgatctaaattggcttcatccctaattccagactccaacaccaggtgactcaacaccctcttctggactctggagacacctgcacccatactcacatagcatacacatatataggtacacaaacatgcatgtaaataaaataagtttttatgggatatggctcagcctttaaaggtacttgccactatgtctgacaacccaatctaagttcaatcctcagaacctgtactggtttaaataagaatgcctatcccatatctaaagcttagtcatcagaagtggcactatttgaaaccgattagaatgattaggtgtggtcttgttggaaaaatgtgtgtcactcggggtgggccttaagagttcaaaagtcaccgggcagtagtggagcttgcctttagtcctatcatttgggaggcagaggcaggcagatttctgaattcgaggccagcctggtctacagagtgagttctaggacagccagggctacacagagaaaccctgtctcagaaaaaaaaaaaaaagagttcaaaagccaatggcagggatggtgagatggctcagtggttaagagcaccgactgctcttccaaaggtcctgagttcaaatcccagcaaccacatggtggctcacaaccatctgtaacaaaatctgatgccctcttctggagtgtctgaagacagctacagtgtacttacatagaataaataaataaataaataaataaataaacatttaaaaaaaaagccaatggcaaacccagtctccttttgtgaatcagatgtatcttttagctactgttccagtaccatgcatgtcgacctgttccctgccatgatgatagacggaccatctgaaactggaagcaagcccccaattaaatgctttcttttacaagagttgtcatggtcatggtatatattcacagcaataaaacagtgactaaaacaaaacccaattgaagaaggagaaaataaattaccacaaattgttgtcttttgaccacactagtatcatgcttgcacagggacacacacacacattaggtctcaggcagtccacatatccagaatgagctcaagatggactatagaaggaattctggtgttagataaaagccagaattcctaggaaacttgtgaaacaagttcctattcccccaaaaggagtcctttcccttacttctggcagaagggacacctggctctccactgacttatagctatggcacttatcagcatatccacgtggcctccaggctgctgaggtccctattcacaagtacttgttactcacttcaaagattccacactagcatcctgacccttctcaccttctccctctaccctaaaacttcatggctgcttcccacccccacctacgcatccaccttataacttaatgattttccaccccctcctccctgtctccccaactctctcctctccagatggccctgcccatctcctatctactttttctctctgctctggaatctttcaggggcctctggatgttttctctctttttcaaaaaaaaaaaaaaaaaggaaaaaaaaaagatttatttattcttatatgtaagtacattgtagcggtctccagacacaccagaagagggcgtcagatctcactacggatgattgtgagctgtcacatggttgctgggacttgaactcaggaccattaggaagagcagtcagtgctcttaaccactgagccatctctccagcccctggatgtttttttttattaacaataaaacccttccccctaatggagcagtcattttgtaatttctctactgtctcccccagcaaatatgaaaatgtgaaagagagagaagctgggggcagggggaaggggagaaggtggtctgtctgagaaatttggaattatttctcataaacttaaaaaagcttggtgtaggcatagaggctcatgactgtgagccccagcaattggaaggttgaaggattgatatgaccgtaagaccaacctggaccataaagaccctgtcataattcaccctcctaaatagtttagtttagagattgtccagatggagttttacagttacaggattacaatttgattccccccttcccttttggaaaacagtaaggttgttggttttttttgaaaattaattttttattggatattgtctttatttacatttcaaatgttttcccctttccaggtctccccttcagaaaccccctactccatcccctctccccctgcctctatgagggtactcccccacccacacacccactcctatcttcccaccctggcattcccctacgttgggacatcgaacaccctcaggcccaagggcctctcctccactgatgtccaacaaggccatcctctgccacatatttggccagagccatgggttcctccatgtgtattctttggttggtggttcagtccccaggagctctggggatctggactgttgacactgctgctccctccatggggctacaaacctcctcagctccttcattcccttctccatatcctcctccgggacccctacactcagcccaatggttggcctcgagcatccacctctgtatttgtcaggctctggcagagcctctcagaagacagctatatcagggtcctgtcagcaagcacttgttggcatccataatagtgtctgggtttggtgactgtatatgggatggatccccaggtggggcagtctctggatggcctttctttcagtctctgctccacactttgtctctgtatctcctcccatgggtattttgttcccccttctatgaagggccagagcatccatactttggtcttcctccttcttgagcttaatgtgttctgtgaattgtatcttcggtattcccagcttctggactaatatccacttatcagtgagtgtataacatgtgtgttcttttgtgattgggtttcctcactcaggatggtattttctggtttcatccatttgcctaagaatttcatgagttcattgtttttaataactgaatagtatttcattgtgtaaatgtaccacattttctgtatccattcctctgttgaaagacatctaggttctttccagcttctggctattataaataaggctgctatgaacatagtggagcatgtgtccttattacatgttggagcatcttttgggtatatgcccaggagtggtatagctgggtcctccactagtactatgtctaattttctgaggaactgccaaactgatttccagagtggttgtaccagcttgcaatcccaccagcactggaggagtgttcctctttctccacatcctcaccagcatctgctgtctcctgagtttttgatcttagccattctgattggtgtgaggtggaatctcagggttgttttgatttgaatttccctgatgactaaggatgttgaacacctgttgtggggaatattaaaaaataaaataaaaccggcacgttcccacacaactctctgccctggcaacctggctgcccatgcactggtgggcaatagctgacctgtttttgtcttgtggagactctctggtccggagctcccaaaacatctccacccaactccccaacttccccctggggggggtccatttcaaatctcccacagccttcgtggtgcacctcaggcaaacccacgctgtgtcaccgtacctttctctctggaacctggacaaacgaccacatgaaggaaaacacaacacaaacttagttcagaaatgacagtaattcaatcattaggtgcaacaactaaaatcctaatctcgtaagccttattaaatctcaatcctcctgtgataaatcctgatggatccgccattgaaaccagaagacactcatggctacatcttgtcctcatgctatccccatccaaaagacctcactctctcctgcttcctgctttatccatccaaccccataaatggactcttagagcctattacagatgttgaacaaggtgattgggagggggtgacattttttcccctctaataagccaactaaagagacaaagaagtactgagaggagattaagtcaaagctgctggtatgctgacatcagaacaggaaggtctaggtttgggtttgtctttttgagacagagtctcactatgttatctcagttggcctggaactcacagagatcttcttgcctctgcttccttagtgctggaattaaggttgtgtttactaccaaggcgtgaaagtggtcaccatatagagcacagcacccactgcactccagcatgaagctttcatctatgaagttcacgcttgagcaccacactatgaaaatacaaacaaaacatgcaaaagaaacctcatgataaataagtgtacaattttgtgtcgagccacactcattgctgtcctgggatacataattggtcacacttaggagaagggacagagaaagtggtctggtgaaaccctgaatgaggtctcaccaatctttcaaacacctgagtgagctttagatttcaatagaagaatggggcgaaagacatgaagcgtgcaaataggcagtcttggcaaggtggagcccggtggatcttagcagtcctgattcttcatggttggaagaaatgactttcagccctcactagagaaaggaattgcctccctggtgataatgtcttccctctgggagcaacccagccatcacagataattgccctcatctggggagtggtctgtcctttgaggcttatgattgcttcttggtcatttcagtttgttgtcttaaaggtgtttatgtcagttctgattttcctggaacccaaggtaagtgcaggtgtggaggtttggagggggaagactcacttctggaacaggacatcagagacctaaaaacaacagagacctaaaagtacaaaatgaagacagagatgccaggcttttaacttagttttcctgtagctcaaattgagaagtactttttagcaaaagctatttctaacagctcatttaaaaaagagctttataggtagcacaggcctttaattctaccactaagaaggcagaggcaggaggatctctatggttttgaagccaacttaatctacacagtgagttcaggaatatccaggaatatatagaagagaccctgtctcaaaaatagatagatgggtgggatgatggatagatggatggatggatggatggatagatagatagatagatagatagatagaaaagaataagttgactgtgtaagaaggagtgttatgaaggaagcaaggggtggagatagaatggtggttctcaatccctttggggattgaacgactctttcataggggtcacctaagaccactggaaatcacagagatttacagcaatagtagcaaaattgcagttatgaagaagcaatgaaataattttatggttggggtcaccacagcatgaggaacaactgtatcaagggtcacagcattaggaaggttgagaaccaccgagttagaaaatggagagaaggaagcagcaattgcaaaagccccagagggccaagtatgtagtgactcttgctctagtctctaacctgctttaccaaatagagtgctgcggtttgtttattttaaattttacttgtttatatatctgttcctgccggagtttgtgtgttctatttgcatacagagacgagcatggaggccagaagagggtgatggatcccctggaactctgtggtagtgagctgccgtgtgggttctgggaccagatcctgggttctctagcaagtatccttaagcactggaccatctctccagctccaaaagtgctgggtttaagagatcctgtcaagaagctctcctgagcagcaaagctgagcccccaggtgtccccgccacataggtcacagcacacccacccaaaccagtggcttgcaaaccttaaatgggaattgctccactcctcttgattcttattcagtagatctgatgtgggtcctaaaattcatatctccaaacaagctcccaggtgatggtgatgcttcaggcccacaggtcacatttggagagccaataatgcaattcatgtcaaaagacaaaaccacggagtgtacctcagggtatagctttcaatagcatagtcatcaaaaggatgaaagaaaagacagaatgacaataaattttaaagattttttttaattatctagtttatctagttacctattttgtatgtgtgtgcatgtgtcaccactctcatggtaccagcgacgactctgacctcccactgtgtgggatttgagggtcaaactaaggacattaagccttctgctaatcaccacacactttgagccatctcctggcctttaagaatcttaactggaaccagtggtggtggcatatgcctttaatcacagaactcaggaaggaaaaggaaaaggatctttgtgagttgcaggccagcctggtctacacataaagttccaggacaaccagggtcacacagagaaaccctatctccaaaaaccaaaaggaaaaaaaaaaaatattacctggtctttgttttcaattctagactcagggaccctcatgcaataacacaaaattgtctcaatggtcacagggcagagaagtttgatttcatagtttttattttaaatatgtgtgagttcttttgggaggtgtcttagctaggattttattgctgtgacgagacaccatgaccacatcaagtcttataaaggacatttaatcggagctggctgacagctctagtccataatcatcatgttgggaagcatggcggcatgcaggcagacatggtgctggagaggtagctgagaattctacgttctgatccaaaagcagcaagaagagacagtgagccactaggcctgggttgagcttctcaaatctcaaagtccaacccccccccccccattgacacatttcctccaaggctatacctactccaacaaggccacactccaataatgccacttcctatgagtcggggggggggggggcatttttattcagaccgccacaggaggtatgcatgtttatgcaggtgtgtgcatgtgtatatacaaaagccagagaacaggaatgtaattcacctttctttgaggcagggtctctttactgtcctggagctcatcaattaagctagtctggctgaccagcaagtacagggaccctcttgtctcagcttccacagcactgggaatacaggggtatgctgaaacacaacttccttttcttttggtcatgggttttaggactcaggtcctcatgccttctatcttttcagcgttatcttaacatattcattttcgtaggcaagaaaaatttgaaggaaactgttgtagtttatatatgctcaggcccaaggtgtagcactattaaaaggtatggacttgttggagtggtgtgtcactgtgggtgtgggctttaggactctcatccaagctgtctggaagccagtcttctgctagcagccttcagatgaagatgtagagctctcagctcctcctaaaccatgaccatctggatgctgccatgttcccgccttgatgataatggacagaatctctgatcctgtaagccagccccaataaaatgttgttcttttaagagttgccttgataatggtgtctgttcacagcagtaaaaccctaactaagacagaaacagtgaaatggtcattttgaagttatttttcttataaaggttaaagcagggcagagagtatttcctcatcatgccagacaaaacttggctgttaggaaactttgctccccaatatcctgtcccccagcttctcaggtgaacagctaaagtgatgtgggatttcagcatgggtgacctccattttgtttgggccatcgacttactgcaggagtatagtcccacagtctcccatggatgtttttgattttgttgttctcacctataagtttttttccacattcattattatggaaagcaatggctttcatgttttctcaaatggcagccactgtcccacactaaacagcacagacacacttttgcacttaggtgttcagagatattagtttttaaaacattatgcaataatcagttatcatcatgaaacgagtaagaatggaaaaatatagattactatggctccaatagttatgtatcaacttatccagggagttaagctaatctgagagcaagtagggataggacatgtaagctgaggcttgtaacaagatggcaaagaaaggaggcatgggacattctaggccatagaaatagcattgtccgagggaagccacctaaagagctaaacagatgatttagggaccaaggccgagtcacctgtcctcttttcatgtgtcagttagtaggatgacagtaaaaggactaagaagagatgtgtttggtatgttagaatgaaagcaagatcttaattcactagaggttgagctggggatgtagctcaataggtagtgtgtttgactagcattccctaagccctgccttccatccccagcacctcatacaaccaggcattgtagcaaatggaacccaggaccgagaaaatgaaagcaagaggaccaggagtccaagactgtctttgctatgggcttatgtagctcggactagccttaagccctatgtaacaaggatgcccatgaattctagatccttctgcctctacctccaaaatgctgggattataggtatggataactcacctaatcaatagctgaagtaccttggacaagtctgtttccttactagaaattggatgaagtaagatatccaagccacactcaaaggtacactttgggatgatacaattcccatgaatggcttttcatagttaggtcaggcttgactgggcatggcaagtgcccctgagtccattctgcaagggcgttcttgtctcagctctgctccgcatatccaacttcattcaaatgggttccaggtactgccaggaccacgaaccttcccttcatagccatggagagaacatttttgtttacagtctgtctcagaaaattaaggttcatccttctggtcctcatggcctaggtctcccatcctcgatcccaccagggtgaagaaagatgagcttctatgatgaacttaaaatatgttcccttgaagctaaagaaactgaacggtcagaagccactgtccttcctctgtccttccattgccaagctggaagaagctttaattcagtgcactgtaaaacacctgccaatgaggcatacaacaaatggcagctattagtaatctcaccccagggattttcgcccaggtcaactatataacattttgttattaatattaatctcaagtccatcttgttccaaaaaaggattaagggttgtggttactttttgttggcagtgcaggggcagcccccatctacctttccctgcctgtcctactgtctttgcctgcctttcttcattctggctgctcaatcagcaaacgttaaaagaattagtatcggggtcccctcccctttccttcataactagtgtcgcaacaataaaatttgagccttgatcagaaaaaaaaaaaaaaaaaaaaagaattagtatcaacctggcatcacacatttggctaaaaactaaagcttccaaaatgagcaggattcagaaaaaagtgttggatacaggtgtcagtgacagacacttttaacattgtgtatggagggctgtcacggaggtgtttcatggaggtgtgtgctgtcatctttttgtgtatgtgcttctgaagcgtgaaaggacgtaggaaggggcagctacttctgtcactctgtaacaggcccccagacctcagcaacagtggcaccgttctaccttaaaacccagcatagaagccccaacacctgccaaaattggaacaaagacccaatccatcgaagacctagtccatagttccaggagagcccctaaatgcactaacctcactttatgacttctgtacttctgctgcttactaagtgaagtgtgacaaccaggatgtggggtttgtgcataaaagacagaagggctgtgaggcctcagagctgcatgatttgggtaagttccctatgaagctagtggccagcaataaatacttcccttttggctttaagagtgtctgtatggagccgggtagtggtggcgcacgccttttaatcccagcacttgggaggcagaggcaggtggatttctgagttcaaggccagcctggtctacagagtgagttccaggatagccagggctacacagagaaactctgtcttgaaaaaccaaaaagaaaaaaagaaaagggaagggaagggaagggaagggaagggaagggaagggaagggaagggaagggaagggaagggaagggaagggaaagagtgtctgtatggtgggcataccttgaaacaattgtttgcaaggctgaacaaatactgtaacctttgtgttggttcttgatggatgcagtcttcttctcccatgccaggctgtttctcacggtgtcagaactctttccattgtaagtggcaagggtggggctctagagttggactctatcctactatatgggggaaggaaatgtattgtctcatgtaaagtaactattaaagggatagggatgtatttcaagcctgatagcttgcaggtctcaaatgataacacagaacccaacttttctcatttgctggttccgcttctgctcctttgtcggagctagaactgaagctcaggtgggagatgccttacctaacacatgtgaagtctttggttcaaccccaatactgtcaaagtactttaactatatggtggcctaagccaggaccagcttgtatccttcatcatgctgtagcctggcagaaaagatagaatgtccctacatggtcccaagaaagtaatatcattggctagattgtgtcaaatgccaaaggctcactcctgacccaatcacagtgaccagtgcagtgcagtactcgactgacctgactcacaagccccagaacacttcattaaacggccatggccttgtaatcacggctctgggggtctctcagatcccagaggtttctctgactttgcaaatccaaaaacatgttagattctcagcagacagaaaccaatgctggcactcaatgtggatttaaaggaggaaggaaggttgggaatctggctccccctggagatgactgcaaggcttagtttgaggctcagtcagacttcagggcttccctccacctgccacttctctccaacctcagatttcttgtcccgaagatgggactaacattagcgctgttcagctagatggcacctgtatcatcggattcttctgggagatccaaactcggattagaagagtcgacccttaggttggttgtttgttttaggacagagggaagcaagcctacaaaggataataggattccccagggaatcccctgggaccagaaggaccattagaaagtcagaaggtggaaggcagggaacactcaagggcagcgagggaagtgccagcccaagagatgggcagtcctgcttgcccacaagggggcctctctgaactccagctggtgggtgtctactagatcaacataactagaagctaaactatgggggagcccactgactcagttcacagaggtcaacctatgggaacagggtcagagagaggagtgtgattttagagccacagatgaaagaaatcggctgtctgccatcactggctgtgaaatgtttagaagcagccctgccacatcaaactcttttaaatagctgggggtggtggaccaaacctacattccctgtactaaggaggctgaggcagagggatagagagttcaggccagcttagggtaaacagcaagatcccttctcaaaaacaaacaaacaaacaaaaaaaaccaaaacaacaaaaacaaaatataaccagaggcctgtttaagagggataatgagccaacacagctcctctcttgtaagttgatgaaaggtcaatgagtcgttagccccaaccaaccaaccaatgagaaaccagctggcaaggcagcatcatcagttaccagtcaactgaatccatccaagtaatgaacttcaagggctggagataggctcagtgggtcaagtgcctgccatgcctacctgaggacccaagttcaggctccagcaaaggctgggtgaatctgtaactcccgcactgcagtggcagagaccagaggctcattgaggtatgaagctacagccctgctccagactcagtgagagactctgactctgcctcaaaggaatcaagcggagatgactgatggagtaggacacctgacatccttctctcctgtctgtcaaaatttggattcatctgttcatcataagcttcagcttttttgcatatttggttttttgagacagggtttctctgtgtagccctggctgtcctggaactctctctgtagaccaggcttcttaatgaaaatttataagtgctgcagtttttctctctaccaggctagctcccaaataattgagataggaccattagatttatttaacagcttcaaagcacaactgagcagtattaatctattttaatcccctaaactcatctggctacctcccagaaaaaatccccgagatacttgcattagcattgatctggctctctctgctccaggtatgttttcatggtgtctcctggaccctctccttatggcatatccccacttctgcccctcttctcctccctccccctcccctgaatgggagaaagtccagccctattctttcctctactcagtcattggatgatcaacctcttcattgaccaatcagggaattattggggagcaatgtttacacaatattgagacaggagattctcagaataaggattgcaaccagctattggggaacagaaatcagcatttgaatacaaggacaatctttacacagggcacaataacattatacctacacaggctggccttaaagtcagagatctgcttgcttctgcctccccagttctaggattaaaggcttgtgccacctgcttatacattctctgtctctgtctctgtctctgtctctgtctctgtctctctctgtctctctgtctctctctctctgtctctctgtctctctctctgtctctctctctctctgtctctctgtctctctctgtgtctgtctgtctgtctctctctctgtatgtctctctctgtgtatgtctctctctttctttctctctctctctctgcctctctctctctctcacacacacacacacacacacacacacacacacacgtgaggttccctggagcataagatcttcccatttcagcctgtgcagtactggcattacaggcatataccatcatgcttggcattagttacctttttttaaatggcacataaaattgctgaagctgtcgggtggtggtaacacatacctttaatcccagcacttgggaggcagaaacagaggtgaatttctgagtttgaggccagcctggtccacagagagagttccaggatagccagggctgtacagagaaattctgtctcaaaaaactaaaaccaaaaccaaaaccaaaaacaaaacaaaaacaaacaaataaaccagacaaacaaaaaagatgaaacttaagatgaacagatgaatccaaaatttgacaaaagaggagagaagagaccctctacccactgcacagatgacagtaagctgagcactgtgatgtgtctggtttttactgtttattttgtttaagatgttagtttacctttattgaggtagcctgcactggggtttttgaacaaaccatgtttgcccagccagactcagcatctccagttaccaggccttcttgttaatgtttggccagctcagtgtatgggatggcagtatctttcagcttctgccactgggtggcaaagctagattagttgacttgtgggggcctgggaaccaacctcaattcttagcacaacctaccttcctttcctgtgtgttgaagaagagcacacagatggtctctgagaaaaggatttggacataagccttattgaatcatcctgagaacacatcctgacagtagcaagcaggacaagcaatgaagaagctcttggtgaggacctttcccttggtcaaaaactattgtagctaccctccactaggtattgctcaggtgacacaggaagcttgatgcagacattgtcagcatgtccttagcaggtgggcattctaattctctgtggaactcagtcatgaggttctggaataccaggaaaaggaggctgaggaccaggaactggtatgcatgtgtgccgacttggcaagtggtcctttataatcaaagaaatagcacttgaattaagctgtgtagctcttggaaggcatgcctgtataggatgctccacaaggcaggaccttcagtgagttctttttggccagtttgaacccaggtgtttgggaagaagttgagcaccagcagaaccagcaagcagcctggctcttctccacacctgctggttctcccagtttatctcccttgagttggccacagtcgtcagggcttgtgatcaagctggccctaagctccaagcctacagaggccagaagatggtgttggatcctctggaactggagttacagatagtttggaaacaccatgacaatgcagggaatccacccctggtcctctggaagagcaaccagtgcttagtgattcacccattctccagccttgccatgcctggacctaaatgcacttctacttaatacatgatcccactctgtagcccaggctggccctgaactttccatgtactccctgtctcaaatgcctcagtgctgggatcatagtgtgacttttttttagtccttttttttggttttatttatttctttatttcttttatgtatgtgagttcactgtcaatgtcttcagacacaccagaggagggcattggatcccattacagatggttgtgagccaccatgtggttactgggatttgaactcgggacctctggaaaagcagtcagtgctcttaaccactgagccatctctcaagcctccatgattttttttttttaatagttgagttaatcagtctgtggagcttctggactctttgaataatattttaaaaggtggcttttaaggcaaaaatgataaaaaaaatttgcctatgattgttcaggtggcaaggtctaactcaaggccttgcccttgctactttctggtggagctacttaatcaacccttgttttgttttgattttcaggcagggtatgaatgatgtagctcaagctggcctcaaactcaccatgtggctcaggctggccttgaattttttgtttgtttttggttttggtttttggtttttggtttttcgagacagggtttctctgtatagccctggctgtcctggaactcactttgtagaccaggctggcctcgaactcagaaatccgcctgcctctgcctcccaagtgctgggattaaaggcgtgtgccaccacgccatgctatggccttgaactcttaatcattcttctgcctccacctctggactttaggcctgcaatatcatattctattatctatcaatgttgttgttattgttattttgagacagagtcactccacacatcctcgactgtcctggaactcactatataggtcacacctacttcatattcacagagatccacctgcctctgctttctgagtgctagaattaaaggtgtgctctaacatgcccattactttttaagtacttgtacagctttaaaagggggctgggtaaatcattgatttgcttggcttctattttggtatacagcatgacacatgaattcaactgttgttttgagactccagaagccaaaccaaaccagaggggcatcctaaggtgatttagttctcagcaagaggccaggccagttgccagaccctgaagcatggaacaaaagatgtacccagagctggccaaatttagtcaccaggataacaggaggcagcaccatgtcccagcaggagtgatgacaagaagagaatcagatgacaaggcccaagtgccagtcagctgaggaacaaagacacaaaggaagggaccagagtactggttgcttcctgctacagacaaagcctgcctccggcttggtttggggtcttgtgtttctgcttttaaagtctggagactgcacccagggccttgtaatactaagcaggtactccacctatggcttgacctttgtgaatcttgtagccttccaaacttcaaggtcatcactacccaaaaccttacttacctgatactcagaggcaaacgagagcattattgccttctgaaagttattcttttgttttgagacagtttctcatataactcagaatggtctcaaactcaactcggagtggctttgagctgttttattattagtattattactattattttaatgaagcatatttgttttattttatgtgtgttttacctatgtatatgctatgtgcattatgtgtgtgcctggagcctgtgcaggtcagaggaggtcatcagatcttctgaaacaggagttaaagatggttgtgagccaccatgtaagtgttaggaatttaacctggttcttctgtaagcaacaagttctcttcccacggaccgcctccccagccccagcactgaacccttgacacccttgcctttatttcctatgtccaagagttacagccatgcaccagcaatagaatcctattcgtggggcgggggagaccgctgcctgtaaagtgcaagggcctgagtttgagaaccagcatttctgtaaaagccaagcatggtgacagatgcctgtaatcccagtcctaaggaggagacagtgggatccctggagttcacctggggtcatcctcacctgatgggaaaccttggaccttagagagaggccctgttgcaaaaagtaagatagatggttcctaaggaatgatattgaggatgtcctctgacccccacaagcacatacacacaagtgcacaaatacctacttgaatacatacatgcacatatgcacatgcacatgtgcacacgcacacacactcctactcccaaatacacttattctatatttatctatttatttactttgtttttttttttttttttttgagacagggtttttctgtgtagccacagctatcctgcaactcactctgtagaccaggctgatctcgaactcagaaattcgcctgcctctgcccccaagtgctgggattaaaagcatgcagtgccactaccaggctaagggagtgtttatcatctaccagccttaataggtgaccaaaagtagaatgaaagtcaatgaacaatgggttcaggaggtctcagtgggtaggaccaagcctctggaagaatccttaatagatggggagttgctctgaactgcaacagtgctgatttttctctttcaaaaacaaatcaaccaatcaacaatcgcaatgggcatggtggctcagtttgtgagtaatcccagcactctggaggtagaggtgggaagatcaggttcaaggctaggagtggctataggagacagcctcatagcttaatcccagctctcaggaaccagtcagatctctgtgagtttgaggccatcctggtctacaaaacaagttgcaggacagccagggctgttgcagagagaaaccctgcctggaaaaaccaaataaacaaacaaatagataaaaatgtaaaaagaggtcacacctgcaatcccagctcttgtgaggctaaagcaggagaatgccatgagttccagagcagcctgggctacagactgagactccagtcttctctggtgtctttcagcagcatttgggagtttcctttgcaagggtttggtgcatcttgtattaagtctattcttaggctctctgtcatctctgttgctatagtgagtgtggtcaccactttatgccctttaagaggaccgtgttggtagaagtggagaagctattgattttttggtcttaattttagacccagccaacttactcaatttttccatctttatttttttttatttattttctatgtagcctaggctgtctcccagttcatagtcctccttccttcattgcagatgtgctccacctagcctgagtattttattttgcagcaaaaattcaggtagaaataatacacctgcaagccatgttgatttgacctcccttgtttctgttcttacataacactacaatttaagcgttccatccctgtgtgttcagtgaggaccaagagagacatttgcatgtaggttgtggcttcatttatgttcttcccttcccatcccctctgttggtccagcaagtcttgcttttctatatatagtcactgtgaatgtccctcatccactgggacacaagctgggggaacgtgtgattggggtggagcaggaaagcaatggccttacttcagatccctgccctgtaactacctctcctttatttcctcttgaaaaattcctcctctatttaaacacaattatcaggaattgagatcaaagatcctaaccaggcatactggcttgcacctgaaattccagcccttggagactgaaatcaacctaagatacatggtcagaccctgttggtggtgcttcccacctttgagtaagcgtctctctctctctctctctctctgcatagtactggctggccaccctggaactaactaggttgaccaagctggcctccaactcatagagacgtagcttcctctgtctctcaagttctgggattaaaagggttcaccaccacactcaacttctgtctgtgctttttgaccagtaagtatgtcctgtccaggcaaagctcagaaacatatcattttaaattcaaggccagctcaagttactcagcaacactacccttttaaaaacaaacaagccctaaatcaaacaaaaaccttgaaacaaacaaacaaacaaacaaacaaacatctgttatcttctaggcaaagagaggaacatgtgatcagcctgatcttccaggaattttaacattaggtctaagacgtaaaaaccgttggactgtagttcctgaagcagcacccctctttgtgacaagcccacccttcacccctcctggtctctacagattcccattactgagcctgtcgttgaacccgtgagcagcccatttccttcctagaagtccacgttcacttaagtcagcactggttaatgacagggtaggctgtgctgccgtggcacacacagagcctgaagctccaggagacaagcatagttaaaatgtcttctgagttcatgtcctagagggactgggtcagcagcgagactgcaccttgtcattcagggccccgggctctttccatctttgggatcaagatctctacatgtccttagagtcttcagtggctctcttgaaggtggtttaggagggaagtctaaaatgaatagacttgcccaaattccataggtctaaacttagtcttacagccccacccgattgcacagaaggccatgaaatgtagtctaggtgcaggagagctggctcagtgggcaagggcacttgctgtgctgacatgagaacccaagtttttattccagcacccacattaaaacaaaacaaaagaaaaatcaaccaggctttgtagcacacacctttaatctcagcactcaggctggtggatctctagtgatcttctaactaaaaggagcatttcccttttcactggcacaaaggacagatggctctccgtaatgcctattagcatacaaaagcacatgtgggggtctccaggatcctttagtatgacaataccctgttacacatttcaaagtccatgctgggatcctagctcttctcacctcctgcccctcccctaaactcccccagctcatggacttccctccccaactactcattctccttataannnnnnnnnnnnnnnnnnnngtcatgttgtccgtttatattccactattgcttgcaaccagtatgcctctttgttgttgttttgatttttaaggcagggtttctctgtgtaaccttggttgtcttggaactcattttgtaaaccggactgcccttgaactcagagatacctctgcctctgcctcccaagttctgggattaacgatgtgttccatgactcaaccagtatgtctttttaaaaatgttttttatgactatttttataaaatttgcctgaatttatatatgtgcatcatgtgtgtacctggtgccatttgaggccagaaggggacatcagatgtcctgaaactggaattatagacagttgtgagctaccatgaaggtgctgggaacaaatcctctacaagaacagcaggtgcagctggggatggtggcgaacacctttaatcccagcacttgggaggcagaggcaggcagatttctgagttcgaggccagcctggtctacagagcgagtcccaggacagccagggctacacagagaaaccctgtaaaaccaaaaaaaaaaaaaagaaaagcaggtgctcttaaccactaagtcatctatctagtcgctccaggaaaagttgtatccagctgaacctcatgactatactctcaggaactaccaagtaggcgatcctgagtgggtacagcaatgcacacttgtgatcccagcacttgggaggcagaggcaggaggagtgtgagctaaggccagtctggtctacatacagtgagacactgtctcaaacaagcaaaataaacaagggatgagtagataaactattgtcatttgtggcctgattatgccattcccaaattcataggttgaaatcagttcacttaggtgatggtaacagtctagacaggggacctatgggggctgattttatcatgaaggctttcccctcatgaacggaatagcattcgtgtgctttagaagaggccccaggtggggagggaggacaaggaacataacagcaatggtagagttgttgcctagcacaaaattccaaaattctgggtttggtccccagaagggcagaataaataaatagattaaaaataaaaggcctagccgggtggtggtggcacacgcctttaatcccagtactcaggaggcagaggcaggcggatttctgagtttaaggccagcctggtctacaaagtgagcttcaggacaggcagggctacacagagaaaccctgtctccaaaaaccaaaaataaataaataaatggcctagttcacagcttttttgttgttgttgttgttgttgttgtaccaaaaggacttgatcatgtaagtctccataataattctcctcaggctctgaataggctgtcaaaagtagccaaaggccttctggctagaaaatagcagaattaggactcaaggccnnnnnnnnnnnnnnnnnnnnnnnnnnnnnnnnnnnnnnnnnnnnnnnnnnnnnnnnnnnnnnnnnnnnnnnnnnnnnnnnnnnnnnnnnnnnnnnnnnnnnnnnnnnnnnnnnnnnnnnnnnnnnnnnnnnnnnnnnnnnnnnnnnnnnnnnnnnnnnnnnnnnnnnnnnnnnnnnnnnnnnnnnnnnnnnnnnnnnnnnnnnnnnnnnnnnnnnnnnnnnnnnnnnnnnnnnnnnnnnnnnnnnnnnnnnnnnnnnnnnnnnnnnnnnnnnnnnnnnnnnnnnnnnnnnnnnnnnnnnnnnnnnnnnnnnnnnnnnnnnnnnnnnnnnnnnnnnnnnnnnnnnnnnnnnnnnnnnnnnnnnnnnnnnnnnnnnnnnnnnnnnnnnnnnnnnnnnnnnnnnnnnnnnnnnnnnnnnnnnnnnnnnnnnnnnnnnnnnnnnnnnnnnnnnnnnnnnnnnnnnnnnnnnnnnnnnnnnnnnnnnnnnnnnnnnnnnnnnnnnnnnnnnnnnnnnnnnnnnnnnnnnnnnnnnnnnnnnnnnnnnnnnnnnnnnnnnnnnnnnnnnnnnnnnnnnnnnnnnnnnnnnnnnnnnnnnnnnnnnnnnnnnnnnnnnnnnnnnnnnnnnnnnnnnnnnnnnnnnnnnnnnnnnnnnnnnnnnnnnnnnnnnnnnnnnnnnnnnnnnnnnnnnnnnnnnnnnnnnnnnnnnnnnnnnnnnnnnnnnnnnnnnnnnnnnnnnnnnnnnnnnnnnnnnnnnnnnnnnnnnnnnnnnnnnnnnnnnnnnnnnnnnnnnnnnnnnnnnnnnnnnnnnnnnnnnnnnnnnnnnnnnnnnnnnnnnnnnnnnnnnnnnnnnnnnnnnnnnnnnnnnnnnnnnnnnnnnnnnnnnnnnnnnnnnnnnnnnnnnnnnnnnnnnnnnnnnnnnnnnnnnnnnnnnnnnnnnnnnnnnnnnnnnnnnnnnnnnnnnnnnnnnnnnnnnnnnnnnnnnnnnnnnnnnnnnnnnnnnnnnnnnnnnnnnnnnnnnnnnnnnnnnnnnnnnnnnnnnnnnnnnnnnnnnnnnnnnnnnnnnnnnnnnnnnnnnnnnnnnnnnnnnnnnnnnnnnnnnnnnnnnnnnnnnnnnnnnnnnnnnnnnnnnnnnnnnnnnnnnnnnnnnnnnnnnnnnnnnnnnnnnnnnnnnnnnnnnnnnnnnnnnnnnnnnnnnnnnnnnnnnnnnnnnnnnnnnnnnnnnnnnnnnnnnnnnnnnnnnnnnnnnnnnnnnnnnnnnnnnnnnnnnnnnnnnnnnnnnnnnnnnnnnnnnnnnnnnnnnnnnnnnnnnnnnnnnnnnnnnnnnnnnnnnnnnnnnnnnnnnnnnnnnnnnnnnnnnnnnnnnnnnnnnnnnnnnnnnnnnnnnnnnnnnnnnnnnnnnnnnnnnnnnnnnnnnnnnnnnnnnnnnnnnnnnnnnnnnnnnnnnnnnnnnnnnnnnnnnnnnnnnnnnnnnnnnnnnnnnnnnnnnnnnnnnnnnnnnnnnnnnnnnnnnnnnnnnnnnnnnnnnnnnnnnnnnnnnnnnnnnnnnnnnnnnnnnnnnnnnnnnnnnnnnnnnnnnnnnnnnnnnnnnnnnnnnnnnnnnnnnnnnnagaccaaacagtcctttttagagtaagcaaggtttacctggcggtttggggtaactgttgggcagagcctagaagacatgctaagatgctaacttattctgggtcatcacttttgaactggccagaatctgatgtgaagctctgggtccgtgtggcatacacgttccgactctgcccagaactgtactgtcactctccctttccaagccctggtgacttcgttgagaaacaatattgaaagaacttatcaaagtaaagagcctttagcctggcatctccactgagagatgggattagtgtcctttaaatgaggcccagtgttgggggagagggcagggaaatctccctggtttagcctgagtctcagtctattccagatacaaagtatcataaactagccgctacaagcaaaacacattggtggttttgggttccagaggctacacaccttctccttatccaaaagaagaaaggaacagaccaaggactaagtatgaacctccaaagtagtccccagtcctaaagtttccagaaccttccaaaataacaccaccagcaaaggttgccatttcaaattcaagcaagcaaagacgccaatctcaaactgcccaaagatcccactgctttcttgcttttgactggtgcttgaacttagtatgtagttgaggctgaatctaggacaagcaatccactaattaggtccccttaccctttcaatgttattatgtaaatttgcctcatatgatgagttttgaagggacacaagcagtcataccacggcaacaatgtagctctcacaagaccttagcagatacatctgtctgtccttcaaactcagtttcttacatctctttttgcgtaaaaaatattgagacagagggctttgtttgtagcttagttggtagagtgcttgcctagcatgcctgagactctggattcaattccccatactacagaaacctgaataataactctaacctgtaatcccagcacttggaaggtaggccagaggaccagaatttcaggtttattctcagctacacagagagtgtgaggtcagcctgggatacttgagatgctgtctcaaaagaaaaagaaaagagagatagcaaagtagagaggggctcttgggctgccggcacttggtaggttgtctttgcttctgagtgcttcctgccaccactggctgctgtaaaacctaagagaaaagaaagggtgctgagatccaggtagagccgaacctgtagccaactgactagcgacagctggaggcaaaagaacaacagcaaactcatattccccatgaaggggcattcggcctactccacagaatccctggaattatactaaaaagttcaataatctgctagaaaaagctagattctaaagagaaacttccctacctataaaagatgccaaggtcattcataatcagagaaatgccataataagaggctatttttactcactgcagaaaacagatgccaaaagttagacagcttgtcaatatttgtacatttcaaaaatagagtatctgccctgatcctttcgggaactacctcaactttcttctattctccacaagcaaacttctagaaagaactacatggtatccctgtgggattttcatatcattagatagaaagtaaatggagaaatcattctcgtcactgattgagtaacgagatatattagtatattagtcgactttgcctcactgtaataagatacaggggtgggggcgggggcaggggcaggttgtggagtctcaaagaaaggaatggctggggtgcctgtttaacatatcaaagtggactctagctgccagtccccttcagtttccgcctgttacagagtcatcctatctggcataccccaccccatgccttcaacctctccagcctctgagtttcctttcccttcccccagcttctatgactcctataaaacccacattttggctgtgtgctttcttctccttctccttctccttctccttctccttctccttctccttctccttctccttctccttctccttctccttctccttctccttcttctttttggttttctgagacagggtttctctgtgtagccctggctgtcctggaactcactctgtagaccaggctggcctcgaactcagaaatccacctgcctctgcctcccgagtgctgggattaaaggtgtgtgccaccatgcccggctctggctatgtgctttcttgatctcttggttcccagttgctctcttcttttcctctcttgctgccccccaccatcaccccatggtctggttcagtttgctagacacgttcattctggacccttctagatgcctctgcctcttttctccttcatgtcctcactcaaccttctcaacaaacctaggagccatcatgtctgcacttcctcattcacctggtgctgaaacccggtagtagcatatacgagctcccttccaaggagcttggcctctctgaatatgactctcctaaggtatgtgtggatcatttgtttcttctggcttctgccacatgccaaatttgactacaaattctagagtctacctcttcagctgcttctagagctggctgcctggatagtgcccaaaaattgtctctataacgctggagcatccatcttcagccttctggctcagtatgtctgacagacttttctgtgaagcaggaaatatgaagtactgcttaccttgttttggcaaagctcagcagctgacttccctgtatctccttagtccagtttagacagcattttgcctgtagttaaagcaagggcagggttgaggtttggttttttgtttttgtttttttttgttttgtttttttaagatttatttatttattttatgtttatgagtgctctatttgcatgtacacctgcatgccagaagagggcatcagattccagtatagatggttgtgactcaccatatggttgctgggaattaatttcaggacttctagaagagcagccagtgctcttaaaatcattgagccatctctccagccccatatggaaggtttttttgttttgttttattttattttatttttttatgcttatcatcttctttgaagtaaaatgggggtgctgccaggatctgacctgtctcattgttcaaaaaaaaaaaaaaaaaaaaaaaggcttactttaataaaacatctttaaatgctatatatactctgtggatccctgaagtttttgaagaccatctatttatctatagcctatctagaatactatagaatagagtttattcagggcatggggaggagagttaagagggtagtaaaggcagagaaaggcagagagagggagagagtagagaagtagagaaacagaggctggtcatggacgtgtggagagagggggaagggaatggggaaaggagggggaagggaagagcccaagagggcaagagagaagcaagagggaacaagagtaagagagagaggagggggcatggaggaccatacttgactgttgccaggtaactgtgggatggagtttagacagaatgctaacacatagtatgttgtaacaaaaataaccttaatttttgtatcaatatgcaaagatatataccaatgtaacaaaatataaccttaatatgtatcaatatacaaagatctatatcaatgtaagattttggctataaaatattctttggtttaagagtagattcaccagtagtggtggcccacgctggtaggatttgctgaaggaggcagaggcaggaggatcaagaatttgaggccagcctggtctacacatttttaaagctgggcagtggtggcgcatacctttaatcccagcacttgggaggcagaagcaaacagatctctgagttcaaggccagcctggtgcttacagagtgagttccaggacagccagnnnnnnnnnnnnnnnnnnnnnnnnnnnnnnnnnnnnnnnnnnnnnnnnnnnnnnnnnnnnnnnnnnnnnnnnnnnnnnnnnnnnnnnnnnnnnnnnnnnnnnnnnnnnnnnnnnnnnnnnnnnnnnnnnnnnnnnnnnnnnnnnnnnnnnnnnnnnnnnnnnnnnnnnnnnnnnnnnnnnnnnnnnnnnnnnnnnnnnnnnnnnnnnnnnnnnnnnnnnnnnnnnnnnnnnnnnnnnnnnnnnnnnnnnnnnnnnnnnnnnnnnnnnnnnnnnnnnnnnnnnnnnnnnnnnnnnnnnnnnnnnnnnnnnnnnnnnnnnnnnnnnnnnnnnnnnnnnnnnnnnnnnnnnnnnnnnnnnnnnnnnnnnnnnnnnnnnnnnnnnnnnnnnnnnnnnnnnnnnnnnnnnnnnnnnnnnnnnnnnnnnnntttcctattgactttatcatattccttcttcccccttctttcgcttttcaaccccttacataagaaagaaagaaggatagagaaaagaaaagaaaagaaaagaaaagaaaagaaaagaaaagaaaagaaaagaagagtaaaataaatagcttccttaaatggcataacaaacatttagtacccattgaaggacactgcaaccagatcttgggggccaccatttgaaaacagcagcaccagaccaacccccaacacaaacacaagaccaagtcccaacacacatgccccaggagctgtctgctaagtctcacagttttctttaagccctgctgggcttatttgcctcctcttggagcttcctcctctatctcttcttgggccttcttggacctataggctatgagtttcctctccttcccctaggctggcttccttacgcccttcttggtctctgtgaccctgttccttctgtctctcatctccttcctagaagtcccccagcttctttatactgtcctgagcctgtacagcgaccttgcctttctcagacaagttcacagctctctcctggagttttagcccctctcctcgggagctgcctgctctgtctcttccgtaagccgtcctggacctctaggaatccttctttgggtggagctcctacacttagcaaccctgtccctcttagctccctcttgaaagtcctgtagcttctcaatgtcctcctgggcttctctctgtctcagctccctcttgaagtttataggaacgcccctttcagccgagtttactttgcatccctttcccttggctctccaccagctcagactttattagagtctctctgtcctcgctgtcctgcttggtctcagtacagctcaatggccaaaggtggcacacttgttttctaaattctctcatacagtcacaacctctgccacagcacaaacaaatgattcccaaacctcttagacattctctgctctggacttccaaaagtctcttatctctaagatttttttttaaggtttgtttgtttgtttgtttattgattgatggttgtgagccttcttgtggttgttgggaattgagttttaggaactctgctcactctggtcaatcccgagtgctccctgcttgctccagctcaaagatttatttattattatacatgagtacactgtagctgatgtcagacacaccagaagagagcattggatcccattatgcatggttgtaagccaccatatggttgctgggatttgaactcaagacctttggaagagcagccagtgctcttaccctctaagccatctctctagccccctttttaattctttcttttggtttttggagataagatttctctgtatagtcctggatgttctggaactcactctgtagaccaggctggcctcgaactcagaaatccacctggctctgcctcccaagtgctggggttaaaggcatgtgccaccactgcccggccttttttcttttttttaacataaagcttttattgattggttatttgggaatcttacatcatgtacctcattgagctcacctcccagtcctcccatgtccaccttccctccaccatgattaacccccaaaacaaagaagaaagggaagagtccattttgtgttatccgtatactcactggagcatggtcagcttcctaatggccgtccctccaagagaagctgaatcttcttccacctgcacctgcaccggaagccatcaactgtggagagagagccatgcttcaccatcttcatcataatttttttgtagttttccttgatggcttcctctgtaggttgtcattgcgggggtgtgtggagtggtgtggggtggagggaggagttgccacagaagccttttatgttcctctttctcaactgtgcatctgctgtcatctgtcactggtaacacttcaagactagcttccttgcccttcacagtcagcaggagcacagagctgaggcaacagcacagaccacaaacacctacttgttctccataatcagcatgcaccaaggacctctgcctggtctcctgtggcagtacagacatcgacacgacatggtcctctgtcaaagcacaggccactgacaggcatgcaatgcaaggaaagcatggaccatggaggtcttttgaaaaggtccaatccagaaaacggaccattcttcatctagagtatcctttccctgtccagcaccagtgcaatcatgtgaccaggcagtttgtttagaggctgagtctgagcaagctccagactgtggcccatcatcctgctgacctactgacctactgacctactgacctactgagtaacgacctgctcctccatcaactacagccttgactcacacacacccctcacagctgtcgtggctccagctccaccatgctccactcctccatccttcccacctttccatcccaatagtggcattggaagctgctgtggtatatcacacaatatactcttttgcccaaacagcagattcacatgcaaatattcattaaaatgagttgttggtctggttcaaggcctctctctgacttttgctacaccattaatactggaccctagctgagactcctcttggttatcctgctgttgtcaagttatggatggagatgctgcagccatagccacagaacaggccccttcatatgctccaacaactcatagatggcgtaggtgttgggggtggaccaactcaaagccctggatctaggtgggagctgaattgcttagcctgggtctctgccagaccaccactcttcccacctctctccttgtggtcatggctggtctctgcttctctactctctccttctctctgcttttctctgcctctactactctcttaactcccctccccatgccctaaataaactctatactatactatactggtgtgtgtctggtccctcagggggaacggatgccttgccatgggcccactgaggcacccccttcccccaccccccacacctccctagagcatattcttttttttttttttttttggtttttcgagacagggtttctctgtatagccctggctatcctggaactcactctgtagaccaggctggcctcgaactcagaaatctgcctgtctctgcctcccaagtgctgggtttaaaggcgtgtgtcaccactgcacagcttgctagagcatattcttagagctctttctctttatgatcacaacattcattctcaaaaaatgtcttaagactttgctgtaaactatctcgggatttgtaaattcactgggtagggttaaaaatctgtaatgaaatttagcttaaaactttaaaacaaaaggcttatagtttaaaaactatacgtgcgataatcttttttctttttttgtttttttcgagacagggtttctcttctctgtatagcttctggctgttctggaactcactttgtagaccaggctggcctcaaactcagaaattcgcctgccttctgcctccctgagtgctgggattaaaggcgtgtgccaccatgcccggctacatagatannnnnnnnnnnnnnnnnnnngtctgtctacttggaataacagaaaccctcttatctctaactacttacgaccttactaactgctcagcaccaggcttctagatatagttgataaataaggtttataaattcctatgctctactcagattaacagtaacagccttaaaatatatgtctagcatctttgtctttggcgactttattaagctttaattatttggataaactaagtcttacaagaaactcgattttctgtatcctataaaaaggatcaaaaaattcccagtcttcctatggattgtatttatagtttaaagtttactgcattggtggcttaaagttttattttgatgataaaaaaaatcttcaattaaatcttcaacttaaaattttaagactcagctgtaaaaccttaatcttataaaagctgctggcttgctgtaactgttaaagataagtaagacacacaggttgatgctcagtcgcgttataaaggatcaaattccttagtatgctcaaacctaggctcatagtcaagctaagtacaaatggaattcatttacaacaaaagctttatttagcctcctgtatgcgtttccttttccttttccttttccttttccttttccttttccttttccttttccttttcccttttcttttcttttcttttttgtatagcatacagtttatccagggcatagggaggggagttgagggagtagagacagagaaaggcagagagagagagagagaagaagaagaagaagaagaagaagaagaagaagaagaagaagaagaagaagaagaagaagaagaagaagaagaagaagaagaagaaagtacaggggaaagccaggcccaagaagtgggagtgggtgggtaggggagcagggcggggggagggtatagggaactgggaactttcgggatagcatttgaaatgtaaataaagaaaatatctaataaaataaaatttaaaagaagaagaagaagaggagaggagaggagaggagaggagaggagaggagaggagaggagaggagaggagaggagaggagaggagtagaggctggcatgagcacatggaaagaggggaggggaatgggaggggggaagaggggaagggagcaggagcaagagaagagaagagaacaagagagcaagaaagcctgtatgttttcaaggttaagcctaaagcaagtaactaaaaacaaagtttgtttaaaataaggtgtacttaattagccgggcagtggtggcacacgcctttaatcccagcacttgggaggcagaggcaggcggatttctgagtttgaggccagcctggtctacaaagtgagttccaggacagccaaggctacacagagaaaccctgtctcgaaaaactaaaataaataaataaatataatataatataatataatataatataatatggtgtacttaatagataactgtcctcaaattcttcagagatttgctgaatatggcattcaaaatatgtaataaaaaggcttcctatggtagacagaaattccagctcctagtggcagctctaaagtttccagagaagacagtggggcagatagctccacctgggctgtggtaacactaatcactgggcagaactgccccacgcctctcctaccccagagctttgcccacactgtggacaatgttgaattgactgctctacgcttccttgccgcagccagtcagctttcccaggttccttctccacaggaaaacgccttagatcttcctgtgcatcaagctaaacatttaatgctgttccctgagatagttgaagatagtctacttctctccccagtgaagccactgagaccattggagcctaggtcaaccgcctaggtagtgggtaaatctctgactttttaactaatacatagaccatttggacatacttcttgttttaattcattcttctcagatctcagatgatattgacagttaattctgactttacgttaagagcagcaagcaaaccaatcccctcccccaaggctgcagctgactggtcagtccgttatacatataaaactaggccttgggcctcacttttctagagctactaggtctcctgctgagaaaagcaaatagacactgtttaacttgttggtggacttcactctgaaaaaaataaactcccaaaacaggtttcaatataactttttactcttatttaaagcaagaagcttgctttaaaaatggcttctctcagtcatcaaccacttgtgcctcatggtaaacaaatataactcaaaggcattggtttacaatgtggatttcaggacagattacaagcagtggtaatgctaacacagctagaacctttatctctttttgtaaacttgaaaaatgcttgtacctttcaggaagttgacttggatccatctctcacaagtcaagcagactccagataagtgctcctgtcaatcaacagcctaactttcccacctactgcccatccctgagggtgagctccccctagtcttgggactcctctgccccaccaggtaccaggaccatgggcctacaagtttcaatgtatactcaagatgaaaaccttcccctaaactccttagctctaccttctgtccctacactatatctgtcccagcaggtttccaactacagactgctccgaagcagcctgcaccggatggctctcatgcaacctgcatgtccctattcccaggtggtcccacagaacctgagcattttcaatgctatcccaaaggtcccccatacccacccccccaatcccctacccacccactgcccctttttggccctggcgttcccctgtactggggcatataaagtttgcaagtccaatgggcctctctttgcagtgatgaccgactaggccatcttttgatacatatgcagctaaagacaagagctcccaggtactggttagttcatattgttgttccacctatagggttgcagttccctttagctccttgggtaatttctctagctcctccattaggggccgtgtgacccatcgaatagctgactgtgatcatccacttctgtgtttgctaggccccatcattcaaagattctttcggctcagtgatttggtaggtctggccgctgttgctctgacctgtggcaagttgtatgttatcacgtgggcacagagctgctccttgtgcatcacactggtaaagtgcttgcttagcttgtgcaaggccctagcttcaacatccagtaaacaaagcactcagaaaacaaaacaagctaacaacaggaacaaaaaaccttgctctttccagtcaaggaacaaaagaggaagggtccagggttcaagatcccttcaaaggcaagcctctctcccctaagggcccccgaggacttcctgcaaacccattctctctaagtctctgccacctcccaaccgcaccatccaacttcgtccctctggcactactgagctgaaggaagtgaacagcagccgttgtcgcctgagggaggatacttccagccaaaggctcaggaagtgtgaagacacttgagtagtgagaacagctgcttgtatctttcccaccggctttccggctggttctgtttcttttgaaacttccagttcatggtctgtggtttgtaagtcactgtcctggtaagagctaattttgtattgcagacatggctctttgtgttacacactttaaaaatagtttaccacttgttttgatttcgtttctagtacctattactgtgtgactcctcacttcctccaagtactagataccgaacccagtatctttcaatttttgacagacacatttataattcaccagcttggttactgacctagaaaacctcgcttgtgtttcaacattttttgtttgttttgttttatccagacaggatctcaacatgccaactgagcaggctttgaacttatggccctctagcctctgcctcaagaatgctgggattacagatgtgtgccgtcatgcctggctcattattctttttaaaaattcattcatattttattctaattattttatgggttttatttttaactttgaaattcttgatccatctggtgtttcctacgccttaaacagtgaggcatctggacagtgagaatctagatttatatctttatgaagactgtgaaacagcccgccctcgtacttatctgaaccctttggctcagacctatccccatccttctgagctgtgtgaagcagaggctgctgcttgtagactccacccacagggagccctagaggagggttgctgggctggaggcgaaggtttgtaagtgttacagctctgagaggaaaggcaagtgttgcatctctgaagagctgtcaggagccaaggaataccacaaaggcgccttgcacaaccaacctcacacagggcatctattggggaagacacaagaaggtggctgctgattccttctgcttgggtgagaagcggcaaagattggagccttgagggccttagggagaggacagaggacttctagttcctaggcaatggggccactttgagatggctggaaaaggggagctttagcctcgccaccactttctcaactccacaaccaatgtagtccaaagaaacaccttgtgagttcagcagcttcctcttgactgctgctcacaacaaagccagcacctttccctctcccaaccacacggccaatgccagaaccttcaggttctaccgaaaaatcctagccctggccataatgggttggaaggagaactctgcaaggttagtttgactggtgagctctgagattacccaaatgtgccatccaaagggagatcctgcttcctgcttcctgcttcctgcttcctgcttcctgcttcctgcttcttcctctccagtgccagccacctcaccaagaaagcatccaaacctggggcaggatctggttgttgcagttgcttttttgtcaatctgagacaagctaccgttatctgggaagaggaaccttaactggaagaaagcctctatcagactggcctgatgactggctgatgtgtggaagtcccagtccactggggatggtacaacccctgggtgggtgatgcttgatcatataagaaagcaagccatgggggcaagctaataagccatgactgtccttgaaggagtctgcttcagttcccacctccaggttcctgctagaggtctttaaagctctttgtcctcaagttgctttcggccatggtgctttatcagagcaatagaaagcaagtagggactggggccactgggctgggaatgaagcaccctccctgaagccaccaaactactataggggtggctgacatcgaggaggaggggaggttggtgagcaactttaccccttcgagaggggagcgagtggaggctgagcctgcggaggaaggcctgacctcgaggagagggtgaagacggtgactggagttcccactgctacaccactgcactggcacatgcatgtggatttatctcaccgcccaggcacctacctgacatcctctgagtggctccatcacactccgtgctcacagggcaggggcatctctcctgctgtcactggcattgccgcagccagggaagggctctacttattatctagaggtcctggaaggcagacttagagctgggagatccttagcacagggagcccttgctatcccctgcagctgtgtagaaggcggtgccctccccgtccctgctctctgccaggtattaatgtacccttcctcagatgtgtgccactcagcatcaccttactgggttgctacctgcaccccaccttatctgagacctcaaacctcccatctaatcctccttcctgcctcactgctttagcgctcagcatcatcttgtctatgacctgtgctctgccgctggactctaagctccgcaagggcagggatccgatctgttttgttcggtgcccaatcgtccatatctggaacgtgagtgcatatagcagctatatgctacaaaaagaaatatctttttatcgccatctcacagctacaaaaaactgaagtttgtagagaaaacacttggctttagcagcagccccggctttccaagtccagatactctgtgcttaatgtagactgcactgtggtcacacaatgcttattgctgcactgtgtgggaggctcagatggacctagagagaaatggttaaacaagttacaattttaagcctcctgtaatggtccataagtgaattagcacagatctatacgtgcttatatggagtgacctcaagaatattagtgagtcaaaacacaaggcgccccagagtgttttggaagtcttttcaaaagaaataaacagaatgaccatacatctcaagcctgggtgtgtagagaaatgtcctaggagactctggaggagcctggggtctctacccagagcaagttatttccatccattttgtattgttgaaatttaaaatcttgtgcatgtttttttcctcttttcaacaatataaatcctccagaaagtttaaaagaaagcctcaggatttgtaaaaaataaaataaaataacagaccccttctctaccacctgagcttgtattcaactgtttctaaagtcagggaactcaaccctaactttgtcccttccatttgcttctctctctctcaaaatattaattattataaataagtacactgtaactgtcttcacaaataccagaaaaggacttcagatccatactttcgaatgtttctgtcagctagcagcaaaagagattaaaaaaaaaatcagttcccagttgcacaggcatgggcatggcgaacatctgggacagaagtggggtgtaactgaagggagagagacaggctagggtacaagcagcaatcaggaggacccagctccaaacggagactcctcccacctgctcctgccttgtaactcgtccatattggacctggaggacagaactctaagatgtaaggctgtttttatacaaagtcttgctatgtaaccttggatggttggaaggtgttatgaagaccaagctgggatcaaacttatagagatccacctgcctctgactcccaagtgctgggtttttgtttttttttttaaaagatttatttattatttattatatgtaagtacactgtagctgtctccagaagagggcgtcaggtctcattacggatggttgtgagccaccatgtggttgctgggatttgaactctggacctttggaagagcagtcgggtgctcttacccactgagccatctcaccagcccttgttttgtttttaaagatttatttattattatatgtaagtacactgtagctgtcctcagacacaccagaagagagcattggatcccactatgcatggttgtgagccaccatgtggttgctgggatttgaacttgggaccttcagaagagcagtcagtgctcttaactgctgagccatctcctcagccctcaagtgctggggttaaaggtggatagcacaaactcagcttgtacgtagtttgtggaacatttgggtctaccaagcaaagattctgagttttatctggaaattttgtaaatgcttcagtaaaggtaagatgggggtggtcaatgataactctaggaaaatgcaaatcagatttaaaagttgagccgggtggtggtggcggcgcacgcctttaatcccagcacttaggaggcagaggcggcagatttctgagtttgaggccagcctggtctacaaagtgggttccaggacagccagggctacacagagaaacgctgtcttgaactgcccccccccaaaaaagttgaacaagaaaggaaatgtaatccgagcatagtatgtggctaaggtgtgagtattatctacaaagttataataatggaaacacaaaaaaactagtcgaaccaaaaggatgtataacactggagggataaggacagaacttgtggtgtgggggagaggggacagtggtagagaaaaggtgcagtttcattttctacattagggtgtaaggtcaaagccagagaaatggagaaacagctgtgttagcatcttagttctaatctggccattcagagagtggaccgaccataaagcagcatcagcagccgcgacgcggtattggaaatgcagaatcttggaagctgccccagggctgctttgtagtgggcgaggggggtgcgtgtgcttccaccacgccctgggcatcgtgcaggcgaggcaagtgctcctcgctcggccacaccccagccgcaggacccagagttatcaaggacctccagagatgcgcctcacttgggggcctggacacctagctcagaacctgatttagaaagagaacagctgggttggagagatggctccgaggttaagagaactgactgctcttctgaaggtcccaagttcaaatcccagcaaccacatggtggctcacaaccatgcatagtgggatccagtgctctcttctggtgtgtctgaagacagctacagtgtacttacatataataataaataaatctttaaaaacaaaacaaaacaaaacccaacacttgagaggcagaggcaggtggatctctataagtttgatcccagcttggtcttcataacaccttccaaccatccaaggttacatagcaagactttgtataaaaacaaccttacatcttagagttctgtcctccaggtccaatatggacgagttacaaggcaggagcaggtgggaggagtctctgttcagagctgggtcctcctgattgctgcttgtaccctagcctgtctccctcccttcagttacaccccacttctgtcccagatgtttgccgtgctcatgcctgtgcaactgggaactgatttgttttttaatctcttttgctgctagctgacagaaacattcgaaagtgcagagccgccctttgcatcctcctaccttccctaaggacaaaaacaaaacaaaaaaacaaaaaaaaacaataacaagatgccgttaggcaacagaaccgccagcctctgcacagccgcacgagaaacagaatctctccaccgataaagcctggaccagatctggtttgaggcatacctttttgtctacgtgggatgtttcacaggttccttctaggaagatagtggcattcttgccaaggtgcctaagccacactgtgatacattttaagtcaagcctcttccaggaagctggcttcctacttacgtttctgtcagtcatccgtcaggcctgtagcaatctggcgttgaactctctttcttttccttgtgttttattgaaccactcctatatagagaaaagggaaggactatggtggtcatggtggtacacacttaagagactggggaaggagaatcacaagttggaggctagcctgggctacaaaacaacaatcttcaggttaagtgtagagtcagagccagacacacaaacactcagagagagagagagagagagagagagagagagagatgagacagtatttgcctctctttgaactatgagcaagctacgttccatcctagaggttcacttgggttttatttaggttttttggttttgttttattttgttttgttgtttaacaattaagtcaatttatttaaacagttgacttaggcatctgcagtggtgacttcaacctccactcctggctcaatactgatggaagtaatctgcttaacgatctcagaaggactatgtaaatcagtgaattgcttgtgggtcctcatctggaaagatcccatgtcttggaatcttcaccacaaggtgttattttggtagtgattctcagtgtcttggtaggcatgcgaaccggtcctttcactttcggattcctttcttttgtgcctctggtcaagtctacatgtgaagtcacaggagaaggttttagtgagctttaagggcaccaaacagagaggtgctatgcctgagcctctaaggggaatgggctttgtatcgagttgctgctgtgtgactgcagcaacttaagcatttagcatacttgctaaaatagttttcagagtgatccgtcaagggaaggattggagaaagtcccagtgacttattcctgctcagcatccatggtgggtgggatagggagaatcaaaatatggactgaggggctggagagatggctcagtggttaagagtatggactgctcttcctgaggaactgggttcaaattccagcacacacatggcagctcacaactgtctgccactccaagatatgacatcctcacacagacatacatgcaggcaaaacaccgatgcacatacaatgaaaaaatacattaattaatagaaaatacgaattgagatgagggaagggtcctacatggataacagataacagggtgactatgaaactggggagtgtgagggagtcctgagtcctgaggaggaccctagcaagtctgtccagcatacagtttgttcccaaaggcttctgttcaaactgtgtttgagcctggcatctgctgtgtcctgcgtagggacagggaaaaggccagcttagggttagatgggctggggaggtacgttagggttttgccgttgtgacaaagtacctggctgaaataacttacgggagcaaagatttgaaacattgttctggggctggagagatggctcagcagacaagagcccttggcgctcttctataattgcactaccagcactgtatgtggaggtgttgaggttagaagtcagggccctggaacagagaattgccacgagttccacaccagcctgggttaccaactaagaccctgtctcaaaatattaatcagttaactaaagttactccaggggttagaaagatgcttggtagttaacatcccttcatgctcttgcagggggtctgagctcagtttccagcacccatgtcaggtgactcctaactgcctgcaagagatcagacaccagcacataagtaatttttaaattaaaaaaaaaataatagctgagtagtggtggcacacacctttaatcccagcactgggcagggttggggttgggtgggcagaagcagtcagatatgtatgagtttgaggccagcctggtctacagaggtagttccaggatagccagggctacacaaaggaagtctgtctggaaaacaaaaacaaaaataaaatagaattcttttaaattggtatttatcatcgtcgtcctcatcatcatcaccaccattgtcgtcatcgtcatcgtcatcgtcatcatcatcatttgtgtgtttatgcatgccatggcatgcatgtagaggccagaggacagcttcatggagacagttctctcctgtccactgttatgtgggttctagggactgacagaagactgtcagtcttgattgccatattgctgtgcctgcaccagctgtgccaactcagcagcagggaagagatttctctatggctcgtggtttcagtcccttactccttctcagtaagaacaccatggtagagcatcgctatgcaccgtgtggagggcaagaagtttgtagggagacaggaaggggccatagaatagaacttccctcccaaggacacacccccaaggacctacttcctcctaccaagccccacctttcactcccaccacctccaaggatcctccaatgaagacagagtcctgctgactcagccatttcccagaagccccgtgccagtacactactgcattgggaaccactctgtcagcataggagcctttaggagaatacttgagatcccaaatgaggcctggtcatcaccacttttcaagtccgggtccaggaggctgctgcacctggctcagacccaagcagatggcctctttagctggtcagagccctattaaccagcaggagtggactctgggccatcaggagaagcaggaccatgggaaacgtgtaaattaattgaattgtgtttatccctgcctagcttccaaatgaatgagactcagactatggtttattcactaagcacttgaacaattactgggcggctacccataatctatatttctatttgttagactgttaattcccagccgtgctccccaaatacttgctgttttgagtcttgcctgggttacctctgctccagcagtctgtcctggggaagggcttcagttaggtatatgctcctggtccagcatgtctaatggagactgctgttgtctgtcttcttcctccttccttttcctctccttgaggtcccccacctgtgacactcagcccagtaactcaaactccacctttctctattctccgaagtaattggccgctgccatttttatttaaccaattgttttaagttggggtgcaaggtttgtacaacaaaagctggtgacatcttgggacaaccagatcttggggtacaaaatttggcatctgactacatagcagcaccagacagaagtaggcaaaaccctctccaccccatcactgaagatgtggcctctcatcttctgaggtttgttgtgttttggaagcaccaacaattttttgtttttttagaagaacagtattatcaccatcatcatgcacctgaaaggcttacacttgtctaattagcaagaaaacacacacacacacacagagagagagagagagagagagagagagagagagagagagagagagagagaggaagagagagagaggtggctctgttctccagataattacaggaatctcaaagggcatctactgagggacaggatgcggttgggaatgggatgtgctcataatgatggctgcggaatataccagctcccagtcagacagaacaattgtcagcctgtgtatatgtgtaactgcccacagggaggtctgtttgtagctcttctggctcagaccagcttccctctgctgcagaaggtaaaccagagctgaccctgagtggtgggctgaggaagctatactcccccattcagtccccaaactccaaggtcaagggcagcaggcatgacaacagcccccaaagctggtggggaggcacttccatatctgaaccacaggtctagctcaaaggctagaatgacgaccatccatcctggagtatgacaaaaggctgagatgcaggattcagtcttttcatgaagtttggggcagtttggaatgccatggtgaccacagtcctctctccctagtctggagacgaaaggcactggtgtgtggacagggaaggggaaggcttaggctcctgtgcctgagctgaggtcacaccctgcccctaacccaagatctagttcagtcacccaaacaggagacagacagagcttctcagccactaagaattaaaacctatcgattttccccattagctaaagaacgctatcagagtgcattaaaacaggcaaagcacagcttcatgaataattaacacctgcaaatgacaacctcgtgggacctggggagggggggaagggacatccagagttcagggccaatctgacccctctgactctcaccccagagattgtaacatgggctgtctctccacctccaccaccctgtctcctgtcccttcctattccatggcccccttctgaaggggcaccctatcaagtttgcatatcaagagacccaaggttaacccttgaagagggaaagagggaagagaacccccgaatatcacaaccttaagggaaatgctgctcctttctgaacacgttctcttcggctgtgcagtgtagtccagtgtatgtctgtaagcctgtggctccagtcagggacagaaataaaaaacaacacatcgaatctgccacagagcttgtggaggacccagggcccccagatcatctccccagctcaatcttgagtacgcagaaagaagcacctacttgggacaggccaattcatagccggtgctccatccagaagagtaaataagaagaggctgtcaaagcagacagcacagaaagagaccctgtccccagaggcaggtgtggatttcagtgtcagggaagcctccacaggagagttcaaggccagcctgggctacacagtggggtgtcaggaggaaaaagaaagagaagaaggggaagagaacctgggaggattggttagggtgaacacctcttaggctaagcaacaaggaaagcccaacgtcccattcaaacatgctaggttggcagagctggatcctggccccaagctgctatctgccaacttgtcctttgtgcactgctcaggagccagccctttttttttttttcttggcctaggaggtctagacctgttcttccagctagtgaaactcagttcagacagtccttccaggcttctaactctccatctccaaccgcccccgacacacaccaggttctcagcctcaagacaaattcccacttcatctcccatacaccctccctcttcttcatcaccctacagtgagcagagtggctcagaacaaacacttcccacgcctctgaccatgtttatctcttcctggtttgtaaggctctgtacaaccctgtcatcttctctgatggtcttgccccgcctcttgatcccccaggaaagctctactccataccaaaaaaagccagcttaaagaccttacctgcctctcactcacctccccaaatggcccctggtgcctatgttcctgcaggaaggctctcccctagagtctagatcttcagttggctcctccctctcctgtaggtctctgctctgatggcaccttgttggaagtttgtttttttttttttcttcctcaaaccccctttctaagtacctgcctgtccatcccagccctcctgcttaactcccctcccaccccgcccttttcacagcctgatttctttatcctttgtttcctctgctcccagggccactggaatggttgtctgtgttgtcagtttctgcacaggtgaggtcccaactgcaggcagtgccctgggcttgcctgggggaagcaccctttctaattcattggtccctgtacagaccagccacaagccccttgaccgcctcctgttggggtacaagcccaaccaagggaggaggagcctctgtgtcccgcccagtgcctgataaatacacaatgatgctaaggaaacaggtaaataaggcccactctggtacacacacacacacacacacacacacacacacaccccagctgagcatactaaacaatgtctgcctcacccctggctcccattcaaagtggtcatgcaattggacccagactcagaatgctcatttctgggaatgtggagggacttggttacttgacagtgtaggtgtgaactgaacggctctgggggtggggtagggnnnnnnnnnnnnnnnnnnnnctgtgcagcatgggctcgcaggcaggaggtattgcggagtgtgtgctagcacaccaggctcccagcagaggcgtggtccttgcttccctacagtggccagccgcagcctcctagctctggcagagaaggagttaacttccaggcttctcagcgtgaatgtggagctattaatacccacagcccagccatctacagccaccacaaggctgagccccagagctgaggagagagatcggggagcagggcagctcccaggctggccaaccagtacctgacttcaagggtcagaactttttctggggacagtgtagactctgtgtcagactcacctgacccttgcctaccccccagcttcaggtgtcaatcggctctcccgcaggccactgagctacttactccagcaggggaggacaaactttgtcaaccacctctgtgcctgctggtcacctaggaggaacagattgctggacagacagacagaaggctcacactcctgcctctggcaggcatccgcagagtggacagctaaggtgctgaggacttccccagaggcagcgataggacctcggtccactgccggccggccacctcttgagtccaggcagctgataactgctgttcaagtgcagatcccgtgcctcaggacaggagccccaagagagccacaggctcttccacccaccgaggcaacgggtaacgtgggcgagaaggcgcaggtggcaggtaggcaggtccggggtcctgaggccgacaggctgctgaccctggagcacactggctcagagaaccgcgtcctgtctggggatgatgctgtggtggccaccaacagtcacccctgccctgtcctgcggctgcctcctgcctggcccctgggctgtacagctgatgatgtgccagccttctgcctggtctgcttccacagagaggaggaggaattggaggaggttccactgcagaggtcagtcctggggtgggcagagggctggagggaccaccatgcaaccttccatgcaggaacttaggggcctggtgatgatgtttatgggacctgtctgcccaggcttactaccccctccaccttcccgctgagctctctggctgtcaccacaaccttcccattcctcccactctggccctcgagtgacttgcctgtcccttcactcccattgtggtcatgtcttgtccccatttagagacctccatggttcctcagttcctaaacagaaagtcagcactcggcattcaagacctgtctgattgggtttaatgccccatttcactctgttcaccaatattaccagggaatactctggctcccctccacccaggcccagctgaaatgtctcttctttcaggaaggcctcccagaagacacgggcccgctgatctaagagccccttgcacttctagcatcacactggcatttaacatatgctcagtctttgttgaattaataagtgaaaatgtgtatgtgcacatgtgcacatgtgtgcatgtgtgagcgctcatatatgtggaaaggaggggagggagagagagagaagatgaaggtttctaaggttgggattgtgtatttgtgggagaatgtgtgtgactgtgtgtacaggtttgtgggagcagatgggaggacctttgggatgagaggagctatgcatgaggccaatgcctaggcactgactgctatgccccccgaccctcagggaaaccctggccccagccaagtgtgacctgggccacacttgtgaatacacaagtcaacagggtcacctctgctccagcccagcctgctcaagccagtgccactgtgggaaaggcgaacacagggccaagctagggtcttgtccgtgtccattgaagaataggaggagaaaatgtgggcccctgcatcctggaccaggtgcctctcatgagtatattggaccctgcatctgtggtttccccgctagggacctctatgtcctcctctgtgaagtgggaggatgctttctgccctggttgccagctgaccatgcagtgactggacagacacctgcagagcgccaggcttcagctggggcctggaatcttggcacagccctggtgaggtctgctggcagacaggttgggcagagattgagggtacagagagtggggacacagtgcccatgaagtcaggatgcaagatggaccacttcttattacagagaccacagtatattccaccaaatctatctaggagtacagatgcctctcagggaatgagggaggcgtaagaaaaggtatcagtgggctgtggggcggcaagggtgaagattggtggtttggaaaagtaactggacagggatgggttgaggttggcaaagacagtagtatcagatcgcatagacctggacttctgagttgagcatttgagcagccatggagggctggaagccaaacaggcgagttaggagactcagtgaggcttagatgggagacactgttctttacgccacagaactccacaccgccagtgtggccactctttatagtggaggcttggagtgcttggcaaatgactgcgtcagccaatgaaatgacacaggaggcggggccttggcatcatctgctgtggttgtctgtcttctcagtgtctctgtctgtcttctcagtgtctctgtctgtctctgcatctgtctgtctctctctgtgtctctgtcgatctctgtctctgtctgtctatctctatgtgtatgtgtacctctgtgtgtctctgtatgtctctcagtgtctgtctctccctgtctctctctgtatctctgtttttctttgtatctgtttgtctctgtctctctgtgtgtatctctgtatgtctctgtctctctctgtgtctgtctcttagtctttctgtgtttgtctctctgtctctccccgtctctctctgtctctgtctttctctgtatctgtttgtctctgtctgtctctctctgtgtgtacctctgtgtgtctatgtctctctctgtgtctctgtctctctgtgtgtctctatctctgtctctccctgtctctctctgtgtttctgtttttctctgtatctgtctgtctctgtctatctgtctctctctgtgtgtacctctgcgtgtctctgtatgtctctgtgtctatctgtctctctgtgtttgtctctgtctctccctgtctgtctttctctgtatctgtttgtctctgtctctctctccctgtgtatctctgtctgtctctctgtgtctctgtgtgtgtctctctctgtgtgtctatttccttgtctctctgtctctgtttttctctctctgtctctctctccttgtctctgtctttccgtggggatgaaacccagggccttgcacgtttatgttaatgtgcaaggttaattctaggttaattctcagccctgagctgactgtcaacagcacacagtcaagccctgccccgatgtccccttgcttcaggtcttggagcaatgcttatacaatcaatccctaccagtgagtgactcaggaagccccaggatgagggtcgagcattagggccaggatcttctgccctttctccctcatctttcctccaccccacctgcagctttggggattcctttgtagcagaggtcccttctctcctactctgggatgtaatggcctacgtttgtaggggctgctatactttctaactaatggactctggctctttaaggtctagggaggggacattgccaggctgggcagaaatggtgaccacaggtgccaggtggtgaagctaaaaatactgagtgatgtggacagccaggctgtgggagccaggcagagctgactgggagggcagagagactgggtgaggtcaccttggacttagagagtgtgtgccgcacccaaacccctcaccacctctcccagcctttctctggtaccagggcttctctagaacatccaacttccatctttatgagccatgggctagtctgattctgccacagccctcttctgtgtaaccctgaggtctctttggatctcttctcaagcaaaattggaaacagagagactgtaaggggtataggcaaactgctcgttcatttttaggttaaaacttcctgaagccttctgggactagatgttgaaaccacagagataacagggatacaggcacacctccctaatggggctcactgctttgtgggtacaaatggtggctatgtgaatatgcgtctccgcaagctataatgagtgtgagcttcgtggccctggaatctgctgtgggttgatgcacactgtgccacatgtcagtgacagtgtcactaaccacctgctcacgctatatccatgtgttaactagggtgaggcagctgttgtgcctatgagcctagaacataggattccattcttgttttgttttggttttgttttgtcgagacagtgtttctctgtgtagccctggctgtcctggaactcactctgtagaccaggctggccttgaactcagaaatctgcctgcctctgcctcccaagtgctgggattaaaggcgtgtgccaccactgcctggcaggattctattctctacagttggtatctacgtaacagagtctagtgagagaggctctgctccaagcagtctctcactgaccctgggttcttccatcatgggccaggcattattcagaaccttagaacccactgctagaaactacattccactgatagagaaagaagagaaagtggagtagccagatgtggtttatgcctgcaagcccggcattcaggagtctgaggcaggaggattgtgggtttaaggccagcttaggttatattgtatctcaaaacaaatacattaaattgaaaatgtcagccaaggcttttgtgagttacctgtgcatgcattggctgtaactgcaagggaggtgggaaaggcaggccagtgcagcagcctcactggtccattatgaacacggaatagtctggtgtatgaagataagtcacctttggtgccagttatgctcattcattcactcagcaaagtggcttggtatctttcatgggtgagagctaggggacacaggagaaacgcctgcagtcctggagctcagagctaatgagggacagacaataggcacataagcttataccattataccatgatcatcaggtccaaacccacggggagtatgggggacgaacagcggcacacaggaaacacacgctttgtgaaattgagaagctggtatcccagacctggaagaggaagggggctggccatcctgggggaacaccatccatgcagacagagcagaagtgcaaagggccagaggacactgacaggcagtgagcactcactccggtaggccagtgtggacaagcggagaattgtgcgatagtgacatgggtgagactgggatagattaggccttgatagccctgctgagaatggattttacactaggtgggataaggaagctcttggaagcttttaagtggggaaacaatgacatccggttgacattttaaaagatccctggggctgctctgggccagcatgaatagaggaccccagtgctgagatcacggagggacgtacagggtgggtgacctgtgggccagccagggtcaagggaagaagatggctgctagttcatcttgaagatggtttgtcccaagaattcacacaggagttcagtctccaaagacttatgtcaattatatcaagagatagaaaattaatttagttgtggtgttagagatgaggtagtggttgcaatggattacctcattggggtgagagctctggtgagtgttgtggtggctttgtaagcagagggaaaggagcctatccaggcgtttgtgtacccctgccatgatgtaacggacctggccaacaccttcctgctccccacagagactgtgcaacgctccatggacttccaggctaaaaacctatgcacagactcttttaaagaatattttaatgtatatgtctgtgtaagtaggccatgcatgtgtaggtaccctttgaggtcagctggagttatagaattataggcagctctgggccacaggtcatgagtattgggaactgaactagggtccactgagccatctctccagcccatcctcttttttcttttctttttctttttttaatataaagaatttctggatcagccagtatgaagtatagttgggattaattctattttatgttttcaattatttacttctgaggggggaagcatgaagtgtcaaggtgagtgtggagatcagagaacagcatggaaatgtatgttctccccatccaacatgtaggtcctgagaatcaactcgggtcatcaagtttggcagcaagctctgttaccattgagccaactcactgacttctggcaaactttttcttttcttttcttttcttttcttctctttctttcttccttcctttctttctttctttctttctttctttctttctttctttctttctttcttttaaagatttatttgtttattatatgtaagtacactgtagctgtcctcagattctccagaagagggcatcagatttcgttacggatggttgtgagccaccatgtggttgctgggatttgaactcaggacctttggaagagcagtcggcactcttaaccactgagccatctcgccagccctctttctttttttttaaaggatgagtttatttagaacatttcaaagaaagcagttggcagtgcaggacagacttgcctgcatttcgttttaaatttcggatcttgctcatacccgcaagggtgacactgctgggaagtgctggagtcattaggaggtgggcctgctgtctccgtgggacagactcttacaggcagggctgtgagggccctcgtgtccctctctctttccctctgcccatcacagcacacgtcagctggagagcactctctggaaaaggagagacaaggcagcaagtggggaactgactcaatagactaaggaagttatccctcacagaacagagcccctaaagctgagcaagacaagcctgtgaaaccacagctaacttttcacatctccaaaggtgacgacaagggagggcaatgctcggaggttgggtacagcggggctgctcaagaatcctctagcttaggagggtgtgatggcgcacacctttaatgccagcactggagaggcagaggcaagcggatctctgtgattttgaggtcagtctggtttacagaatggattccaggatagtcatggctacacggataatctctctctctctctctccatatacatatacatacgtacacacacacacacacacacacacacacacatatatatatatatatatgcccagcccaaactttttacattgaacccagcaaccctttctttgcaagcactgggtttttcgactgcttgtgaaagaacctagtggggaaacccccactcaattctcgattaggcgcgcacccaagaatcaggaacagacgaccatcttgatgtaaaagcatgaggtagtttaatgacggagctctgggccaacacatatctcccgcaggagacagaggtgtcgaccacatggtggagccataatggcggagctccagttcgaaaagtatctcacacaggagacagtggtttcgaccacgaggcttggaagctaggggtttttatagaaaaggggtggggctgggggggaggaatcagcgaggttttacatgattggtccatttaaacatcaacagactgtcagaagggcgggagatagggaggcactaggccagtcaggacatgtaatgatgggcctgcccgggcatgtcctggcctgttctgctatgttctcagccccaggttcaaagctcacaaacaactctttgggctatttgacataaattacatgaatcacatgtctcaagttttatttcctttcatttgcacattttataaatttcactttttaaaaactgggagcatggtttactcagaatgaatgtgaagtttgtaagtaacgagcataaggagttctgtcatatgtatacatcgagtgactcaagccttcatccaggcaaaggacatttttgttttcccaaaaagtttctcttgctacctggtcaatattctctcttgcgcgtgctctctccctctctcacgaatgcccacacatgcatagcagacacatacacacagacatgcacactcgcccacgcacacacacagaggggtgggggcactactacagtttgtattgacctttgaaagttcctgagaattagcaggaaaccagggacccacttttgagaaactcctgaatctaagtagaaccaaagcaagcaagaaaacaatgtaacagggaaacaaaactttcaaacaagaatagaggctctgtgttcagagccaaaaaaccaaaaaaacaaaaaacaaaaaaacaaaacattgtaactattaaagataccgagggtgtctccggaaataatggcaacaaaagttggggctggagtctaggaagacccagtttcaaaacaacattgaagcttatttcataaacacttctctaatgtgctggctggtttcctgcgtcaacttgacacaagttagagtcatcagagaagaagcagcctcccttgaggaaatgcctccatgaggtgcagctgtaggacattttctccattagtgattagtggggagggcccagcccattgtaggtggggtggccctgggttctataggaaagcaggctgagcaagccatgtgaggtaagccagtaagcagcatcccgcttggcctctgtatcagctcctatctccaggttcctgtcctgttttgagttcctgtcctgacttccttccatgatgaacagtgctgtggaactgtaagccaaataaaccctttcctccccaaccgactttgtggtcatggtgttttgtcccagcaatagaaacccaaactgaaacacaggacatctcagcatgcagcccagactgtcctagaacctgccatcttctcgccccgtctcctgtgccaccaccacgccctgctttatttttgtaagtataggtaacagagggaacaaaagaggctaatagggagatgccctagagcctgggaggacagacctggaagagaggtgatggctcagcagaagagagtgttaaaaccagagccctctattctcacctggggttgctcatgggaagggtgctcttctgtacacagtgactgagaaaaggctaaatccttggagagagctagctgggttatttcttagtgtgcctgtgtgtgtgtgtgtgtgtgtgtgtgtgtgtgtgtgtgagagagagagagagagagagagagagagagagagagagagagagtatgtgtgtgtgtgtattcacaagtacccatggagattgagccctgggaggttgagttgcaggaatctgtggacagcctgatataggtgctggcatctgaactctagtgctcttaaccacagagccatgtctttagccctggatgaaaaaaaaagatttattttatttcaaagtgtgtgtgtgtgtgtgtgtgtgtgtgtgtgtgatgtgtacatgaataccagtgttcgaggagggccagaggtgccagatccccctggaactggggttacaggagccattccaagtgggtgctaggacccaaactcaggccctctgcaatagtaatacatgctctttactctgagtcatatccttagcctcagctttaaaaaaagaaagattgttattgtatataattttttaaagatttatttatttattatatgtgagtacactgtagctgtcttcagacactccagaagagggcgtcagatctcattacagatgattgtgagtcaccatgtggttgctgggatttgaactcaggaccttcggaagagcagtcagtgctcttaatcactaagccatctctctagcctgttattccatttatttttatacaaaataatggttccattatgatattttcataaatgtgtatcatgtactttgattatgttcacatatttttcctaaatagacccccttctttctttttttttttttttggtttttttttcgagacagggtttttctgtgtagccctggctgtcctggaactcactttgtagaccaggctggcctcgaactcagaaatccgcctgcctctgcctcccaagtgctgggattaaaggcgtgcgccaccacgcctggctgacccccttctttcaagtcctttaaaaaagtgtagattcaatatgtgcaagagggcaggtgacacttgccttctgagcctggttaatctagcatggttagtcttaacatgatgatttctagctccatccattttcctggaagtgacataatctcattctttatggcttaataatactccattgtgggccgggcgtggtggtgcacgcctttaatcccagcactcgggaggcagaggcagtcagatttctgagttcgaggacagcctggtctacagagtgagttccaggacagccagggctatatagagaaaccctgtctcgaaaaaccaaaataataataataatgataataatactccattgtgtacagagactgtcttagttagggtttccattgctgtgaagagacaccatggccatggcaactcttataaaggacaacatttagctggggctggcttacaggttcagaggtttagctcattatcatcatggtaggaaacatggtagcgtgcaagcagacatggtgctggaggagccgaaagttttgatccaaaggcagccaggaggagaatgtcttctgctggcagccaggagactaagtgtgattccacactgggtggaacttgtgcatatatgtaagactttaaagcctgcctccacagtgacacacttcctccaacagggccacgcccactctaataaggccacacctcctaatagtgccactccctatggccaagcattcaacatatgaaatctatgggggcggggggcaatacctattcctaccatcacagagtttcattttattctctctctctctctctctgcattagtggctgtgtaggtgtgctcatctgtgatgtgcatatggaggctaggggctaacactgggtgtcttcttctcttcatcttatttattgagacagggtctcttgttgaacttatggctgaccatttctggtagacaggcttgccaggaagcaccccctaccctgccacgatctatctctcttttctctgtccccagatctggggttataggcatgggttgccacgtctggcatttacatgagaactggggatccgaactcaggcgtcgatgcttgcactgtgggcacttcacccacagagtcatcctagacttccatgcttcccttttctagtttattctcattgttgttgcttagttagtatgcagagtaatggatttcactgtaacatcttcatatatatataaactttacctttgtaatgtatataatttaccttccatctgtcactctgatgatgagcatcctgactggtcccctgtcttggctgttgtgtgtagtgcagtgatacacaagagtatgcaggtgtctctgtgttgtgctgacttagggtccttggctgtttcatgtcatagctctgtttccaggttttgacagacctccatcctgattttcagggtgactgctgctggcttcatggcttggtagcaggagtcagtgtggtgactcagatctctgtgcatcgtgcctgaggagaaaagagacattagcaagaggcatccaggccttaacgtggagtgttgggtctatggacgccatgtgggcatcacccggcactagcttgaagtgcagagtgtctggcctcacttggatccttcggagactcatgcatggcagagggaatcttgggtagccatgctcagagggagcagggaagagggggacttgtggagcgacaatgagtttctccctctagccacacttctggagactaaggggcatgactgcttgggatgtggctctccctggtggagccacttgcttgatgcatgcagtaagaggacaggtgattgtagcatgcctagtgcaaaaggtaggtgagcaagtgggcactttccaggtatcagtgtagtgatggagagtggagcccagacaggacaaagtagatagtggtggctgccaggcagtgagaatgtgggtggctgtctctataaggtcaaagggctgtcacacgcaggaactggacaaacaatgggctagatagaaggcagaaactgtgagagcaactgaccttagagattagggtaaagtgattgatgggtgagttctcacgagatctggggtttgtacctggggacatggtccagaggggcccagtgtgttggaggtgacattaggacatccaggcaatgagaggacagatctctgatatctgttctctaaactctgtccctcacaaatctaaacacagtcatttgttctgggacatggcctgacatgggacatctgaagactcctcgtatgtcacaatgtgcagcagagcttcaggaccacagtgtggacagagaccaagttccttacacacaggggaacaagatgctctggggctggctctgctcagtccataaccagtgaggaggccttgagtggaccagcgggaccagcgggaccagcgggaccagcgggaccagaggggcccggacttaaatgtcctgggcgatgggaagcaaatgatagaaatgtgctcttctctcccagaaaggaatgatgcgtaggggtgaggggttggggctgcgtctgcggtgttttggcctgtcctgcattgtagaattttggccactagagggagtgccatgctcatatttccagggatttccaggcgctgtttgctcaagcttggcttctttttctaacgattggacaggttcagagtttgaaacagcacactctaggtccactacttctgcgttatgtagccttgtcggagtaacctaatcgttctgtgttgtggtttcaacagccataaaacggacatagaaaggcgtttgtagggatgcatgcctattatcttagcactggggatagttactttactagtgtaaagtacgctacaccacagtagtgagtttgaggtcagcctgagttcaagggcagcctggtttgtatggacagaccctgactcaaaggtgaaaactataaaaataagtaggtaaataatcaaatgagctaacacttaaaacccagggccttttgtccccatgtcaaaattcccaacatctttggaaggctgaaagcacccagaacctgagtctacatccccacagggctaacctgggcacagacacgtggagatgagccccaagcatgggtcaggggctcgttcacaggtcctggcttcaggtctctgtcagcaccacagccagccatgtaatgatccacaggaggcaagaacgcagttgtggttcaatacaactaagtagccagcgttggctcaaactttgggagtctgaccctcagtagtttattttaggtatgtttaaacatagcacaatttagtgaaaatttcccagtggtaacttaatcctgtatgtacaataaggcataactccaccaaaccctctgcaaagtactagtggcatctttcataaagatgagttctatagatggactccatgtgacacctcccataaagataggttctacagattgtcaagctcctgataagggtctaggggaggaggctctggtgtggtcctagccacacagatatctcgaaagtcaccaggttattaatcatgtctgatcccatggaaagcagattatacaccacccccacctccctttgaagagacaaccctgtgtgtttagcattcctgggttcccgggtgcttatctgtgagcacaaggacatacattcacacagagataggatgcatgccttcttggccactccactcccacatgcctgcctcaggccagtgtcgcccctcccgtctggggaaggcagctttctgattggtgcttctgagtcctctccccccacagcctgttctccctatgtaccccagctttctccctatgcaccccaaagccttcagcggtcccccctccatcagagttaaagccaaaggcttccagtggctctgtcacctcttactgtccatgctgccccagccttagcacttaaatcaccactgagcccctagagcacactgaccacagggccttcacactagctgttgccttggcctggctcccctgtctgtgtatcccctttctcaccccattcaagtctctgctaagagactgaggctgcgaggacttcccagcatgccttgtgccctttccctggcttatctctttttcccactgtaatgccttgacctgtatcgtttacttctgtgtcctgtttgtcactgtctttgtactagagcagaagcactgaaaaggcagggactgttctgtgttgttagttgcaaacagcacacctactctagcaccgagtagaaggacttaataaatatttggggatacactgtagctcaggggtagagagcttgcctggcatgtcaggggccctgaatttgattcccagaactgcaaaagaaaacaaaaagatgaagaagtatttatctggtcgcgcatggtgatgcaggtctttaatcccagcacttgggaggcagaggcaggcaggtttctgtgtgttcaaggctagcctggtctacatagtgagttctaggccagtgagatcctatgtcaacaacaaattaacaatggaattatttgcctgttaagtgggtggatgaacatgtgcagtgaaggcattgcacccagtgatccacccaggcctgagtgggatagtgtgggatgcagctgggcctgtcaacacaggagcacagcgcccgctttgggtctgagcaccctggggttgctgccttgaagctttccgtttgtctttgactctgtgacagaaggctgataggacccttccactggggaccacatttggatggatcactgtcagagtggccctaggcaactgccctgcgaatgtcttcatgcccgggggagtatggtattaaatagaagtgaaacccactggggaaaaggacctaggagaaagagagtcttctgccctgcattctgagcacgggcagcacaggttagcccctgggccccaggggctaactaacatgcacaggtgcattgtggggggtagactttttgtccgctggagctgtcagtactggggtaatgttggactccacattagagagagccaggccaagcaagagaaagccctcaggttcctgggcaaaagccttgaggtacctaacatctggctttgaggtgcctaacatctggtcttgaggtgcctaacatctggccttgtccccggtagcctaagcagcaggccgagaactggctggagcaggccatgggattcctctctgggcctctgttgtgacatctatgatctaggcaagaacctgttgcacacgggaccacaggggtgaggggggcattcagtggttgacagccatggtccttgaccatcacagggagtgtggccctggcccatgctggatcatctttgtggctattctgaaaagtccaggtgtttggcactctttgaaatgttcaaatgggagtctaccttttactcccaacggatgggtgagaagggacacaatagagttcagcagtgaccttaggaccttagtgaccaaagtgatggctgnnnnnnnnnnnnnnnnnnnngatgcggtcgtgtccttagatctggggggagctatagaccttgagaacagcctggtgacacctgggaggagcctgtgtctcgttccctgtcctccgttttggcgaacccctcctatctccccagccactagaatccaagccattctctaggatccacttaattagccaagcctattaactcccacaaggcttctcctcccctcctaattaactcgcttaattagggcttgcaggcacagttccacccagccccctctagctcccacccctccctgtctcccttccttggctcagccaagcccccaacaggctgggaatgctgcaggtgttgcccgagcaccttcagcacccacccttctcttcctgcccttctccccaccacaggacaccaggactctgctttttgtagcagcagcgcaaggcagagatgaaaacaggtcaaggcaatgggtggaatgagggaaaatggaaagagatgaccctgagccggtgtcaagaagatgccaggccatatgggtttgagtcccaggctgtctgaaagctctattcagcctttcctctctctctctgccctgacatagagagacagctcctgggtgaagaggcctggctatgtagaaaggtgctagcatgtagagaacatagcctgccccacatctgtatttgttaaatgctcaggtggccttgtgacaaggctaggggttgaggaattgaaggaagggtggagacagccagggagagtaccatgtcaggctctacagtctggaccacgccaggaacatgctgggcctggggaggggaagggcatgcagatctgggcagggtggcacatacctgtgaccccaacactatggcaggggaggcagggagatcaagattgaggctagcctggactaccttgtgaggctctgcctcaaaagcaaggatggagaccagggaagtggtattcacctgggtcagatgagtggctgtgtaactcacttccagaatttaaccattttagaaacccacattcatctgagcgatggctgtgtacaccttaatcccagcacttgggaggcagagacaggcagatttctgagtacaaggccagcctggtctacagagtgaattccaggacactcagggatacacagaaaaatcaagaagnnnnnnnnnnnnnnnnnnnnnnnnnnnnnnnnnnnnnnnnnnnnnnnnnnnnnnnnnnnnnnnnnnnnnnnnnnnnnnnnnnnnnnnnnnnnnnnnnnnnnnnnnnnnnnnnnnnnnnnnnnnnnnnnnnnnnnnnnnnnnnnnnnnnnnnnnnnnnnnnnnnnnnnnnnnnnnnnnnnnnnnnnnnnnnnnnnnnnnnnnnnnnnnnnnggaaaggaaggagagagaaagaaagaaagaaagaaagaaagaaagaaagaaagaaagaaagaaagaagaaagaaaggaaggaaggaaggaagtaagcaaggaaggaaggaaggaaggaaggcaggcaggcaggcaggcaggcaggcaggcaggcaggcaggcaggaaggaaggaaggaaggaaggaagagagaaagaaagaaacctattgtacagagagcttgggtttataagtaacagagattcaagtctctctgatttaaactcaaagggggtgagggagctggtgagatggctcagtgattaagaacactggctgctcttccaaaggacccgggttcaaatcccagcacctacagggcagtttacaactaactgtctttaattccagttccaggtgatatgacagacagacatacatggaggcagaacactgatgtaattaaaataataataataataataataaaagaataaactcgaagaggactttactgggccacagaactaaaaggtccaagtcttcaggcacacagggatgacaagtagttcagataatgacgagatttgtgtccccatctcttcattcctcctctggaggctctccctagtgtgacaacaggcttacactcagcctttcattgtggtctcagaaaggacccctgtagccaggagaaggtgttatatactgattgatggggctgggtcacaagaccagcccaggagtcagacaccatcatcagcagatcccctgagtaatgaagggtatggcggggaatgtaggttcctaaagggaaccggggctttgggagcagactgtgtagacagatgctaggtaacggagtctgtgctgcttggactgcgtgggcatcgtgccaagctcaggaaagttccaaatgcaggcatgtgaggcagtccctgccaggccccacccagatgtccttggcctcattcccagctttttgcatcttcatctcttttcctgaaggcttcctggttccacccccatccctactcccacccgagcagctcttatccattcctgcctccgggatgcggccagcatgtcctcccctgtctcagagttcctcagcggacttggctgtatgggttctgccatggtggccggctccatgatccacgccttgcctatgtgtctcctgctctttctattctcttctccgaggtcccctaccacataagggacttaatcaactctcagtctcagagaaatcaaactaggacactgttgaagccactcccacctccaagcctcccgggatgtgtgctagacacacttgaccccttagaaatgtctgtgttcccaggggtcacttctccaggagcaggaactgagtaagctctgagagtctatgccttagttggaggactacagagatgcagtaaacatggctggggtcaggccccatctggtcctcatttcccaaagcaacaactgcatcccagctttaagggtacagcatctatcactatggtaaccagacagcagggtggatagggccagcagtgccaaggtctctccattcctattgcttctctaaacatgaccagtgaggtaggtcatcctgaggaagcgttcctctttatgtgtttgttttgtcttttattttattattttatctttgacgtagggtcttcactccataagtcaaggctggccttgaagttctgatagttctcctgcctccgcctctgaaacactaaggttatttataggtgggagtgtccccactggagtttatcctgggtagttctaggacctggctttaggaagcatagactcacagagtggaaacgttcctagttttgcctggtgatgcacacctgtggtcgtagcagttgagcagtggagacaggagcatcagaagctcaaggttatgcttggttctacagcaagttcaagaccagtatgggctgttttgagaatcagttctcaaattaaggcaggaaannnnnnnnnnnnnnnnnnnngagggagggaggcagatgaacctgcgatgtcagcagttgggaggttgaggtaagaggacggatggtgagttctggtttagcctctaatatacagtgagactctgtcttgaggggaacaataatcacatttgtcaaaacttccacagaatagttttcaattgttttagaaaaatgtgtagttgtggtgggtagagattacccctgaggccaatgctaacagtttatcatctctgcatcccataatcctactaagaaatgaaccataaccaacatggatcctatcatggatcctcccccccaatcccagatcttgagtttattccaggaatagccactcccctgacattacagacattgcctttatactgcagacattacattactgcctttggctagctctccagcaaggagcagagtttctgcctcaaagcacagcaggcctgcagaaccacagagaagcaggtctttgctccaactgcatcatacggcacttgtcagcatcagtggcttcctgctggccacccacggtcgcagttgtatttccacgtggggcagagagcacaagaacactgttggaacgctctgatgctcccgtgggatgaattccaaacagagatttcagagacctgctgccctcagctactgaaccccggatgccccattctctctgagccagcctgagtttgggtggaaccctagcacaagcggttcagatctgtcctcaggggccctggatacttctgctccagctgcctggactttctatatctgtgcactcaaatgacatcatatctgtcatcttaatcctaatttgcctcctgaattacccagtcaccagtatcaccagctacaggggctgctcaccagcatcagtgctctaggcgtagggtcagggctaaaggaggcacagattattgtcagatttcaagagacctggcaatggaagagaggggtggggagggcaacgctgggcagcaagagcctagaatgcttccataaagccagtgggaagccctggacacaaagctgccattaaaggagcgttatgtgcccaagtaactgctcaacactacttcccccaactagggatcaactagcaggaagcaaatgggagacttctttgtgaacagtgggctggttcacggtggctgctactggaagtgggtgattccagtcccaaacagggcaggtctgagaggcagaagtttagaccatcaccgcccaccacttaccctgcacaattccatggatcccgtgagcctcctcctatgtgaaaacgatgaagaggaaggcaggagaatcaagctgtgctctttgcaccttgctacagactgctgggggcccatagcaggctctcattatctcctctcccattgactaaccactgaattaaccactgacttcactaaggcttgggctggttgtgaggggtcacccagtggtgtgacccaacctccagtccttgtaaatctgagggcttggctttatcttttttcttgttttcttgttcttcaagacaagttgcttttgaagacaaggtttctctgtatggccttggctgtcctggaactagctctataaaccaggttggtctcaaactcagagatctacctgttcctgggtcctgaatgctaagatgaaaagcatatgccaccaccgtccagctgcctgactttcataatcaaccaatacccagtttctgcattatcttctcttgcttctgctttgtgaagtcagccctgccctattctgccaggggtttgcatcttctttgctagccccaaaacatatggagccctgagtttcctagcttgcgtttaaggagaatatgtgttgcctgcaagagtgcttggcctatgggaatcagttgctgagagggcaactgggaagggattccccacaattcgttgtagcaacctttttgtaattgctttgtggataatcaaagccccaactgaggaatcaagggagtttttgcaggaggaagccttgaactggggaacgctgtaacaaaacacctgtgacaagagacttatagaaaagaaagctgtgttttggcccaaggttttagaggctttaaccatttgtttgaccctgttgatgtggggccagtggcaaggcagcgccccatggggggaccttgtggcagagaaagcctgtttataacatggccaggaacaaaaggagaaaaaagtgtcccacaattctttttgagagcaagtcctcaaattacctgaaacatcccaccaggccccaccttttaaaggttcccatcaccattcaatagcacgaagcttgaggcccaagctttcctttttgttttaaaaggtatttttaattattttatcttcctttatgaggttgttgcctgtgtgtatatctgtgcattacttgcatgcatgctcggtgctctagaaggtcaaaggagggcaccagatctcctggaaccgaagttacagaccgttgtgaactgggacctctggaagagcagccagtccttttaaccactgagccatctctccagtgcaaggaccaagctcttgatatatgcccttgggagacatttaagagccggctatagcaacaaccatggccaagaacatgtcaaggcctgtttccctgaatgaggatgtactctcagctccagtgtctggggactctgttataagacacaagaagataccctttctcttccagtctcctgctcttacacccagtcactcacacagacacccccagccctgccaagttgcttgtttgaagcaccaatacctcattttggaaggggcgggggaaaggcagggaggctgggatgaagtggaagagagcaggcagctacagaattgttttagaggataacttgtgtggaaattagcagacaaggttggtgttatggacggaaggaaccaaatgtacaaagatgtggaaaagcaagaagttgatgttccagaagagcttgctgatgccaaggctgagtagagaagagagattccctggactggtgtggcaagcaggcactagatgctgacagcctgcagcacagggcatctttggatttctgttgctgtgaacagacaccgtgaccacagacactcttataagaaaacatttagttgggactggcttacagttcagaggtttaacccaatatcatggcgggaagcatggaagcagacaggcagacagagcgctgaagaggtagctgagagttctatacccatttcctcaagcagcaagaagagagagtgaccctgggcttagcttgagcatttgaaacttcaaagcctacccccaatgacacactttcctccaacaaggtaacagctcctaacagtgccactctctaagaacttatggaggccattttccttcacaccacaatacagcgtaggctttaccctggaggggacaggggatgcttggcaagctcattaggaatgcaacctaggagacattgttctcaacagagctggtgcccacaaaggacctggtttccagaaaactaactttcagtaaaagtgggaggaaggtgggctaggattacaagtagcagtagcagtagtgcgggctgccaagcagaagtctgcgcatcagctttgggtgttcgtttcttcgtccagttctggggactgagtccagggtcttccctatgccaagactgagccacatttctagttcctgtctgtagtttattcaacttaggtgtgtgtgtgtagagggcagaagttgacattgtcaggtgtattcttcaatccctccccagctcatttaactttttgtgggtgcgtggtatgcatgcatatgtgtgtgtttgcatgtatgtggggtgcacatgcatgtgtgtgcatgtgcagacggaggttgattctcttgttctctattttacaaattgaggcatggtttctcacttgaacctagagctgactcattcggctagtcttgctagtcagcttgctctggggatcctgtctgcctcctaaatgctgggattctaggctgctacacctgcccagccatagctgagtcctgggggcctgaaccctggtctttagcagcatctcgcttggttccccttctcccctcccgtacttatttatttattcagagactgggtctttcactggaactcacggatcagatcaggctggtccctgggatccacctgtttctgccttcccagggctggaactacaggtgtcatggcactggaggaactcaagtccctcatgcttgcctggcaagcactttacttaataagccgtcttcccagctccacctaaggctacctgagtttgcaataaccagctctaaaagttctaccagcagctggagtggttggaagaggatgctaatttgagaaaacaatctgatcagagattaaaaggaggagagattttgggtgcgtcgggggctttttctatgaataaaatagtatgctgcatgggagactgggcctctggaaggatgcgttcgttgttcccactctgtcgccatctctgctcgatcgccccacctgcatccaggctacaatttccggttaatgaacaaagctcttcacacccgggtggctttgcacagctgctgcttcagccaggaaccccccacccccttcttccgttctgctatacacctttaatcccagcttttccttaaacttacttcgcggtctccctacagcagagctcgaaagttctgcctgaaccctgcacggccccacagaccccaggtctctgagtagcctagtagtcttatgaggtcccctggaaatcgaatggataggtggaaggatgaatgggcagacaggcgggtgaacagatggaccggtagttgaatgagcgagtgcattctgaataggagagctcggatttatttttcttctttgaaacagatccaggctccgccccacaagcacaggctggaatagtctgggacagtctagcccctcggggaccaagcagctggaccaggtgaccctctgtgactcccccgagccctctctaacctcgttctggccccctcctgggctctgacctagaaaaagaagcttatgccaatgaccggcgggccttaggaccccgcgtggccggaaagcgggcggggcatcgtgcggctcccgcggcggtggggaggtccaggcccgtggcgcctggcgggagggcgcggcgggagtgcgcgtgcgcggagcgcgcacccggcgcggcggacaaaggcgcgtgcggcggcgcgcgaggcggaggaaaaaacggcgggcgggcaggtacgcgccggcgggaggcggagccgcgaggccgcgatggagcgcagcccgggcgggcaccggcgctggagcccgagtgccgggcggagcgggagcctcagccggagcggcagcctcagcccgcgccaggnnnnnnnnnnnnnnnnnnnnnnnnnnnnnnnnnnnnnnnnnnnnnnnnnnnnnnnnnnnnnnnnnnnnnnnnnnnnnnnnnnnnnnnnnnnnnnnnnnnnnnnnnnnnnnnnnnnnnnnnnnnnnnnnnnnnnnnnnnnnnnnnnnnnnnnnnnnnnnnnnnnnnnnnnnnnnnnnnnnnnnnnnnnnnnnnnnnnnnnnnnnnnnnnnnnnnnnnnnnnnnnnnnnnnnnnnnnnnnnnnnnnnnnnnnnnnnnnnnnnnnnnnnnnnnnnnnnnnnnnnnnnnnnnnnnnnnnnnnnnnnnnnnnnnnnnnnnnnnnnnnnnnnnnnnnnnnnnnnnnnnnnnnnnnnnnnnnnnnnnnnnnnnnnnnnnnnnnnnnnnnnnnnnnnnnnnnnnnnnnnnnnnnnnnnnnnnnnnnnnnnnnnnnnnnnnnnnnnnnnnnctccccctcctcagcgtcgccatggagccgaggctgaaggacgtctctttgtgtctcgcttggaggagccgccccctcctcctctcccttcccccaccttccaccccaaccctgagatttgggcacagcttcggaccccgggagagaggagttgcgacgccctggagaggggttagaaggtggagagtctccccggtatagcctggagccttagaccttaggtcctttgaagaataaagacacgtagctatcatctcccaaagaccaagctgagttcttaagtgacacccaccctccccacaggaaagagaaaatttggggcgcccaaaggtgagaggtgcctgcattctgcagctctgggtgacagctggggctttgggtgtgtgcctttgtctgagagggcagggaaggggcgtgtttgagaggatgagtctcttattttctgactcccagaccccagctcaggtctcagtggggctctttatccagtccctctttgtgctccctgcagaacagggagaggacaagccctctcagtgaacagctagtttgggggagggaggtaccctgaatgaagaaaccatttcgggtcagagcacctttctgcccctctaagtcccaaggacagcaaacctgagtgttttccctttttctgacccggggaagacctagggccaagtccgggactgggacactgtgtcctctacgatgcaggagtgagtctggattcttgcttaagctttccaaagcatctacaatcaagagggcctcaacaaatgtcctaaaccccaggacccagggaatgccggaagatcttgggtgcgttgtaccccgagaaagggcaggaaggtttttttcagccttccacagacaggtgtaaagtcaggtaggaggtgagcagacaggctggggaaggcaggattcagaacacagagccctatagaagtttctttgttcgtttatttatccattcattgcaacatctaccgtgtctgaagctccagccctggagtttggggcttcccctcatcttttcctgatgatcaggcttcagatccttgggctgttttgtttgtccagaccatgtcaggaccagctgcccaacccttgaccccttgtccctgtgacacctgattccccagatcagacctgagcagctgataccttcccatcactactgcctggactcctctctgatgctggctttgccccatgagtacagatgtagcctgggtcagcactcttgcagatcccccctgcagactcaaggacagtcaaggcagccacccccccctccccccaggagaggatgtgcgaaagccagttgccctgaagatgaggtgaccttgatcaagcctgtggcacttcccagagagaatgagagtgaactacatatctgcagccagcttggtgggtacagattgaagccagactgtcaggagcatttaaggtgtgtcctagccaccttggaagtttattttgtgcagtgggttggagcccggggcttcgtcacacactccacaggcaagaaagtagaagcagaggctggagagaagttcaaatgactgtgagcagaaagagccattatgaggccagaaggggactggcaggaagactttctctccttgttaacctgccgcggctccccattgagtagccctaatgaagtagcttggcagcccagctctctgcagcctgccctaatttacatcttgagcacccgcacattacctggctcatctccatgactcttaattctttatcatataaaatccccctgacccagagcctcactctaggatggcttggcagctgtttctacctctatctccccttttgctctggcttagactgcacatggtagagagcccaggctaggtgattggtggctgggcagcttagtggcatttgtttccatgtgctgtgagactgcactcctaggctcagctttgggaatctggggctgtcctgttctggccacaccagcaccgttgagcctacagcctgatgtcttagcatttggagaattcagcgtagagccccagtttgctgatcagtgtatttcacatgtctgtgtttgttactgacgctcagaaattcttggaggatttcacattcagatgctgatttggagatcttcctgaaaacccaggggatgcagcagcttgaggcccagagctagagaatggctgtgttgtgtgggcaggacacacgctcccagtcgtcccaagaacgcctgacctgttctttattggtgtgaacttagagcctagctgctgacctccaggtttgtcgggaagagtgggagctggaaaaatgagtgttcagcactggctgtgcccggtctacctgcccatggctgggttaggactagcagcacacacactggaggcacagaaataaccattgcgaggggcagtagaccagggtttaggctaagtctgacggaggacttggggagggctgctattgacctcagtttactcctctgtgcagagaggacaaaagtggaggaggttctccaggcttcctcttctcgggctttccaggactgaacaggtggcctgggttgaaccttggatggtggtcatgccggccacgttcaaggttctatccccaatccagcaaacaaaacaaagtaaccttgtccctccccagcctctgacattccctaagcatgaagctgatgactgttaccaaataactgggccagagccagaggccagcaccaggccctagccactcgccttggctttggtaggtatgcaatcttcctggacaaaggtctgctggagcagaggtcaaaagagatggcctagtgccatgtggagagcactagctctggactcgctctaggtttgggatgtacttagctgctttgagcctcagtttacttatctatagaataggaacaatactgtgtaggatgaactaagccagaggccagagactgtttggtctcattaaaggggcaccgcaagggatagccgagcttcctctgggagctgctctagagacgcggggcttggcgtgggctgaggggaagcagtcattgatgaagttggtagttggcagggctgcagagctccaagatgggtagcaaagaggactcccagcccagtcatgggggcctgcaggaaaaggtctgtggggttaggtcctcgggaggaagtccccttttatcctctgcttctctccaggagaggggcttaataacagcaggggtagccaaaggccttctgccttccccttcgtggccacccctttctgtcatatcctcaatgctcctagctcctccccacccaggaagccatgtcgttaatgtcgggctcaagggaggcagtggagcattttctcctgtcagtctgcagagccaggctctggacagattttcattttacccctagaccagcacagcattgagcccatggcaggatttgagccccgctctaggtccaccaagggttggtgttgaactggcagcggctgcctgtccagtgactaacctgaccttggactagtcagttcttggggggatcctgtgttttgactgcagagggggtgctgtgaggggtcctcaagccttgagccagtgaggcaggcttcagcagtgtctgcaagcattctaggtcttctttcaccttgggctatcatatacaggtgaactgattccagtcaggggacctgctgtgacttccctcagcctcacactcatgctctgcagcttgaacagtcacaagagggttccagaatataccagctgctgtttccctgggagactgggcagggctgggctggatagcatagaacaacctcttttgcttgtcagacctgagaggatgacctcaaagagggtacacaactctacccacttggcctggccttgggcaaggttcctaacgtctctgtgcctcagctctctcttctgtaagaaagaatcctagcacttgtcttctggggctgttgggagggccgagtggaaggatgtttgtaaagtgctatgactgtcacctgcggcaccccaaggattgcctctaatattagtccttaaagcctgagcagaaaggggtggcagctcctcgcttagagatgaagtggagaccggtctctggcctggtgtggtggcacacacctttgatccctgtactcaggagacagacagagacaggcagatctcttaagtttgaggctagcctggtctaatagtaaactccaggccagtcaaaactgcaagtgagaccttgtctgaaaaaaaaaaggaaaaaatggggctctgatgtgaagggctttccccaaggctctctgtcctggggttgaggacaagttctggtcacttttatctcatacacaaagcacaaggcttggcggatctgaagttctctgtggcttcacccgtggaaccagcctgttccaggggcctgcagcccagctgtgtccgagtcttctaaggcaaggcccgggtcagggtcacatgctgtgcctcacgcttcatggatcaaagatcttagaggacttgaggctactgagaggagagccacttcctgtggtgtcttctccgtccctctcagatctgttctgcatacttggcaggcttcctttcccttgctcgctggcggttcccctgggatggcaccttgccggccatacgtctgtttcaccgttagagccttgactattgcgctgcacagtcccagctctcgagcttggccacaggactcccagctgctctcagatccaggggcagtgccgagcgtggagccggtcacacatatccttttgaaatgtgttaggatcagacaaatcgtctctaagccacgaccagctgtgtgacttggggtggaaccacagaatctttttctttgtgcctcagtctccttagctgtaaagacataaatagcgtctcccaagggtatttgaggtttaaatgagttggtatgtctagagcagttttgagtggcttgtaagaggtggctcctgtaagtactacttgaacctgaaccgttttatacccattttccactcctgttggagcccaaggcaagtcagatgggtgctctgagccatatctttggctcttacgcctatttaactggaagaaattgcgtctcagaggacaaacaacttgcacaggcccctatggctaggtatgggagtgagcgcctgagccttggtgtaggtgctacattggctacaggcgtgtttgtccctctgtagttcagaggtgatctggggctggggaaagagcctctgttgacccagctctctctctagaagtcaccattcgttcactgggaacaacctagccaaaggcactggcccatcaaccactgtgccacattctattccaaatcctgagtgctagattgtctgcatcttccaggtcttgagttttggaggccttcacaaaccctgggcctgctcatggccctctttgaggaccctaccccttgggacttggggctcccaccttccacagggccagagaggctagacaacctgtttggtaacagagtcaccaacttaaatggctgccaaggctttgcctagagaaggggttgactgccaggtagaagagagggaggaaggctctaagtcagccctggagtctcacagcacagtgatctctaggtggcctggtggcaaggacattgaggaaggttgtatgttgtggcttgacccaggaacacttctgagtctccacgttatagatctggcaaatggggaggatgggcctggtgatcgcagactatttctggctgtagctgctttaagagtaagatttaacagcagaaagatggcctctgagtgtggaatagaagggcagatttgcctgtacactcagcgggagaactagacctcgggtccctcctctggctaattcttaccaagtacctgcttcatgccaggcatgtaagaaatgcctttttagttttcactgtagcccattgtgctcagtgggcattcttagctctgtcctactgatgagcaagctgaggcgtctgtctgtaggggcacaacctacccaaggtcacattgcacagtggcaggatttgcaccctgaaggggggacgttgaataacctcttcttccttttgctttttggaccaggatacagtactcgatgggtcatgtatgattgtcaaagaactggagcaatccaggcagggtggctgtgtgtctgtacacacgacactcaggaagggtcaagaagattttgaatttgaggtctgcttgggctatttagcagcaagaccctgactcaaaagatcaaacaagagagagggcttgtctaaaatcccgtttcctgggaggccccagccctcgagtattggatgtaggagcaggcctccgctgcgatggtgctgctgacattgagcagaagggtccaagtgcaggcaggttgtggtcctgggcaagccagtgtagagggtagggacagccctgagggaggccattcaggagcacatcgtcaccaggctaagatgctgtcctgggaagagaggggatcttgccaagcacagattgtagggtgtaggatccctggagatggggtcctcgtgctgatgggcagctaggcaggtttctcgtttgcttcctctaacagccctgtcacctggcctcagccagctgtcccttctgctccccagctcatgcagggttgagcctggtaaaagttttatccttccttccctccttgctcagcccccacctccccacagagattcagttgttcagtcaacagaaatttactaagcacctgctttgtgccagctgtcatgtgagctcctggggactccacagtgaacaagaccaggccataaaatccctgccctctgggtgcttcagttcgagtgggagaaggacacagttaatagatgtcatcatagtcagtgaattatataatgaattcaaaggtgctccgttctactggggagaaagagagcaagcgtggaggaagggaaggtgggacgtggccctagtttggaaagtgtcacccaagcagaacactgacgaaagatctatgtgggccttggagggaagagctattcaggcagaaggaacagctccaggctgggatagggcttctgggagcagctgggaaacggttgggggtggggcgtagcagcaagtcaagggggtggggtggggtggggtggggtggacaaggctagtggaaagactggtatgagatgggctgcggagggagtggagaaggggtgacactgggtgctgtgtctagactgtagcctggcccagtggcacacacctgcagtcctagctactttggagggtgagacagaagaattggaagttgcaagctagtttgggtcaaggtcgaataccatcactactgtgtgggttctggagttgcttaatatcagtgaaaaccctgttcttattttccccttgtcaaagcagtgtactgactgactgtatccagtgatctggagcccagagggcagggtaactggtgactgctgctgtgttctcccaggggcagactaattatttggcaaggtgtccagcatagcaacatggtccgagctctctgcaaaaattccaagcccactcaccctttagcctacatgcctgtttctagaagctctgcacagatccactcaaatccactgagtgtcaagttgctcctgtgcaaggccgcttgctttttatagcaatagcatggacactggagactcagctctgcagtttaccccgcctgctgccccgctggctactcttcctcaagccaggcttcaatgggcgctgtccaggcctgtggtactgaacgtgggttggagggagacctggggcccagaactgaaggctaaaagtaaaaaagatgatgtgcaggccaagaaactaagggttcagtcctggcccagagactgaccttgggtaggctcctccgagcctcagcgtcctgccctgtgaagagggagttgccacagagattaagtggcaaaatgaatggtaattttttgttgttggtttggtttgtttttggttttttttgtttttttcgagacagggtttctctgtgtagccctggctgtcctggaactcactctgtagaccaggctggcctcgaactcagaaatccgcctgcctctgcctccggagtgctgggattaaaggcgtctgccaccacgcccggcataaatggtaatttttaccacttcacttcagaggtggtagcgcagtggttaagcttgggtcacagcatggtgatggttggttctaatgcttcctagatgggtgatcttctataatgatatgaccaagcggggcttggtggcatatacttgtcatcccagctactcgggaggctgaggcgggagggtcaaaagcttgaggacagcctggactacatagcaagactcttgttttagaataaaaagggctggggggtgcaacacttgcctgggctccatcccagcattaaacacagacagaaaacaatgcccgtgcctaagtttcttcatttgtaacttggagtcagtaatattccccacactatgaggcagtggaagaacttgatgggcccatgggattcacccatcaatgtcactttctgttggtatctccagcctgtccccggtgaccagtgctcctcacagctgcttctctcatgccacctggacttggagctgttagaggacaatagcactttacccccaaagacagcctggttcctgacctatgactggtcgtcagtctgtctatctacagaatggagccaaccaacagtccttcacgtggtgctagaaaataactgtgtgcctgcagggtcatattcaggaaagccaagatataaaaagttacaacttccaaacacgtaaggaattattcaccggcatttgtcaccccctggctcagtgctgggaatagcaagatgattaaggcaggggctggctttcaaggagctctcggctctctcgctgggttttaggtacactcgtctggagtctagcttgggagttatataaactcatcagctggcttaattaagcccgaacagaaacccactgattcatgaaacaaatgtccaggagtatagctggccttaggcgtgcctcgtcagcacgtctctgctgcttccttgtcaggcaggtttccccattggtgtggcctgccagcttccaacagctgtagccctgtgtcctctggcttggtctcacacccagagtgaaggatgctgtttctccacaattccagcagacagacgtccccagggcttggctgcaggggtcaccatggggcacgtgtttatcttgagcagatggaataatgcatcccagagtcaggcctgtccctgatagtggtgtagagagcagggcaggactggtacccaaagaaaggggaactgatgccaagcaaggcaataccacatggctgttcaaggagcctcagccgcactgcgaggccagatgtgctggtgtacatctgtagtcctagcactcgggaggcagaggagggaagatggagaattcagtgccactctggcaagaccctctcttaaataacaatccagtgatccaaattccgttgcagctgtgtgagcaaggcaaaaagtgagtcaaatctgactttcagtcaggctgggcggggtgtggggcaaggcacagtggcaagctcgtatgaaatgccacaggccgttatgtgtgttaactgaagtgcagataaaaagcggttcattggggctggtgagatggctcagtgggtaagagcacccgactgctcttccgaaggtccagagttcaaatcccagcaaccacatggtggctcacaaccatccgtaacaagatctgactccctcttctggtgtgtctgaagacagctacagtgtacttacataaaataataaataaatctttaaaaaaaaaaaaaaagcggttcatccaatggagtctaaggacttgtgagggaggcagcacgaagggctggcgtgtggggtcaggagactgcagctgaagctcacttgcctttcactgatgggcggaggagaggtcactgggctgcccccactcagttctgaaattctaccacacagctatttgccctccccccacacacacacacagggagggtgagtagtcatatccagagaagacaggcttgtattcagacacccctggagtttgcccttgcgtgggacacagtgtaggtccagggcctaagggagaggacctgaacataggacagagaatcttgggagtcaagtgtaaggacagaaaagctcagctggagccagacattgtgactcgctcctgcgattccagcccttgggagtcagaggcaagaggttcataggttcttggtcagtcagagtaagaaaacaaacaaaaccagaaggcctggtcctgcctcacctctcatagcgcccggccccccacccccagttcccacaggtagctttagcctctgttgcaccccagagatgaaggatgcttttctctgtgctatgtttgccttgcaggactggagctccagatctggacccagctctgccaagtgccagctttgagtccttgtgcacttcaacagctatcttggtttgcttggtgatctctaaagggtggtttacaatgagcaggtgcatttctcagttctagagggtaggacatcaaggtcaagggcatccatggtagggggtggaaagggaacagagaaagaccaggatgagccttttaaagaacccaacctctaaatagtttccaaaatctgtcttcttaaaaaccatacttattagtatgtcgtgtctgtggtgcatggtacatgtttacaggtgggtacacacatgcttagtgtgcctgtgagggtcaaaggacacctttgtaaagtcaattctctcctatcttaaagtgtcttgtggacatcaaactcaggtcacccaactgtaagcacctttaagcgctgagccatctcacctgccccgcccaggtctcgcctccttagcctttgtttgtttgtttctttggttggttggttttgaggcgggttctatgtagcttacagagatccaccttcctctgcctgccaagtgctgggattaaaggtgtgttgccccagtatctggccagatctcacttaatactgttcaaatgacagaacccagtgtggaggcacaggcctgcaatcgaaatacccagaacgctgaggtaggaggaacaagactttgaggccagcatgggctatgcagggaacataaagggcagttaggtttcaccgttggactggaagggtactcctgtaaaagtgagagtatagcaaccatatcatacacggtggttgttacttaagtctagcccaccatgcgtagagcaactagagtgctcaataaatacagcgacaccattctcccaccaacatgctgaggcaagccctcctctctgcagatgggtcaccctccacccactcctgtgagtgcatttttgtccttgatctctgtcaccattcctggggagtctggccatgttccaggcaggtgcaaaacatagttctgtctactgactgcatagcccttcctgagaatagcagtagttgttgtgacaagccacagttcaggggtggaacacggagattcacagaacaatacagggtgggtaatcttcactcctcctgggtggacatctagtgggggctctaccacattttagggtttgggagtcctttgctcaagtcagcatccagaaggcttctgcaactggaaaaagtcctgagctggcagtaacacgtcactgtgttacatcccagtgtgggggaggggagccagccacatggccacatgaaggaaggattgtgactttgtaatgtagaagaggagactgtttgataacagctggctggctgccacagccacagccaagtcaccacactcttgagcctctgttattatctgtggaacagagaacatcattcgatagtgacagtggctgcccgggttgtacatttactgaaagctttagcgtgttcatgggtgtataagtcacccctcaggtaagctgcacaggcagctccttgccctctcctcagtgttcttgtgaggacttagccaggaaaaggttgccagggtggtggtgttgcatgtgtgtgcatgtctgtctgtgtgactgtttgtccctgtgactgtatgtttgatgtctgtgtgtgtgtgtgcatacgcttatggcttgtgtgtgtttgtctctgcttatggtgaggtatgagcgttccgaagcactgtgagctgggttctctgctgggtgtagcatcacagggtggcacccaacccaggctgcctgccaacaggaagtggtaggcggttcagtcttgcttcttgcttgggaaaccctcccccattttggtggccctccagcatgtgtcagagccaggactgtcgtgcctgcacgctaggatgtccatctctgtctcctggagtgtacacatcagatggtcaagacagcagcccagcatctccctggtgggtgggggaaagttccagatcactacacagatgggtatcaaagccagtagagacacaccctggaagggttccacccaaagggtctcttggggccagcagttacccagagtgtgggaggataccctgctgagcacaggctgggaggaaacaaaggtcaacagagacctctatttcctggttgctgggcgttcacagcacagtctataggtacattcaaaagggtgtgtgtcaggacctggaggacagtgaccccctaatgtcagatatgtctttatccttccagccacttaggagctagacatgtcatgcttcactcagtctcaagttgtcacaccaggagtcacgtgacatcactgtgagggtgacatgggtatccttggcagaggttccacccagctactgcaggatctgggtgtattgttcccaacacttgtcttgggaaagaactgatttaaaggatggagtttagatccagttccagagctagctgtgtttctgtgggtacgccacttggtctctgcgcttcattacatcatggaataacagtactattatatagcgttcagaagaattgtggagtccttatgactggttggctgcagtaggcactgtcaagttaatgtttttgttttctttaatgtgtggatgtgtaaactgaggcccaggactggccataggtcactcggctgaaatggctcacagaaggatcaaggcccagactgttccaagttcaagccatctctgtagctccccaccgtgtctttaagtcatgcttggtaactgggtcagagacagtatgtacctgagggatgacacagcagcatcagggacagacatgtagattcagtcattccttctgctgacaccttgtggagaacatgacagcaggaagaggagggctgggtggccccaaaacttacccagtaaattcagggtgcaatacagcatgggttgggatctggtttggcctctgccttcaggagctcttggcttgttgacaagtaggcacagctgagacatcttccccaacctggtcagcaggggaggcccagatgaaagctcttgagtgcccgtgacatgcacctgctggggcagcagaggttgatagagaaggacccaaggacagtgccatttgagggatcaggcaggggagcagagtgggaagtaaagagtgcttaggaacagtggcagtctagcagcttctaaagtctgcagaggcagtgcgttgcttgagtgcctagagacccagggtcaagcacttagaaggaatacagcctcctgcagctaccagccaaagtcccagatgacacagaaacatctgaggtgacctagcagagctgatgctctaagtcggggagttgtatcagagaacacgtgtctgcacaccaggccatccgtctctgtctccaggagtgtacacatatcagtggttaggacagcagcccagcatctctctgggggttaaggaagacttcagattaagagggccgggctgtccattcctcagaaactctcaggaaaaactccacactgtccttgaaaggttagaggcagtggcctggggacacttcagaattggtttcctttcctttttgagatgaagctagctaacttgtcttcctcaccaggtaggtggtggacgtttgacagaactcatggtccctgaagctgagagggcctcccctccctacttccccaatataccctaatcatggccgtgttagaattgtagcctggggctggtgagatggctcagtgggtaagggcacccgactgctcttccaaaggtccagagttcaaatcccagcaaccacatggtggctcacaaccatccgtaatgagatctgactccctcttctggagtgtgtgaagacagctacagtgtatttacataaaataataaataaatctttagaattgtagcctggaactgggtagggctgtggacactggccacagagcccagtcacacagagtaaggggaagctgggctgggtttcctaccatcctctgtggttgtgaaaacacagccacaccgcagacgagactcccgggtgacactgtggcatctagagtcaaaataaaactcagaaaaggctgcagctggggtggggcagttctgggagaacaaggtctaggaacagagctggttcatgaatggaaagaacaggagtctggggaagtagaagaggtgggagccggtgcagggagggggcctctggtctcagccattgctgaggatggcacagatggaactccgcccatggctggtgggaggccaggaagttcccgcctggtgttcctcctctctgtgtgaagtgggaggctgggtcgtgctgcctagaaggaaggaaggccgggaaagggcttgccctggaagggaatgnnnnnnnnnnnnnnnnnnnnttcctcaccaggtaggtggtggacgtttgacagtaactcatggtccctgaagctgagagggcctcccctccctacttccccaatataccctaatcatggccgtgttagaattgtagcctggaactgggtagggctgtggacactggccacagagcccagtcacacagagtaaggggaagctgggctgggtttcctaccatcctctgtggttgtgaaaacacagccacaccgcagacgagactcccgggtgacactgtggcatctagagtcaaaataaaactcagaaaaggctgcagctggggtggggcagttctgggagaacaaggtctaggaacagagctggttcatgaatggaaagaacaggagtctggggaagtagaagaggtgggagccggtgcagggagggggcctctggtctcagccattgctgaggatggcacagatggaactccgtccatggctggtgggaggccaggaagctcccgcctggtgttcctcctctctgtgtgaagtgggaggctgggtcgtgctgcctagaaggaaggaaggccgggaaagggcttgccctggaagggaatggctggccagggcttgggggggggggtgtagcgaggttctagcacccccagcttccagctggaaatgcacaagtaagcatgggtgtatggtcctagcaaccctgaaaacccaggagcaactacaccatccttaccaaatcacctcatggagcctggtcatgctgtggcagagcctgtctggagctatgactgcagacttggcatggcacacacctacagagaatttactgagtacaggtgcttcgtgcctagttaaaccccacagtggctcatgggaagttgttctgttaaatctcttgatagaggagggagcaggcacacatgcagccagcccaaggacatccaactagtaagtgacatttggtattcagactcagcctgaggcttgtaggtcacgcctcctctcagatggggcagaggacttggtataactgtggtgtgggcagggggctctgggatgagaggcagccgacaggaggtcttagtgttggcctctggctgataacactcaatgcacattcgaacacctgcccagtgtacctgggagaggctctgctcccagcactcgcgtgtgtgctcgcgcgcgcagacacacacacacacacgcacacaaagctaagagaaggttctggatggctgcctggaagataaggatggagacagagcaggcttatactgggacaaaaggaaactcttgggatgacagatagactcattatgttgattgcagtgatggattcatgaatatttatgtgttaaactcatcaaatcgtgttttaaatatgtagtttatcatataccaagcaaaccccagtaaagccacagaaaagtgaagcaaagtctaaggtggaaagcagaagtgagaaccctgaattgggcgttggctttactatcacagagtcagaccccagccttggacgtcagctggggtgggcagaggatgatggtctctatggaaacacagtagctgtgaggggtatatgcatgaagacgatcccggctgtggacataaaggggtctcaggctgggactgagaaggacaggcaggacttctgtggaacaggtcccagggcctgacctgtgttgtatgtaccagaagggattgtgttttccccagggatgccattgatcatggctgcatgtgttgttactgtgtggccatactggcactctcttgcctgtgtggggtcaaatggggtggctgaggtaattgatacggcagaggccaccattcattggccctagccctgctcttgagcccgctctgcctcactgtgaaatgccgcttgtatgttcatcgtgtttatcgcccatctttctgatgcgcaaacctcaagggcaaggatctcgtggatttgtgcagtgctggatccccaaaggctctgatgtcacctggcaaacagcagatgcatcatcatcatatgtgaataaggctagggctatgggttagtgacagatcgcatgcttagcatgtgcagaactgtaggtctgacccccctctcccagcaccgcccacaacagaaacccagaacttgtgaatggaaacatatgtgtggctactgctttgtggcataaacctgtgtgcttgctggggactgtgtgggttagtgtgagacaaatgggtctgtgatacacagtgctaacgagggacagcgactgtctcaagaaacttcggggatggtgtcaagattaatgacgtttaacatccctgtggcccagctgggaatctcctaggtgctggggggggcgggaggaagatggcgagggggcttgtcactcatcatgccgtaccccacaacagggagaagatgagcgtgggctgccctgagcctgaaccgctccactccctgccttgctgtgggccgggggccgcccctgtaccaggtgcaggtgtgcccctcctcacagaagacatgcaagcgctgaccctacgcacactggctgccagcgatgttaccaagcactatgagcttgtgcgggagctgggcaaagggacctacgggaaggtcgacctggtggcttacaagggcacaggtgagtgttggtggggtggcaaggtattaaggttagggacatgcctggacagagggccagagcagaaggagttgacaaagtgcccaaaccaaggctaggctgctttggggccatctggcgcctttgagacagatgagcctagggacatgcaggaagtggtgctaagaacattggtgacacctgatgctgaggagctggaaaaggtgaggacaggtctttggggacaggacaccttgtttagagggtatggggagatagccctatgggacacagaccctgaagttcagccagtcagccaaggtcacagcacgacagtgtgtttgaactaggatgagaccctgtacaggcaaggcaggaggagtctctaggacagaggactaaggcaggaggaggaacgcttgcctgggtgcgccctagtgctttctgtgtgaccctgggcaatggaacctgttcctctatttaggaaagaaggtagggcctatgatgtgtagcattgttgctattccatagctgtgtgcccagtaaggtacacatgcctgcccagtttggagtgctagttccttatgggggattctcttattcacccattggtagcatttgatgagcctttgtgtggtgaattctggagactctggtacagggcagggccttatgttcagagagtcttgttctagctagggcgataaatacgacagatgagtagactggatgtagggaaaaatagctcagggtagaggctgtaagccttcctgctggttttcagtcaggggttgtaaggtagaaaacgcaagtcagccctgctctgctcggtgggcttagacaagtcttttacctgagtcagttttccatctctgcttgaggacatcgtgctgaccatggccactagccttactgcagggacaggttggacagccaggtgtgggagtctcactgttgttgttgtggccctgccaggcactaaaatggccctgaaatttgtgaataagagtaagacaaagctgaagaactttctgcgtgaggtgagcatcaccaacagcctgtcgtctagccccttcatcatcaaggtctttgacgtggtcttcgagaccgaggagtgctatgtctttgcccaggagtatgcacctgctggggacctgtttgacatcatccctcctcaggtacttcagagagtggcagagagaggggagatgggctttggggctgccagcgtatggaaacctggaaggagttggatcaaccggcaggctgggtattgtatgcgtacctgtcacacctctaatcccagcaattgggaagtaaagcagaggcaggaagatcatgggttctgtaccatcttgggctgagtagtgagaccctatctcagcaaatccggaagtgtagcttagtggtagtgtttgtctagcatacatataagcactgcaaataataaatatgcaagtgaccaagcattgagaccgcagaggtgtctctggagcaaatgggggaggatcctagtgcttagttggggtctttccacttgggtaaagtcgaagtcaaaagccacctagcagaggaacaggacgggtatcctaccaggtccggaggaggacaaacaggcaccaggatcagggcaggttcagaggccaacaggagagttgtgacctccaagtgggcaactgacagggtctcaaagaaggaactggggcagggccggcgggcctggtctacccctgagcagttctctctgttcccaacaggtggggctcccagaggacacggtgaagcgctgtgtgcagcagctggggctggcgctggacttcatgcacagcaggcagctggtgcaccgtgacatcaagcccgagaatgtgctgctgtttgaccgtgagtgccgccgtgtgaagctggctgacttcggcatgacgcggcgcgtgggctgccgtgtgaagcgcgtgagcggcactataccgtacacagcacccgaggtgtgccaggctggccgcgccgatggcttcgcggtggacacgggcgtggacgtgtgggcctttggcgtgctcatcttctgtgtgctcactggcaacttcccgtgggaggctgcatcgggtgcggatgccttcttcgaggagttcgtgcgctggcagcggggtcgcctgccggggctgccatcgcagtggcgccgttttaccgagcctgcgctgcgtatgttccagcggcttctggcgctagagcctgagcggcgtgggcccgccaaggaggtctttcgcttcctcaagcacgagctcacatccgagctgcggcggcggccttcccaccgcgcacgcaagccgcctggggaccgcctgccagggtccctgcgccttgaggctcccgggccactcaagcgcactgtgctcaccgagagtggcagcggctcgcggccttccccacccagcgtagggcccgtggtacccgtgccagtgccagttccagtacccgtgcctgaggctggtctggctccgcctgcacccccgggcaggaccgacggccgcacggacaagagtaaagggcaggtggtactggccacggccatcgagatctgcgtctgagccgctgcagcgcagctgctgcggggaagccgcgcgctctaacccgtactggggacaaggagcagtctctgcgcggcagtgggaaggagtagcgtagactaggaggcccagacaccccggtcggtggtgggctggtgacatagctagtaaatgaccatgcgtacggccggcctcagcctagaggagcccaggcccctgacaaaggctgggagcttgtgggccagactctgagctctggaacctgaacactcctggcgcttcataccccttggcagataaccctacagtattccatccaaacctgggcacagaaagggggctttggtgtcgggcagatatgggcatgagatcgatccttagaaactggcaaaggacaggcactgggttgataacagtggtctccaggaggtcagaggaagaggccaagccctttaaatgtagcaaaagttgtgtgcaggaacagacccgattatctagtgatacccctcacttcttcctgctgatgggaactttgaacccaggagggagagctattactgcagccacgaggcttttgggaacagagctccaatgtgtgcccctcctgggagtaagggagcagatggctggggaacaggaggctcggcactcctgtgtccccagggcaatggagtccatgcacagcccagctgctccctccagagcactccacaagcagggaaacagttgtgacagctactcctgggtttctgttgccgtcacatgtcagcctgggttctaggccagtaccctttcaggggcagagcaggtcactgaagtgaggagggagtgtgatgtgtgtctaagtgtccagacacctcaccaggcagctgccaagagccaggcctctgttttagcacactcctcagggaaccccaggaggtacctgctgttggctccggttcttaggcagcaaagcagggatccaccctgccccggctctcctttgggaccctacacaagaggcttgagggacccttgcaataacctcaacacaggcaggctgtgccttctgcctggcgccacccaactggccagcctgggctgcctctcctagggtccctccaaaaagttccgggtcattcaaggaggttccatcttggggctggctggctagctagctacaaggggcaccaaccacccctcagcctggagccccccacctctacacacccccttactcccaccacaaagggctataggtctccctgccctgcctgagtccagtttacaaactgtggttgctccagggcctggtcctactctcctggggtgccaccacttccctagtggacacagggccacatatgccaggtaagtagcaaacccctcctcctgccaagagccgagtctcagaaggcccccatcactgccctggcccacctggggccattaggccctccttcccagccgctgcctctcctcttgccttaggcctctccaccctgatctgcaataacaaggaagcgagattccacggtagacatcccgcatcccacaagcgcccctctctgttgagatcctgtgtgggaggcttctcccttgtagtatctaggatggtagtcctcagaagagaccttaggtacgtagcccagccccattgtttagaggcagcaaccagcctgacctggaacaggactcggactgggtcagcctctgctcttgccaccgctggtactgtctctgtcggttgggttgggaccctttgccccttaggagaggtgttggttacagatgtttacctcagtttgaagaaacaaaactgttgaagaaacaaataataataatagcaaaaaattagtaacacggtagacatggaggcttagaagacaaaccacagaggaaacctccccctttacaagttttctgtgaagtacagtttgttcacgtacgcacacatatgtgtgcatctctgtctcaccccagggcaggccaaatcatctattgacacctgtcccagcctgtgtgtccctcacactgccccctgtcctttggtgcttcccaggggcccctttgagctggcttgtggggtgtaggagagctccccggatgggaagtgaggcctcgggttagctagaggtctcccaccaggttctgtgagcagagagccctatgactgtgatgttccctgagcccacaggacagtcctggtggctggcaacagtgtccagttctggggcagagcctgggttgttctcacgcagtagagcctcacacccctgtctcgcctctcctaccccatgtgtttgtaaatactctggcttcctttggccctgaggaggtttttaaatgtgttatttacttctctaactatgacaattgctataaaataaaaatttagaaaaatgattgtttgagctgcagggtggaaggggtacactgatcttcatttacagcacactctgaggtagcacctgcagtgtctaggcctactcggcctcaagtggactcaggccaggcctgaaggagggttatgcttcctggactttgtgcgagaggggcagagagaattgtcctggcttagaatccagcatcagcttagacttgtgcagcctggaccaaaacggaaagctcctggccaccaccttggctgtatttagtgagcgcctttgttatacatgtcagcgaccacgaaggtgtgcggcaatgacagtctagtgatgggcgcgtgtgtggctttgctgctctgtgggttcctcttcccaccttttgtcctggtttcacccccatcactagataaaggggaggggggagaaagagatccctgaatctaatttttgtttcttctatgaccatgactactaacaaattgcaaccagccctcctgaacggttaccaaccaccctgcctctcagggccctagcgtttatgtaccctcagaaaagttcccagaattccaaataccacacaatcgcagaaactatctgcagctgacaaaatcttgccccagctaaagcatgaagaactcatagtcagctgctgtggacagtctgaagccgccacaccccacacctgggattgacatgaaaaccatttctctggggttttttgtttggttggtttggttttgttttgggttttttttttttttttcgagacagggtttctctgtatagtcctggctgttctggaactcaccttgtagannnnnnnnnnnnnnnnnnnnnnnnnnnnnnnnnnnnnnnnnnnnnnnnnnnnnnnnnnnnnnnnnnnnnnnnnnnnnnnnnnnnnnnnnnnnnnnnnnnnnnnnnnnnnnnnnnnnnnnnnnnnnnnnnnnnnnnnnnnnnnnnnnnnnnnnnnnnnnnnnnnnnnnnnnnnnnnnnnnnnnnnnnnnnnnnnnnnnnnnnnnnnnnnnnnnnnnnnnnnnnnnnnnnnnnnnnnnnnnnnnnnnnnnnnnnnnnnnnnnnnnnnnnnnnnnnnnnnnnnnnnnnnnnnnnnnnnnnnnnnnnnnnnnnnnnnnnnnnnnnnnnnnnnnnnnnnnnctcaccaggttttgagaagccagagaattctaagttaactgggctagggcacagtggggtactaggagtggtcttagggccaagtaagagttggtgctggggagccgggcatggtggcacacacctttaaccccagcacttgggaggcagaggcaggtggatttctgagttcaaggccagcctggtctacagaatgagttccaggacagccagggctacacagagaaaccctgtctcgaaaaaacaaaaacaaaacaaacaaaaaagagttgatgctggggcagctgtagagaagtataccaaaaacactcgctagttacccattgtgccagcagaacactgtgcctgctctgccttcaaaccctgtcctcacagccagcatgcccacgtgtggatacaacatgcctccctttcagcagtttcctttttggcccctgagtaactggagtcccctcaggttctagcagcctgagccattcttttcttctaaaagatctatcactttgtttaaaacttatgtagctccccatgacaccccaagtcaaagctgatgtccttcgagtgcctgctcacaccctgcctgggctggctgtactgtccagccgtattcctctacctctcctggtgccactggctgccgatgccttctcgctcttccacagacaccgagcatgcttacaccctaaggcttttaccttccctctggtctctctgcaccttccaggactccttcctcccccttccttcttcagacccctgctcccttccaaaggaaaatgtccgtgaaccggaaagaaggaaggatggtgatttcttgcatccatcgccctttgcagtgccatgtgttgttacccctgtcttctggctagaccctaagttctccaagagtagagacagaagagggcaaggccctgcttctcactggcccttccatgcctgacagaggacacagtaaggaaactgtcacaagttgtcattcatgaatgaacatccaagactattttaggggctgcgagtctacaaataaacaagccagaaaacctttagttcatcctctgaagctcagcgtctaaaacaagatatttaataggttacataattatctatgaaatggaagaggagagagaaaaagaaagaaaattccactcagcaaatcagagtgagaactcttatccaagatgaaatacagtcactccagagtgcctgtcacttctctgaaatgactggaaggtggagggaaagtggacacagcttggtgttcagaacttcccaggttatcagaggggagcaacctcaatatttaccaccaagggctgtgaatctcctactgctgtggaatctagcactcacctgtagcctcgagataaaaccactgtctgccatgccaatggtttaaccataaggaacccagcctcacatgctgcaggaggaccaggctgtccctacagcctttgagatgttcagtctggggtcttagtgtcctttcctgcccagattcttcattctggactaatccagtataaagagctctaattgggctagtgagatggttcacatagtaagagtaccttactcccaagccttaggaccctggaacctgcaaggtaggagagaactgagtcctgtgtggcccacatgtgccccaccccgataaataaataaatatgatttttttaaagttacagttcacattgaattttagaaggaagttccctttctgtgcagaatgcttaagtcctatgcagaattctccaactccttggcagtctgataagtccagcaaaacaaagaatattggaaggagcaatttcaaaaggaaacttgagggctggagagatggctcagtggttaagagaactgactgctcttccaaaggtcctgagttcaaatcccagcaaccaaatcccagcagccacatggtggttcacaaccatccgtaatgagatctgaccccctctactggggtgtctgaagacagctagagtgtacttacatataataataaaaataaatcttaataaaaaaattttttttaaaaaaggaagcgtgaaggtcctgtatgccatctagtggtggctcctggtattgagacacagaagaagccaaaagggaagacaatgaacaggctgtcccagaggttctcaaccttactaatacagttcctaatgctgacataaccccgtaaccattattttcactgcacttcataatagtagttttgttactgctatgaattgtaatgtaaatatgttttcctgtggttttatgtaacccctgtgaaaagggcatttgacgctcataacggggtcgcggcccacaggttgagaacctctaccctatcctaaaggtggacatgatgaaatagcatcagaaatcacacaggcttggagagatggtggctgtcaaggtggcttcttccagaggctttgaacttggttttgtacacccaggtcaggtggctcacagctcaagctacagggtgtcttccatacttccttgagcacctgagaatgcaaacatagtacataaataaaaacagattttttaaaaagtgtgtataagcagaagggcaacaaaatgggaagggacaggcagggtgcaggccttctagctgtgtgagctccttggcaggaaagggagatgagaaagctcacctgcaggggtaagaagggaggtagagtcaaaaacgccatttcactctggtaaaggtggaccctagactacggacagagaagaatttcaggagagtcagagtggagtaaggttatatttaaggggagatgagggagggtacacacttcaagttggaagnnnnnnnnnnnnnnnnnnnncctggtgctggtattttatttctttgtgtccattaggccatgaattcgtatggaatgggctccaacagctcaggctcttttccgttagtcctcacaaagtgtgcttctctgggtggcgcaggctggtgcttcagctgcacccaggtgcccttctctttggcttcctttttcttctggttgttctccttcacccgcttcaggaagctgtctctgctctttgagtgcttgatgtgctcaatccgcacattgatcctcttggccagaattttgcccttaacctgcttgttgacaatgatgcccacggcatgctgggtgacactgtagactcttccggttttgccgtggtagcacttatggggcattcctttttgaacagtgcccattcccttgatgtctacaatatcacccttcttgtagattcgcatgtatgtggccaaaggaacaacgccatgtttcctaaaaggcctagagaacatgtaccgggtgcctctcctctttccctttgtgttcgtcattttggcgagttactggaagatggctgccagaatatttttttcttaaagaatttccctttgcaaatgaaatcataaggtagtttataaggtcgtttgctgagctgtagggtaagagggctgttggcttaactcaaaggccatgagtactctggttctgggtaggcattgtgtgcttatcctttccgcctcttgctcgcgatatctataggaatggagactctgtacgcttaatcagttaatcaattaatacaattaatcagtcgtatgggagcttctgattcccacccacatctggggtgtggggcttcttccctgtccatgtctttactatctttcagtcagccgctaggtcgtcccagtgaaaagaatccgcagtcttaccagcgtggccagcctctggtcctcccacacctcagatccagtaggctttggtgacacagccagtcttctggtgggacaggccagcagtgtgaaagaggtttatttctcagagagccagagttgtatatcattttgagacagaaccaattggtcaagacagatattcccagacaactgagaacaaagaagaatgccgtgagccagggagccaggagtcagtcactggaggtagccatggtggtgggatgccaatgagagctcatgtagaaggcttaggtcaggtcaggttaggacagtggctagtgagtctgccgcctcaggataatcattggagacttgatacttccaagcccagcatcagccagtgggctagactctgagctggttgtctgctgtgaggttcactgcctcagtggcaaggacaactaaagctctgcaagcttcttggcatgtgccaccttggccttctagtagggcatgtgatgctgagcaggtcctgaaagtatggagacagctctaaatgtccagatctctgtgtgcccatcttatttcctctcttggggagcctaactcaggagggtgggagactctgcccagccctggatactaagctaagtgtgggcacagaggctcttgatatacaaagggaagctaactatcctaatttgctttcctgctgctgtgataagctatgatcagaagcaggtcagggtgcagggaggggtttgcttcaacttacaccaggtaacagtctttccttgagagaactcaaggccggaaatggcagcagaaacctaggaggaagactgctgacgggctccatctctggctagctcttgcttgctctctgccagctttctcgtacagcatagacccacctgtcaggtgtggtgccacccccgtaggtgtaaccatcagtcaagatgaggctcacagccatggccacaggctgatctgataaaagcagttcttcagcccgttccctcttcccaggtagcactaggttgctgaaaaagcatgtaccactcttcctttctcctctccctctttatagcatccttctccactcttttacctttcttctatttcaccttttgctctcccccatccgcagctcccacagccttgctgagggaatggacacactgctctttctctttctctgttccagcccacctttacttcatttgtttatacactgaccctaaaggactgtgcatgtgttccttacgcatgcttgtgtgtgcatacggtggcaagagcagccactcagtgcctcagacccccgtggtcccttgtctgcatagaacaggtctctagttgcaggtggacaaggagtcagcgaaatgaatgacagacagacacggacgcagcacaggattgtgtagaatctgaatgtaatttgtcaggtcgagcatcgaactttttatacagaagaataacaagaaaccaggccatatacatccgctgagttacagtgacacaaaacataaggaatatatacatcaaaagaaggtggggaccaggccactgccactaagaagggagccaggtgtaatgctagtctattgttaagcccaccaccaggggttcttagtaaataccagatttatgctgtttctttgggcctagtgaagaaacctgtctcagggggattccctaactctttcatggtaaacccacctatttgctaggccattgtgtattcccttgtctggctaagactgactattgtctcaagtaaacactctgcagatcagccctgagctattcccgctccgttgtttgtaatgcctaattagtttcaccttctctactagaagtaaatttgaatgttactgaatagataaccttcttactgaattcctactgaattccaagtttgtcggcttcaaggattttctgggacgttggaacactggcgaaggcttagctatgtcagaatccaatcttaaagggcacttataataaaataatactaaaagagagcacatggatccatacaccagactaacgcggggatagggtatgagtatacaggttatgagaatgccaaggttccaggaggtgagtttctctgaaactctttgccttgtgagtgcttccaggcttctcagcctgtcaagcagactacactggagtgtgcgtagcacctcagaggacttcctttctcacgagcaccttatggccttgaggcagggtctctcactgtaccaggtcatcaggtttggatagactggctgggcagcgagctcttgggatctgcctgccgcttatcctagtgctaggattgcagacactagccatgcctctatgtgggtgctgagggtctgcagagcagccactcttactcacccacctagcttcccagcccccatcttcaaaattagaattactttgacaatttcatacatgggaacaatgcattctggtcatacacctgctccactatctctttttattgtcattttgtgtagattttgctttatgaccatgggcatgggtgtggagctgccccttggaatagtaactcatcagagggtacactactgaagacactgacttcctgaccccattagcttacctgggtgggacaaagtccgacgagcctctctctgtctgtgactgtccttgtctgcaggctgtgcttgtgcaggtcctacgcagacagccacagatgttcatgagtgtcacaatccatatcataagatagcatttcatggtcttcctccctccggtctggatcttatattcattttgcaccctcttctgtgatgtcccctgatccctggagctggtgatgtgggtgtgtcatttaaggtggaacagtgatgtgggtgtgctatttaaggtggaacactcaacagtcacttgctctcagcactttaaccagccacagatttctgaattaaccactgattgcaacaaagagaagcttctttggtcatggctgatggtagcactagtccgtggtgtatgtataaatatttaggaagcagcttggcagcatacccacttagcaaaactaagcagactcagccccagtgccatgacctctcttgttagcccctaaccatgtgttcagtactaggaacgaagtccctcctgtggaccaggactcagatcaaataaaaaatactgtgattaatattaataaataaggtcacccccttaaccatcatgtcaccatggcaccagtgagcttgacaagttggcactgtagcatgtaaagttccaagttagaaaaaaaaaagatttctgggttttctcccccagctgccttgatagcactttccagtcctgtgaagggtagccaaccatcagtgaggggaggcttctgtccagttccagcatattctccaaccagcatgtgtggtgtctcctgcagtttgcattttcttatcagacagttctggagatcaatcaagagtaatggccattggtggctcggtaggagctctggagcctttatggccagcaactcccatatctgctacaagggttgttgtttagtaacccatggtctctggggttggtaatatcctcccatgtgtagtgcttctgttcaaagtcgttttaaaaagctgtgttttaagattatcgtataaggtagtgggtttccatgtgccttttttttttttttttttttttaatggattttcaagacagggtttctctgtgtagccctggctgtcctggaactcactctgtagaccaggctggcctcgaactcagaaatctgcctggattaaaggtgcgtgctaccactgcccagcccatgtgccttctttacagtcttggcttctgtttaacccttcctgactctgtgttcatccacctccatgccctcttaagcttcagcactcggtagcgtcctctgtttccataacacatgtgttcgataatgctccccggtaaggccgcctctgcccgtgccagggcccctttctccctttccggtcttcacaagcatcctaagttaaaccagcaaatctaaatggaagctgggatgatgcacatgagagggaacgcgtggctctcgacatctgaggcctgtattactgtgttctctgttgctgggataaaaaccatgaccagcggcaacttgcagggaaacaggcttatttggctgacgggtcacacttcatcatcgagggaagcaaggccaggagctcaagtaggacctggagtaagagctgatgcagaggccatgggcgatgctgcttactgacttgctcctcgtggcttgctctgcctgctttcttatagaacccaggaccagcagcccagttcttgccttgagttcttgtcctgacttccctcagtgatagagtgtgaccagagagagataagatggaagaaaccctttcctccccaagatgttttgatcacagtctttatcacagaaatacatctatcccccagaatgtcctctttcactagggaaataaagaccaagtactcctcgtgtatgtgtgtgtgtgtgtgtgtgtgtctgtctgtctgtctctgtgtgtgtctgtgtgtatctctctctctctgtgtctgtgtgtgtctgtctgtctgtgtgtgtctctctctctgtctctctgtgtgtctatttgtccatctgtctgtctgtgtgtgtgtctgtctgtgtgtgtctctgtctgtctgtctctctgtctgtctctgtgtgtgtgtctgtgtctctctgtctctgtgtgtgtgtgtctgtgtctctctgtctctctctctgtatgtctcgtctgtctgtctgtctgtgtgtctctatctctctctccctgtgtatgtctgagtgtgtgtctctctgtatgtgtctgtttgtgtgtgtgtgtatgcacgtgcacacatgcacacacgtgcgtgtatagtttctcatccttaggataagcttggtccttttaaccttcacctttatgtccatatcctccattgcagcccgttgtctccagtggctgggtgtgtgtgtgtgtgtgtgtgtgtgtgtgtgtgtgtgcgtccatgaattaagatgcacctggagcactatttatcaaagcccaaatattttgtacattagtaggacacatgaattcattattccaggaagcctctgatcagcgtgca

SEQ ID NO: 34 - DNA, 3674 bp, Mus musculus
atggtagaacatgggccaatcttggcgtccaatatcaacgataactttgcagagtttattccgaataaagtaagcccaacgcgccggaagtggcgagcaccaggcggcccctcagcccgcggcctgctgcggcgctggaaccggaccaatccggaatcaagtgcaggtgtgcccctcctcacagaagacatgcaagcgctgaccctacgcacactggctgccagcgatgttaccaagcactatgagcttgtgcgggagctgggcaaagggacctacgggaaggtcgacctggtggcttacaagggcacaggcactaaaatggccctgaaatttgtgaataagagtaagacaaagctgaagaactttctgcgtgaggtgagcatcaccaacagcctgtcgtctagccccttcatcatcaaggtctttgacgtggtcttcgagaccgaggagtgctatgtctttgcccaggagtatgcacctgctggggacctgtttgacatcatccctcctcaggtggggctcccagaggacacggtgaagcgctgtgtgcagcagctggggctggcgctggacttcatgcacagcaggcagctggtgcaccgtgacatcaagcccgagaatgtgctgctgtttgaccgtgagtgccgccgtgtgaagctggctgacttcggcatgacgcggcgcgtgggctgccgtgtgaagcgcgtgagcggcactataccgtacacagcacccgaggtgtgccaggctggccgcgccgatggcttcgcggtggacacgggcgtggacgtgtgggcctttggcgtgctcatcttctgtgtgctcactggcaacttcccgtgggaggctgcatcgggtgcggatgccttcttcgaggagttcgtgcgctggcagcggggtcgcctgccggggctgccatcgcagtggcgccgttttaccgagcctgcgctgcgtatgttccagcggcttctggcgctagagcctgagcggcgtgggcccgccaaggaggtctttcgcttcctcaagcacgagctcacatccgagctgcggcggcggccttcccaccgcgcacgcaagccgcctggggaccgcctgccagggtccctgcgccttgaggctcccgggccactcaagcgcactgtgctcaccgagagtggcagcggctcgcggccttccccacccagcgtagggcccgtggtacccgtgccagtgccagttccagtacccgtgcctgaggctggtctggctccgcctgcacccccgggcaggaccgacggccgcacggacaagagtaaagggcaggtggtactggccacggccatcgagatctgcgtctgagccgctgcagcgcagctgctgcggggaagccgcgcgctctaacccgtactggggacaaggagcagtctctgcgcggcagtgggaaggagtagcgtagactaggaggcccagacaccccggtcggtggtgggctggtgacatagctagtaaatgaccatgcgtacggccggcctcagcctagaggagcccaggcccctgacaaaggctgggagcttgtgggccagactctgagctctggaacctgaacactcctggcgcttcataccccttggcagataaccctacagtattccatccaaacctgggcacagaaagggggctttggtgtcgggcagatatgggcatgagatcgatccttagaaactggcaaaggacaggcactgggttgataacagtggtctccaggaggtcagaggaagaggccaagccctttaaatgtagcaaaagttgtgtgcaggaacagacccgattatctagtgatacccctcacttcttcctgctgatgggaactttgaacccaggagggagagctattactgcagccacgaggcttttgggaacagagctccaatgtgtgcccctcctgggagtaagggagcagatggctggggaacaggaggctcggcactcctgtgtccccagggcaatggagtccatgcacagcccagctgctccctccagagcactccacaagcagggaaacagttgtgacagctactcctgggtttctgttgccgtcacatgtcagcctgggttctaggccagtaccctttcaggggcagagcaggtcactgaagtgaggagggagtgtgatgtgtgtctaagtgtccagacacctcaccaggcagctgccaagagccaggcctctgttttagcacactcctcagggaaccccaggaggtacctgctgttggctccggttcttaggcagcaaagcagggatccaccctgccccggctctcctttgggaccctacacaagaggcttgagggacccttgcaataacctcaacacaggcaggctgtgccttctgcctggcgccacccaactggccagcctgggctgcctctcctagggtccctccaaaaagttccgggtcattcaaggaggttccatcttggggctggctggctagctagctacaaggggcaccaaccacccctcagcctggagccccccacctctacacacccccttactcccaccacaaagggctataggtctccctgccctgcctgagtccagtttacaaactgtggttgctccagggcctggtcctactctcctggggtgccaccacttccctagtggacacagggccacatatgccaggtaagtagcaaacccctcctcctgccaagagccgagtctcagaaggcccccatcactgccctggcccacctggggccattaggccctccttcccagccgctgcctctcctcttgccttaggcctctccaccctgatctgcaataacaaggaagcgagattccacggtagacatcccgcatcccacaagcgcccctctctgttgagatcctgtgtgggaggcttctcccttgtagtatctaggatggtagtcctcagaagagaccttaggtacgtagcccagccccattgtttagaggcagcaaccagcctgacctggaacaggactcggactgggtcagcctctgctcttgccaccgctggtactgtctctgtcggttgggttgggaccctttgccccttaggagaggtgttggttacagatgtttacctcagtttgaagaaacaaaactgttgaagaaacaaataataataatagcaaaaaattagtaacacggtagacatggaggcttagaagacaaaccacagaggaaacctccccctttacaagttttctgtgaagtacagtttgttcacgtacgcacacatatgtgtgcatctctgtctcaccccagggcaggccaaatcatctattgacacctgtcccagcctgtgtgtccctcacactgccccctgtcctttggtgcttcccaggggcccctttgagctggcttgtggggtgtaggagagctccccggatgggaagtgaggcctcgggttagctagaggtctcccaccaggttctgtgagcagagagccctatgactgtgatgttccctgagcccacaggacagtcctggtggctggcaacagtgtccagttctggggcagagcctgggttgttctcacgcagtagagcctcacacccctgtctcgcctctcctaccccatgtgtttgtaaatactctggcttcctttggccctgaggaggtttttaaatgtgttatttacttctctaactatgaca

SEQ ID NO: 35 - protein, 441 aa, Mus musculus
MVEHGPILNINDNFAEFIPNKVSPTRRKWRAPGGPSRLLRRWNRTNPESSAGVPLLTEDMQALTLRTLAASDVTKHYELVRELGKGTYGKVDLVAYKGTGTKMALKFVNKSKTKLKNFLREVSITNSLSSSPFIIKVFDVVFETEECYVFAQEYAPAGDLFDIIPPQVGLPEDTVKRCVQQLGLALDFMHSRQLVHRDIKPENVLLFDRECRRVKLADFGMTRRVGCRVKRVSGTIPYTAPEVCQAGRADGFAVDTGVDVWAFGVLIFCVLTGNFPWEAASGADAFFEEFVRWQRGRLPGLPSQWRRFTEPALRMFQRLLALEPERRGPAKEVFRFLKHELTSELRRRPSHRARKPPGDRLPGSLRLEAPGPLKRTVLTESGSGSRPSPPSVGPVVPVPVPVPVPVPEAGLAPPAPPGRTDGRTDKSKGQVVLATAIEICV

SEQ ID NO: 36 - DNA, 21602 bp, Homo sapiens
caccatcactccagtgtccaaaagcttaaccactatgcttcgctgtctctaaaatgacagagtaaaaattaccatttattggctggatgtggtggctcacacctgaaatcccagcactttgggaggccaagatgggtggatcacttgaggtcaggagttagagaccagcctggccagcatggtgaaacctcatctctactaaaaatacaaaaattagccgggcgtggtggctcacgcctgtagtcccagctactcgggaggctgaggcaggagaatcgcttgaacccgggagacagaggttgcagtgagctgagattatgccactgcactccagcctgggcaacagagtgagactcagtctcaaaaaaaaaaaaaaaaagaagaaagaaagaaaagaaaaaataaataaataaatttcaagatgcgttttggaggggacattaaaaccgtagcaatatctcttcctgtaaaatggggatagcgacggtagcacccacctcccagggttgctgtgcttatcatctaatagatttaatccacagtggttagcacagtgcctggcatatagtaaatgctcaggaaatatttgccagcataattattctcccacagagcaggataggaacaagccgtcttctctttacaggctggtcactctccacctacttctgtaactgggtccttgtcacttggtgcccagtattgtcactgtcctggttaacctcctctggccacattccagggaggtggacacgctgaggttcaaatctaatctctctggtttgtttgttttgagacagagtctcgctgtcacccaggctggagtgcaatggcacaatctcagctcactgccagctccacctcccgggttcgtgcaattctcctgcctcagccctctaaatatctaggattacaggtgcccaccaccacacctggctaatttttgcatttttagtagagatggggtttcaccatgttgtccaggctggtctcaaactcctgatctcaagtgatctgcctgcctcagcctcccaaattgctgggattacaggtgtgagccaccatgcttgggcttttttttttttttttttttttttttttttgagacagggtctcactctgttgagacctcccaggcttaagcgatcctttcacctcagcctcccaagtatctgggactataggcatgtgccaccatgcccagctaatttttttgtttctttgtagatagagatggaggtcttgctatgttacccagatggtcttgaactcctgggctcaagcaacccacctgccttggcctcccaatccaactgctgggattacaggcacaagctatcgtgcctggcgttctttggggtgtgtgtgtgtgtgtgtgtgtgtgtgtgtgtgtgtgtgtttgttttgtttttaattgatagagatggggtcctcactctgttgtccaggctggaatacagtggtgtgatcatgtctcactgcagcctcgaactcctgacctcaagcaatcctcccacctcggcctcccaaagtggtgggactacaggtgccatcacatgcagccccagatctgagctcttctgcttacttgctgcataacccttgaattggggtagtgccagctgctgtaacaaacaagcccccatatcccagcagccaaacatgatcgaagtttcccagtggctcccacaacaatgcagacgggcaatcctccacagcaggaggctttccacacagtgacctggggacccaggtgcttcttctcttgtggctccaccatcttctggggttttggagtcctctgcatcaaaccagctgcagaagaagagagtgcagataaaccttccccgatcctttgaagccccaggctgacagcgacacacataccacttctgtgcacattccagtggggagccagtcacatggctggcctggatgcaagggaggcaacgtggttccctgctggatggccgctctccagcccgactttgtagtataggagaggacacacgcgttgctgagggacaggtggctgtctgtgtcataactatgggcggatcatccacctcttgggcctcttttgttgtctgttaaatagaaggcatcactcagttgtggcgatgactgcacagccctttacgtttactcaaatcattcaattgtgcactccatgggagttaggtggtatataagttctacctcaattaagctattttttcaaaataggaattcaagctggacgtggtggcgcatgcctgtggtcctagctactcgggaggctgaggcaagaggatcatttgagcctgggggttcaagaccagcctaggcaaaatggggaaaccttttattttttaaaaaaataaaataataggaagcacccccccttctcaggggttttgtgaggactcaatgaatgaaatttttccaagttggccacaccatgtaggtctgtgtatacacgtgtgtctgtgtgtgtgcgcatgtgtgcatgtgtgtctgtgtggatgcttgtgcatccgtgtgtgtgttggtggggagagcaacaaggactccaaagtaggcctgagccagacgatgagttgggtgtcgtttcataagggtggtgccaacgcttgccgaccgccagcaggaagtggtgggcggctcagtcttgcttcttgcttgggaaaccctcccccaccacggtggccctcccagcttgtggcagagccgtgactactgccatgaagtcgagggggacccccacccaccctcagcaacacagatggcagatggaggcctccctcagggccggtgaggacacacccttgaggcgtgaggtgtgtgcgcccttcctccaccctcttgagtgtgggtggatgcggcgctgacagcccggcgtgaacagaggtcagagaggcctccgctgcctggtgctggcaagttcacagccatcacatccacagctgctcctgcaagtggaggcagggacgaccaatgacgaaatactttgagggtcgagttcccactgagactcggccctcttctgggcctcagtttccccacctggctggggaatctgggtgcgatgttcccaatatcctgccttgggaaagcacaagagtgaaaggtaccagctttggagccaataccaatgctagctgtgtgaccttgggcaagttgcctgtttcctcatctcaaaagcctgtgctgctgctcacacctgtaatcccagcactttgagaggccaaggcaggaggactacttgaggccaagaattggagaccagccagggcagcatagtgagaccctgtctctatttttttttaagtggagctaacaataatgcctaccttgtatttgtgaggattaagtgcattagtcctgagaacggccaggcaggtggtaagtcctgtgtgaatgttggttccattattattgttacttgatttcttcatggtagggatggggaagcagaggcccagagcagtggtgtgacttgctcaaggtcacccagcaaaaaagtggcgcacattaggatcaaggccaagcctcaaggcccattgctccccctgtgcctccgacgccacgtgcgccggaactgggtcagaggcagcatgtacctggcggatgacgcagaggcagggatgggtgcgtggattaattccttgtctcctgctgacaccttgcggagaaaaggcctgaagggagagggaggtgtggaaggagaagaaggagggaggggacagtagggggactcccaaagctgagccctgggaaccaggaaagggatgcaggagaggggtgaatccgatccagcccctgcccctggggagctcttggtttgttgatgggcagacagggacacagctgaggtattcaacaagggccctgagagagggacaggcagcccctgtgaatcttgctgttcagcagagacaggagtcagcacgtgtgagggcagcagggaagtcttcctggaggagtgagacctggcgatgaggaggcacggcagggaggtggaacaggcaggagagactcttcaggaattgaggagatagaatagaggacactaaagccttagagaggccaggggtggtggcttggcaggatcatcgcttgaggctaggagtttaaaagcagcctgggcaacatagcgagaccccatctctaaacacaaaaaataaaaaattagctgtgcaccatgacgcacacctgcagtcctagctactcacaagaaggctgagatgggaggactgcttgagcccaggagttcaaggctacagtgagccatgatctgcactccagcctgggcaatagagcaagatcctatttctaaaaaaaaaaaaaagaattaaagtaaataagtgcattaaataaagccatagagaggcagcgtggggtagtggtcagagcatgggctgaacctgacagtggggggcacacatggggcccaaactgagcccactggactgtgtccctgatccagcccagcccttcccagggcaactctgaggcagacatgccagagggcagagataagccaagcatcctgtccctgggtgtgggaggcagggagggcttgtagccactggtggccaccaattaagctcccagagtacacagaacagcctgaggtggccttgcagggccaaagcccaaggcgggaggattgcacacgtgtggatgtgtgtgctgtatgcacgtggaccgcccacctcagcagcccttggggactccacacacgtcaggaaaagtaggtcaggggagcagcccagcgtctccctggtgggcgtggggaggagtttgcggcaaagagggctgcgtgctcatcagagcccctgggggacagccccacagtccacacagaaagggcccaaggacgcgcaggccccggggaggcctgcacagaagcagccttgcctctccctgctggtgttgccgcggtcacctcggttttctaactcggaagcctcatcaccccgttggtgggtggacatttcacaggggttggaagagattttttccaagcctgagaccagggaaagacgatcacgcggagatgtcgccccatgtaagcccagctggtggctgcgggaaagagccagtgctgtccagcccagagctgggactgcgtggagacatggtggcaagtggcatgtctgcatttggatcagcacactagagtagagaggaagggcatgtgggaccgggttctctgggcctggcactgttcctacctctggtggaggggactgtggaatgagcgaggccagggcacatgtttaggtggaaatgagctaggaaagaaaagacagttgctggagaggaagttcctgttggaacaggggcaaggaggccaagtacagtggctcaggcctgtaatcccagcactttgggaggccgaggcaggaggactgtttgagcccaggagttcaagaccagcctgggcaacaaggtgagaccccatctctacaaaaaataaaatatgggccggatgcggtggctcacgcctataaccccagcactttgggaggctgaggcgggcagatcacctgaggtcgggagttcgagaccagcctgaccaacatggagaaaccctgtctctactaaaaatacaaaaattaggcatggtggcacatgcctgtaattgcagctactccagaggctgaggcaaaagaatcgcttgaacccagaaggcagaggttgcggcgagccaagattgcaccaggcaacaagagggaaactctgtctcaaaataaaataaataaaatacgaaaaaaaattatctgggcgtggtggcacgtgcctgtggccccaccttctcaggaggctgaggtgggaggattgcttgaacccaggagctggaggcttcagtgagccatgggggcaccactgcactccagcctgggcaacagagcgagaccctgtttaaaaaaaatttaatttaatttaaaaaacgacaggaggctgggtgcggtggttcacacctgtaatcccagcactttggaggattgcttgaggtcaggaattcaagaccagcctgggcaacatggtgaaaccccatctctacaaaaaatacaaaaattagccaggtgtggtggcgtacaccttgtggtcccagctactcaggaggctgagatgggaagattgccagagtccgggatacagaagttgcagtgaactgagatcacgccactgcactccagcctgggtgacagagcgataccctgtcttaaaaaaaaaaaaaaaaacatactgacaggggagatgagctggttcatgaatggagggaggcaggaggctgggaagacagggatgggagcaggctgcagggcggggaggggagggttccttcctccccagccagctgagaggacggtgcagatggagctccgtttggggctgggtgggaggccaggaagttctctcctgatgttcctcctctccgtgtgaagtgggaggctgggtcgtgccgagagtgaaggggaaggcagaggaggaggagaggcttggggcctggaagggagccgctgggctgcgagaggatgcggggctcatggagtgctcaccccctcccagcctccagcaatgcccacccgcccgcccacccttgctcagccagagagaaagccggtgatgatgacgagaacaacacagcaagcctgggcacctatggagcacttactgcatgccacatgccagggcttcacgcctgttaacttacttaaccctcgcaagaacgcatcgggagaaggcactgttgttgttgttgttgtcgttattattgttattattattattattatatttagatagggtctcactctgtcatccaggctggagtgcagtgaagtgatcatagctcactgcagcctcgaattcctgggttcaagcgatccttctgcttcagcctcctgagtagctgggaccacaggtgtgcaccaccacacccagctaacttttttttttttttttttttgtggagacagggtcttgctcaggccggtctcacactcctggcctcaagcaatcctctcaccttggcctcccagattgctgggatcacagacgtgagctaccttgagtggcccaacgcactattattatatcctttgtatagatgaggaaactgaggcacagagagaggaagtaacttgcccaaggacatccagctagcaagtgacagagttgggactcagacccaggctgtctggctctacatctgtgccttctcccagagggagctgtggtccttgttcttcagggtgcaggggtgcttaggagcaggctagggacactggagtgacatgtctgggattagagggagaaggggccaggtgcggtggctcacgcctgtaatcccagcactttgggaagcccaggcgatggatcacctgaggtcaagagttcgagatcagcctggccaacatggtgaaaccccatctctactaaacatgcaaaaattagccagatatggtggcgcacacctgtaatcccagctacttgggaggctgaggtgggagaattgtttgaacccaagaggcggaggttgcaaaaagccaagatcacaccactgcactccagcccaggtgacaagagagaaactccgtctcaaaaaaaagggaaaaaagggagaagggagtgcagggagggtagagggaggctgcacccggaagcagtgctcaggggctgaaggctggtggcagcttctaaaggaggcagccctggcctctcttgccagtgcacacacagatacatactcatgtgtgcctgcgcctgggaaaggctcatcccccatagtctacctctctccatttacagatgagaaatgaatgcccagagtggttgcctggaagaccggggttggggggatggggttttagaaaggggcaaaaggaaactttggggtaatggatgtgttcgtggtctcgacggcagggatgtatacatatgtcagaatcatcacactgtacacttcaaatatgtgtagttttttgaacaccaaatatacctcaataaaactagaaaaatgacatgagataaggggaaataaagaaatgaaggccacggatggagagttagttcactgtcacccacatgacaagtcaggtcttagcccaagtggtggctcacgctgtagtcccagcactttgggaggctaaggtggaaggatcgcttgatctcaggagttcgagaccagcctggaaaacatagcaagaccccatctctccaaaaaatttaaacatcagccagatgtggtggcgcatgcttgcagtcccagctactcaggaggctgaggcaggaggatcccttgagcccatgagttcgaggctgcggtgagctatgatcatcctactgcccttcagcctgggcgacagagcaagaccctgtctcaatacaaatacacttttttttttgagacggagtcttgttctgtcacccaggctggaatgcagtggtgtgatctcggctcactgcagcctccacctccagggttcaagaagttctcctacctcagcctcccaagtagctgggattataggcgtgcatcaccatgcccaactaatttttgtatttttagtagagacagggttccgccacattgaccagtctggtctcgaactcctgacctcaagtgatccgcccactcagcctcccaaagtgctgggattacagttgtgagccaccatgcccagcctaaatacaatttttgaaaaagtcaggttggccaggcgcagtgttcattagtcgggtggtgaggtcgtctgcagtgggagaggcactgccaggctgtgctgatgtgtggccatgtgtatggtgggatggtgtggccacatctataccatcctgccagtttggcctgagaccacgtggccaaggtatgtgatgatgcaatcatggccctcagacctcttccccaccccctaccttatggacagccataccactttcgatcgtaatatacaactgatgtgatcactgtgtctactgcccttctccccctggggtgtaagccccatggtggcagggaatcctaggtgtttgttccatgctgtgtcctccaggctttggagagccctggggaacagcaggtgcttcgtcagtacttgtgaataagctgggcacagtggctcatgctggtaatcctagtgctttgggaggctgaggtggaaggatcacttgaggccaggagttctagaccagcctgggcaacataaagagatgccaactctacaaaaaaaaaattaaaaattaggcatgataggtgcagcaaactaccatggcacacgtttacctatgtaacaagcctgcacatcctgcacatgtaccccagaactaaaaattaaaataaataaataaaaattagccaggtgtggtggcacatgcctgtaatccaatctactcaggaggctgagatgggaggatagcttaagcctgggaggtcgaggctgcagtgagctgtgattgcgccactgcactccagcctgggtgacagagcaagaccctgtctcagaaataaaaataacaacaagccgggagcagtagctcatgcctgtaatcccagcactttgggagggccaggcagagggatcacttgaatccaggatttcgagaccagcctgggccacatagtgggacccccctctctacaatccaaataaaaccaacgcttctgaatgggagtacccgtgtgaactcggtatctggctgtgtctgtgtgacataaacaggggccttgcctgacactgtgtgtgggtggcagcatgaggcagaggggctggtgccaccaagcgcagggtctggcagtgactggtcttcggggagctgactcaggcctggcccctgaggctttggggaaggcgacgcgaccaagatgcttgtcgcccccttgtggttatcttgggcctggcatccgggcccatcctcaagttttctgggttctggggagggcagaggggctggaggaggggacccttgcctgatgtcacacttcatgctcaccacccctacccaacagggagaagatgagcgtgggctgcccagagcctgagccgccccgctccctgacctgctgtgggccggggactgcccctgggcctggtgccggtgtgccccttctcactgaagacatgcaggccctgactctccgcacactggccgccagcgacgtcaccaagcactacgaactagtccgggagctgggcaaaggcacctatgggaaggttgacctggtggtctacaagggcacaggtgaacaagtgcagggtggcagggctgagaggttggggtggggcagggctgggaggtcagggttgggggacatgaccttgcagctgggccggggctctctggtgctctgtggaagccaggaggcagggtcaggggccagatgtagaggatgaggcctgaggcagcccagggggaaagagactgggcagatggggcaagggaggaatccggggcagagtggccagggtacaggatgggctgctgtggggccatctggggtgactttgagacagccaaggggctgtgccaggagtgtctggggagggcagggctgccggctgtgtctgagtatcaccagcgtctcagggatgtctggccccaggaaggtggatggagagtgagggtggttcctcaggaacagggtgccacacttaatgggtggtggaaggacctgtgaggtcaatattgcaatcaccatctctcaggtgaggacagggagacctaggccaattcagccacatagccaatgccctgcagctacagaggctgtgaaccaaaacgagaccccaggagtcatctccagagccttgtcgcttagtcactgagcttgatacctcccccacactgtaggtcacagccgtgccacccagccagccaggggctggggctgtgtgagctcccacagctgcacgcgcttgggtccaggggctttgtgctaactgagggcagcaggaggagcacctaacatggggtcacctgagctttgttacttgcttgctgtgtgaccttgagcaagtgacttcacctctctgtgcttcagagtccttctctgtaaaatagggtaacattagtgcacaacccatacaatcataatgaagtgtgagttgtgaatgtgcagtgctgaaggcagggcctgcgatgtgtaaatgctccgtggacacacatgtgtgctccacccagctatgtaccagatgggcacagatgcttgcccaggcacagagttgtggacacatgccttgcagtgtctcatttcttattcattcatccatttagcaagacaggaagcttagggagacccgttctagatggggtaggctgacaagataaataagcatatggcgggcaggacaaaatgagagaggtggagggcatcacaggccccctcgccccctcctcttggagagctgcagagtgggtgtagaaggctcaggttgaccctgcctgcatggccttgggcaagtcctttcctctctctgggtctgttcccatccgtgagatgaggacagtcatgcctgctggggaccctgttgcaccagggtccagagacaggcatgggtgcatccagtgcggaggcactgggagagggggcttcaaccctgttgctgttgctcccatcaggcacaaaaatggcactgaagtttgtgaacaagagcaaaaccaagctgaagaacttcctacgggaggtgagcatcaccaacagcctctcctccagccccttcatcatcaaggtctttgacgtggtctttgagacagaggactgctacgtctttgcccaggagtacgcacctgctggggacctgtttgacatcatccctccccaggtactcgggatggtggcatagggtggggaaagggtcttcagggtcccagagtgtgagagtgggagtggagtcagaccatttaattaacaagtatttactgggtgcctgctgtatgtcagttaccatttggggaggtggggatgtgcagtaaggaagacaaaagtccctgttctagtgggaaactgacactccacagcgggccagataataacagatggagatgagtgcctaaaaggagacagtgagaatgatgggatgaagtcactgggccgtcccctggggctacacaagaggagaggtgtcagatccacctgggaaggggccctcagaggaagcgaccctggaaccgggacggtgggggagggttccaggcactagctttaaatctgctctgccacttgctggctgagtgatgagaccttcggagcaggtcctccttctttgctgagcacctactacatgccagaatctggagacacagatgcacggacacagcagggaacaggacgggaagctcagggagccccgttctagttggggaagaccgacgagataagtatctagcaggcagggcaaaatgacagcaggtggagggcgccgcggaccccctcatcaacctcctggagagccgcgtgtccctcctggagccccgatgtccccataggagaagcaggcatggtagccactatgaggattggatgagacagcgggggaaagggcgctcagcagcatccgggccgcgtctgcgcggtcgccccagttactggggacagggtgggaggcgaaaaccgccttgctagagagggagctggaggggagggcggcggggcgggcgctggagagctggaaacagcgcggcttcccccggccgcccgcaggtggggctccctgaggacacggtgaagcgctgtgtgcagcagctgggcctggcgctggacttcatgcacgggcggcagctggtgcaccgcgacatcaagcccgagaacgtgctgctgttcgaccgcgagtgccgccgcgtaaagctggccgacttcggcatgacgcgccgcgtgggctgccgcgtcaagcgcgtgagcggcaccatcccttacacggcgcctgaggtgtgccaggcgggccgcgccgacgggctggcggtggacacgggcgtggacgtgtgggccttcggcgtgctcatcttctgcgtgctcaccggcaacttcccgtgggaggcggcgtcgggcgccgacgccttcttcgaggagttcgtgcgctggcagcggggccgcctgccggggctgccttcgcagtggcgccgcttcaccgagcccgcgctgcgcatgttccagcgcttactggccctggagcccgagcgccgcggcccagccaaggaggtgttccgcttcctcaagcacgagctcacgtccgagctgcgccgccggccctcgcaccgcgcgcgcaagccccccggggaccgcccgcccgccgccgggccactgcgcctcgaggcgcctgggccgctcaagcggacggtgctgaccgagagcggcagcggctcccggcccgcgccccccgccgtcgggtcggtgcccttgcccgtgccggtgccggtgccagtgcccgtgccggtgcctgtgcccgagcccggcctagctccccaggggccccccggccggaccgacggccgcgcggacaagagcaaagggcaggtggtgctggccacggccatcgagatctgcgtctgagtcgcctccgccgccctcggacccgggagcagcccgggcccgccccgagccggtgcccggtgcggcggtagggaatggagccacctcgccgcggggcagggggcgcagcggtagactaggcaggacgcggcccggcacctggtccgtccccggcgggctggtgagggggccaccaaagacccctagcgcggcctggtgagcgggggcttggcccagaggagccaagccgcacagacccgagaattcggaggccaccacacaacacacacacacacacatacacacacacacacacacacgccaggagcaagggagctttcgggccacactcccagacgcctccctgagccctggaacccggactcgttgctcctggccttccataccccctggcagatcatcctgcggtcccaccccagatcccctcctcctcgccatcccattctgccccctccccaccctgggtacagaaagggactgaagtgttgggcagagagggggcttaaggcccctgggcacaggctgggatcagggcagtgagcgaagggcagctgtgtcctgccctcccttctggaggctggaggggagaggccaagcccttggaaaatgtagcaaatgtctggatgtcgcataagtgcgtgtatgtgcgggacaggccccgagaagctagtgactcctgcacacccccattgcacaaatgaaatcacagcccaggagggagggtagcttggcactggctgagaaatagagctctctccccgcccctccccctaaccacaagggattgtcctgacaacttgtggggatagaagggctcacagggcaggggtctcagctgcccccatccttagggcaggggagttagtgtggagccgagagcaggtcccagctccccctgccagccgcactgtcccaggcccagggacctctgccgggtcctcccagcccttgccacacagcctagacgtagtagcctgggcttccagcaggtggcgagctggttcgtgctggaaatttctcctgggtttcttggggtcaaacatgccaacctccaagaccccatcctcacgtctcccacttttctggcgctggagtgtgcagggcgtaggacctgcatgtgtgggtgtgagaatgggggcggtggacaccagggggcgagtgtgtgactaggtgtgtgtgcacatgtgtagggtgcagacgcatgggtgccatcctttgcgttcagtgactgtgcgtccagacccctcaccagcggcccccccaccacaccctggtcctcccaggcagctgtcccagggcgcccaggcctgccttgcaccacagccctcaggaaatccggcaaggaggcccctgcaggttggttcaggcccccaggtagcaaaacagagacaacagcagccccgcctgaccccctgcccctctctgtggaggcccgggacccccgcaataagcaccacatgggtgaggctgtccctgtcagggtcccctgccagggtccctcctggggttctgggccatttgaggggctctttgatgggccaggccggccagagtgaactccgagcactttctggctggtgccccaacctctccactccccactcattcccaccttgaaaaagggctataggtcccctgccctgcccgggtccagtttacaaacagtgtggggtggccccagggcctggccccactctccctgctgtgcccactcctctccagactccacctccccagtgggtatgggccctccacatgccaggtaagtagcaaacccccactccctccaaggaccaggtctcagagaaggccctggtcactgcccccggcccacctggagcccatcggggctgcctctcccagccgcgacttctccttttgccttaggcctcgcgacatcctgatctctcctgcaataactaggaatcgagattccacagtagacgtcccttgccgtgctcgctctctctctcgcgcgctctctctctctctctctctctctctctctctctctctctctctctttctctctctccctctctctgttaagatcctgttcgggagtttccccagccgttgtagtatctagtatgttagagttgggaggggaccatagttatgtagcccagccccctcattcccagaggcacccagagggccagcctccagcctgaccccagagcagaaccggaacaccaggttggggccctggtgctgccacctcctctgctggtcgggctgggaccctttgccccttaggagaggtgttggtcacagatgtttacctcagtttatgtcactgtcgaagaaacaaaaaataatagcaaaaaataacactgtagacatgaagacttagaagacaaaaaaaaaaaaatcacacaaaaaatctcccttgttgcgattcttctgtgaaggtacagtgtgtatgtgtgtatgtgtgtatgtgtgtgcgtgtctctgtcccagaccctgtgtcccccacactgccccctgtccttcggtgcttcccagagacccctctgagctggcctgtggggcacgggaagccccctggatgggaggcggggccacaggtcggctagagggtctccaccaggcccactgaacagaaccccacggctgccagaatgttccctgagcccacactgtggccagtgggacagtcctggtggctgacatcagcgtccatgcttggctcagggcctggggcggggtcctgggtagagtcctagccccagagccccagcccctcatgtcttgccgcccttcctccatgtgtttgtaaatactctggcatcctttggccctgagaaggtttttaaatgtgttatttacttctctaaacatgacgattgctataaaaataaacaaaagtttagaaaaatgaccactgggtggctgtcttttctcaagtttggggtggagagggcggtgggggtgggggcacacaggtactctagaaactgaaaacttgggctgggcggagcggctcacatctataatcccagcactttgggaggccgaggcgggcggatcacctgaggtcaggagttcaagactagcctggccaacatggtgaaacccccgtctctactaaaaatataaaattagctgggcgcgatggcgcacgcctgtactcccagctacttgggaggctgaggcagaagaatcgcttgaacccggtaggtggaggttgtagtgagctgagatcgcgccattgtactccagcctggacaacaagagcaaagttccatctcaaaaaaaaaagaaaacttgaccttgacataggctctaggcctcctgtgacctctcagaacttgagcatgaggggaacaggacccagattctgggacaaggggtaggcagttgtcccttgcctggagttcagcttgtggcccttcagcctggccagaaaagaagcaaaagcccagaggcagaccagttcaccactcagcacctttttactgagcaccttttgtgtaccaggattcctcctaggggctggggacacagcactgagcaggacagacagggcccctgcccttaggcagctggtgatctaatgatgaaggcagacattgcccaaacagcaggctgagctcagtgagagcatggaactgggagacccatcgagtttggaggagcccacagacgctccctgacgatggggccagagcaggggacaggagaaagctgaaagggccggttgtgggtgtagactccagcaacagtcaaggcggatgttctgaaggagggggagcttcagtggactgtagggagtttcatgattcaacactcattcaaacaaatatttgctaattacctactcatgtcaacagagcagttctgttggctctgccttcaaatacaggcacatcccaaggcagcaactgcccattgcctgcattgctgcccctggacatggcctccctccctggcctaaggcaggagcctcttctgagcctctgcaggttcttcttttttttttttttttcccaagagttggggtctcgctctgttggccaggctggagtacaatgacataatcatagcttacttgcagcctcgatctcctgggctcaaacagtcctcccacctcagcttcccaagtagctaggactacaggcacatgccattgctctgggctattttatttttattgttactttttgtagagacagggtctcactatgttgcccaggctgatctccaactcctggactcaagtgatcctcctgctttggcctcccaaagtgctagaactacaggtatgagccactatgcccggccagacagatccttttgataagatctgtcactatgttcagaaccctacaatggcttcctattccacccaaaaatcaaagctgaagtccttagagtggtctccaaggtcccacgagctctgagaggtcacaagaggcctagagcctatgtcaaggtcaagtttcaagcccagcacattccagcctcatccctaccatcccctgtactgcctgccaagcatgtgctcacctggaagccttaaactttgccttgtactctcccagggatccctcccgcccttccttcagggtcagagcaaacttcctgagccgtctaggtggagagaagccctccttagcctgcttcactgcacactgagcactcgtcaccacctgcaggaccatgtatttgtttgttacccatctctcccccctagaatggaagttccataagagcagaggcagtgtttggcaaactgctacttccctccagcccccacgcctgggacagggcctggtacggtgatgggaactccgtaacaacttgtcagactaatgaatgcatgcctgctactattttcggggccaaggaaacagcaataaacaagacacacaatccctatcacataccctgagacatactctttttttccttttttctttttctttcttttctttttttcttttttttttttttttttgagatggagtcttgctctgttgcccaggatagagtacagtggcgcaatcttggcttactgcaacctccaacctcctccacctcccaggttcaagcaattctcctgcctcaacctcctgagtagctgggattacaggcacatgccacaatgcccggctaatttttttgtatttttagtaaagatgaggtttcaccatgttggccaggctggtcttgaactcctgacctcaagtgatccacccgcctcagcctcccaaagtgctgggattacaggcttgaaccaccgtgcccagtcttttttttttttgagatggagtctcactctgtcacccgggctggagtgcagtggtgcgatctcggctcactgcaacctccgcctccgggttcaaaccattctcctgcctcagcctcccgagtagctgggattacaggcacctctactaaaccctatctctactaaaaatacaaaaattagcccaggcatggtggcatgagcctgtagtcccagatactcaggaggctgagacagaagaattgcttgaacccaaggaggcagaggttgcggtgagccaagatcgtgccattgcactccggcctaggctacaagagcgaaactccatctcagaaaaaaagaaagaaaaagaaagaaatacagtgtgcaataaatgtaacgtgcttgaatcatcctgaaaccatccctccatccccatcttcgcttcaccccaccccaccccacccctggtccgtgaaaaaatggtcttccacaaaaccagtccctggtgccaaaaagcatggtgactgctgttctaaagagcaaaacagacattctataagttacataattatatatgaaatgatggggtgggggcagaaagaaaaagagagggagggcaaaaagaacagcaaaaagccctaccggggcagaaaggactgctacccaactatttgatttggtatatgttaaagaaaagctctgtcatttcaaaatgtctgccgcttctctgccatgataagggtgtcatccactttaatggattgttaggggatagaggagaaatctacaaagcaaaagagcatcactggttccccagcttggtggacaaacatcacctcttcagatcccccacttagccacagagtggcgggacttgccactagggggcccaggctttcggcagccatggcttctgtctccgccattcactcatgtcactgctgaattcacttgggcaatatcaggcatcctccaggctacaaagcttttgccctgccgtgcccatggcttgactggaagggcttctaatctcacccacacgctgcaagagaactagccctgtccctgtagccccttctatcctttaatttagccttggtcgcctcccctgatcatggcacattccttcttgagggtgctggtaccctgtccatagtcttccatccagactaatcagtctatcaaaaaggttccaataacattaaacttccggccaggtgcggtggctcatgcctgtcatcccagcacttcaggaggccgaggcgggcagatcacttgaggtcaggagttcaagagcagcctggccaacatggtgaaatctcatctctaataaaaatacaaaattagcccagcatggtggtgcatgcctgtaatcccagctactccggaggctgggacaagagaatcccttgaacctgggaggcagagatcgtggtgagctgagattgcaccattgcactccagcctgggcaacaagagtgaaactccgtctcaaaaataaaaaataaaaaataaaaaaaaacattaaacttcaagtccgggtgcagtggctcacacccataatcccagcacttcaggaagctgaggggggtagatcacttgaggtcaggagtttgagaccagcctggccaacatggtgaaaccccatctctactaaaactacaaaattagccagggcatagtggcaggcacctgtaatcccagctactggggaggctgaagcaggagaatcacttgaacccaggaggtggaggttgcagtgagccgagatcacaccattgcattccagcctgggtgatagagcaaagctccatctcaaaaaattaaaataaataaaataaaataatataataaaataaattaaacttcagaaggaaagagagttgtagccttgattccttttttcccaagacactccttgaggcctatgcaaattttcccaactcctcagcagtcacagctaagtgggccaaagcaagggctagtggaaggagtgatcgcagaccccatgacacccttcacacagagccatagatgactactcaacttacggtcacgtcaccatgggagagtcaccaaacagcatctctctctctgaaatgtcaacatctatacacccatctagtgtctggtttagggtggaaatgtgggtgtaagaaaagtaatttagaggtaattactggcagctgaggggaggagactgttcctcacccagccttgggttagtggagatttggtgcaatggacaaaaacagaggttttgatttggaggcgaagaaagggggcaatggctccagaggccaagagcagagaaggacagccaggaagtgggctgagcatggtggactcaggagatggggagccccatcttgggatgcctcagagacattgtggagggggcctggttttcctttttgaacattttttattgttattattatattaatttatttattttttatttttattattattttttgagatggagtctcactctgtcatccaggctggagtgcagtggcatgatcttggctcactgcaacctccgactcctacgttcaagcaattcttctgcctcagcctcccgagtagctgggactacaggtgcacgtcaccacacccagctaatttttgtatttttagtagagacggggtttcaccatattggccaggctggtcttgaactcctgacctcgtgatccacctgcctcggcctctcaaagtgctgggattacaggcatgaactaccgcacccggccctttgtttttttttctttgagacagagtttcactcttgttgcccaggttggagtgcaatggcgcaat

SEQ ID NO: 37 - DNA, 1282 bp, Homo sapiens
ggagaagatgagcgtgggctgcccagagcctgagccgccccgctccctgacctgctgtgggccggggactgcccctgggcctggtgccggtgtgccccttctcactgaagacatgcaggccctgactctccgcacactggccgccagcgacgtcaccaagcactacgaactagtccgggagctgggcaaaggcacctatgggaaggttgacctggtggtctacaagggcacaggcacaaaaatggcactgaagtttgtgaacaagagcaaaaccaagctgaagaacttcctacgggaggtgagcatcaccaacagcctctcctccagccccttcatcatcaaggtctttgacgtggtctttgagacagaggactgctacgtctttgcccaggagtacgcacctgctggggacctgtttgacatcatccctccccaggtggggctccctgaggacacggtgaagcgctgtgtgcagcagctgggcctggcgctggacttcatgcacgggcggcagctggtgcaccgcgacatcaagcccgagaacgtgctgctgttcgaccgcgagtgccgccgcgtaaagctggccgacttcggcatgacgcgccgcgtgggctgccgcgtcaagcgcgtgagcggcaccatcccttacacggcgcctgaggtgtgccaggcgggccgcgccgacgggctggcggtggacacgggcgtggacgtgtgggccttcggcgtgctcatcttctgcgtgctcaccggcaacttcccgtgggaggcggcgtcgggcgccgacgccttcttcgaggagttcgtgcgctggcagcggggccgcctgccggggctgccttcgcagtggcgccgcttcaccgagcccgcgctgcgcatgttccagcgcttactggccctggagcccgagcgccgcggcccagccaaggaggtgttccgcttcctcaagcacgagctcacgtccgagctgcgccgccggccctcgcaccgcgcgcgcaagccccccggggaccgcccgcccgccgccgggccactgcgcctcgaggcgcctgggccgctcaagcggacggtgctgaccgagagcggcagcggctcccggcccgcgccccccgccgtcgggtcggtgcccttgcccgtgccggtgccggtgccagtgcccgtgccggtgcctgtgcccgagcccggcctagctccccaggggccccccggccggaccgacggccgcgcggacaagagcaaagggcaggtggtgctggccacggccatcgagatctgcgtctga

SEQ ID NO: 38 - protein, 424 aa, Homo sapiens
MSVGCPEPEPPRSLTCCGPGTAPGPGAGVPLLTEDMQALTLRTLAASDVTKHYELVRELGKGTYGKVDLVVYKGTGTKMALKFVNKSKTKLKNFLREVSITNSLSSSPFIIKVFDVVFETEDCYVFAQEYAPAGDLFDIIPPQVGLPEDTVKRCVQQLGLALDFMHGRQLVHRDIKPENVLLFDRECRRVKLADFGMTRRVGCRVKRVSGTIPYTAPEVCQAGRADGLAVDTGVDVWAFGVLIFCVLTGNFPWEAASGADAFFEEFVRWQRGRLPGLPSQWRRFTEPALRMFQRLLALEPERRGPAKEVFRFLKHELTSELRRRPSHRARKPPGDRPPAAGPLRLEAPGPLKRTVLTESGSGSRPAPPAVGSVPLPVPVPVPVPVPVPVPEPGLAPQGPPGRTDGRADKSKGQVVLATAIEICV

SEQ ID NO: 39 - DNA, 66499 bp, Mus musculus
  misc_feature (1)...(66499): n = A,T,C or G
agtgtttagcctattcacctccctctgctggcgctagctctatgtggcccgtgacaaataatatccctgtatcaggggttgtccagatgaccgagggagcacttagcatagagcatgctccctctgctcacacttaccattctcaggacgctcagctgctgaaacctttccctctctatactatcttacagacaagaagtggagacgcagggaaactaagtcacttggtcaacgttgtccagcttgactggtcagtagcaggcccagctttcctccttcagactcccctgaagctctgcagagtccacatagcagctccgtgccttcactcccctgcctgcctcctctttccctcacccacccctcaaaggctttctggaacattctggcctgctatctcatcccaaatcactggaatgggaccttctgcttgtgtttcgtagctcaacattttatcaggaagacgtgatcaggaatacgtgatccttgaatcaccccacccgcccagctgtcaccacgctgggggtgagggtacacccccagccccgccccacagagcattagcagagagctctgcttttctctccatactttggactctgtccaggccgaactcgtttggggtatgctgtttgtttttactcttgaccagagcggtttctttctgttcttattgcttgtttaattttctcatttatatgctagttgtcaaaacaatgaattagtttgttagtctcctcagtggatcccctggagctgctttagttatcacagactcccgaatttaatacatctgacctgtttctatctttcattatccttcagaggttcccactgtcacaccattagttagtggggggctctttgccccagctcctgacatctttggatctgactgtccctagtcctcgactgttgcctcctcagagtctggtgtgactccaggttgcgtgtttccagggtcatctcttctcccacactgggggggacagggtctaccagaggtactgacaggcagggaagaggtgggtcggtgggggggaaatattggcttattcttcaaacatgaactcagttcctttggattaagctgtgttgggctgtaactttaattttttcaaaccctatttttaatgatggttcttaaatgctttaatcaccctagtagcccatcactcactagaggtagtggaaaagaaaggattcaggggtgggggtggggggaagtggaactgtttagaaaggctctttggagtaactcctgtctgtgttgtctggcaattggcagttcagttcacgggttggcaggcagcagcagcttgatccacttacaaacagcagcagtccagtttggtagagttgggttagcaatagaggtgacccagcctagcagagacggccaggcctcagccttggctcaagtcagcaggaggaaccaccagaaaccccaggagaagttcttggctgtgcctctcttagggaagtgaggatcagcgaagacgagagacccacagcattgcacacctagctgtatcagcaagccaagctctgtctctgtctctctgtcgagtcctattaataccttccaaacatcatgtgtcctccatgtgccttgcctcagcacgggcatccaatcagcccaagtcctcagagtcaaatgtagctcaactatgcagtgtaaggcagaccaatacatgcgtgttgttagcaaagcatccttcatcatgtgtcctttcatgtgcttgctttagcagaacatcctctctcctgtgtctgcttcagtgaaacattccttcacgagtctaccttagtctttcacctgtgtccacttcaggaaaacactccttcacgtgtttaccccagcaaaacaccatccaacacaactgactctccaaagaacccttacatttccttgggcataacaatggaacactataggggtttctaagtagacaaaccctaatttgcaagtgtgcctaaaagctaatatttgagctgggcatggtggcacacacctttaattctagtagttgggaggaagaggcaggaagaactctgtgagtttgaagccagcttggtttacatagcaagtttcagaccaattaaagatacacaatgaaatgctatctcaatagcaacaaaagcctcaagctcaaacaaaactcaagaaaccactccaaaaacaaaaacaaaaacaaacaaacaaataaaaccccccaatgtttactagtattctgttggtggtaagtcacaggacttactaagagtccagaagatgggcatggataccacgggatatggtcccgtgggccaccagaataaccacagatatgtatcctccacttcagagccaaacaaggcgtggtggggaacagaccttcctggcatagcttcctggtcattaagccctagaggcagagctagtgggttggggccatagggaactacttaatagtgaaacatctgctttgtaaggtaatgagcttcccatcatgctgagtcctcaaagattccctccttgcaggcatggtggcaatccttgcactcgggaagttgatgcaggaggctagtgagttcaagatcaccttgggctgtttcacagcaagactctatctcaagaaagaaaatgaaataggaagagaccatctgagtccttgaaaagattgtcatttatttgttttaaggaccacctctctgggctgcagaggattctcatttgcaaagggagctggactaaataatggataagcttcctttcaattctaagtctatttaaagcttccctggaaggccaagaatatttgtctcacagatagcaaattcacatgttaggccacttgccaagggctgggcatagggactgtagtctttcaggtgggaaatattcagagaggaagatttagggctttagttagtttccttgggttgagagccaactctgtgctcttactgattgacagctgcatgaaggtaagaaggtgggacttcctgtcttgcagaacaagcaatcaggaaagtctctttggccttgactagaaatgtccaaacttggagcaaaacaaacaaacaaacaaacaaacaacataaccaaacaggtaggtcccaccgagtctctcagtaggcccgtcactagataggaggcagaggtaaggctaacctcccacctcctccccaagggatctggtccatcagagctcttctcttgtgttcttgagatgacatgagttttgatgatactagttttgatgacataagtttttgtgtatgctgttgttttaaggactaaatgtcaatgacttataacccacctaagagattctacccggaaaaatactgccagtctccatacctactgctacatacaaagacccaggggttagagactccatatgcctttgggatttggtaatggtagccgaggtaagtaggggcaggtagggcaggtccaggtcagcttggcacatgcacagactgcactttggtttggtatagtcctggggagtgtggtgcttctgcctagggtggcactggtctacctgaggtagggggatggctggggtagaagttagtatatgcaaagccctgggttccatccaggtaaaggtggtgagaggcctgcaaaccaatgctagggtggcccttccttaggggtgaaggtacgggtcctctgggagatctgattaaagaatctgtagctttatgccataccagcagccagtccctgtctgtatgagaagactggtccctctggtctaaatccctacttggatacttggcagtaggattcaggaagaactctggtggtctccagttcagataatcaatcccagaagacaacagatccatccctttctacctggagatgagacagaatgggcagtccaggggagtagtaccctccagtgagaagacacaagctaagttccatacctgttttctgtagccctatggtgttccaggataccccataacagctcttattgccatagatctagccactggaaatgacacagactggcctaaggctggttttataggcccagagcctgaacttagctgtttgagactccctcaggttcttccttattcgatccatcccagtgtctcttgagttgccacacagagttagctgccactgcattcctcttttggaagagactacatccaaggtccctccaagtgtgagtgagctcatatccaagcagccttgctcagatctgaggtcaccagctcctcagagaatccctgcttcagggatctcagcttctctttgagggtagctatctgattgacaggtccagccaggacaatcttcttgagatggactcaagtgagtacatttgagatctcagcaatacctcctttgccttattgtacaagttacaacagcctgaccagctcagagcagggtggtacaggatgtgactgttagggtgtgggagtcctgaggcatctaggggtatattttccctatctgttgtgaagaatccaggcactgatgccctaaaccctggctatctgtgacccaagacacagtttttcattttactccattatagtttcttcctaggtgttggtcaaggtagctggagtagggattgaatcgcccaaaggaggcagtgtgttagtactatcagggccttctcctgaagaagtgactggatagacaaagacagccattattagttggtcaaatgtgtttgggtgtttgaaaggctactcttaaccactctgtttagaacatttagatgcattccacaggagagcatctcttgtagagtctaaggatcatccctctacctcctggcacctcagagggcgaatgaccagacacttacgatgctgttttgcagatatttggtacgaagagcatcgtcctatctcctctttaaagggttaataagacgattatggtagtagggtcattaccggagcattccctaggggccagcacagtgtttagcttctgtgatgttctccagtgggccttagagggcaggtactattattgccccattttggaaatatagatactaaatctctgagaatgtaagcttgggccaaggttataaagctggtgagtggcagaggtgggtccttcctggaatgtcagcaccaatgcagacagaatccattctgtcctcagtgttaggtctcctgtgccctctacaagttcaggacatagctatggttgggactagctatggctaggattcccaagaatgtctcaattgtcctgaggggtgttaagggttctgggaacggggcagaaagagctatccgtgagcatcctggctacctgtgagcatcctggctacccctgagcatcctggctacccctgagcaccctggctacccctgagcatcctggctatccttgagcatcctggctacccctgagcaccctggctacccctgagcatcctggctactcctgagcatcctggctactcctgagcaccctggctacccctgagcatcctggctacccctgagcatcctgactatccctgagcatcctggctactcctgagcaccctggctacccctgagcatcctggctacccctgagcaccctggctacccctgagcaccctggctacccctgagcatcctgactactcctgaacatcctgactacccctgagcaccctggctacccctgagcaccctggctacccctgagcatcctggctactcctgagcatcctaactactcccgagcatcctggctatccttgagcatcctggctacccttgagcatcctgactacccctgtgtaccctggctccctttgctgcatagcagcacccttcccccaccttgccaagacacagaggtactgacatacgtgctgggtggttaagagagaaacaaaacaacctacgccaggaactagatgctgagagaccagtctgtggtgcctgccagaataacagagctttatgtccccatgtgtcaccacaggaagccggggaccacgcaacccgtgccagagcagctggggctagcttgctgcctcatgaggtaggagaagggctggggagctgtgttggacagctcaagctgctggtcagggatgctggttaggggctgaaggacccagtctcccagaggggctgcagggccaggcttgaatgtagctcactaatatgctagtctctgctgagccatcctcggtgacttgcgggtgccacctggcacctgttgtctcagaaatctttgttgttgctttcttttcttatttttcattttatttttttcagtcagggtctcaggtatcccaggcaggtcttggtcgttctgcatcagagaagatagtcttgaacttctgatcttctttccctcaatctcccaagtgctgggactatgggtatgtgctactgtgctgggcttatgtggtactggggtcaaatcctaggctttatgcatgctaagcaagcactctgctgaactatgctctcagttcttcattgcttcgttttataggatattgcttgtgccactgttgtgtggttgtacatgaaccactgtctactggatttacaatcttccctaaatgcccatttgtaccaaaggcttggtccctaacttggcactacagggcagtaatggtgcctttaagaggaagacacttgtcagatttgttaggttattaggggttatgttcccaaagaggactgtgggactccatcctctctgttctctttagccagtatgccccccaccacagtctccaccacaaggggagatgtcagggccaatggatcatggactggaccctctgaaaccacaggccaaaataactctgtttacagacttagtgcctcaggtgttttgctacagtgataggaaactgaccaacacaccagcaatgaagttagaattctgcaggctccttatccatctcaaagactgcttccttggaagctactacgatcttgatcttcagcctttggggcgcaggagaaggatggcagacacttccatgggcagggcctggctagatgagctgttttctccccctgccaaacaaattgactcattgttcaggttttcagtggtaattacagagaccctcacacttaatcaccaccaggtctaatcaagagagttggtctcaaggatgcttgagcattgattacagcttaatagatttattaggagctaagtgggccagcaagtaattggctgagtgaggctagcttgttatagaaaaggaacagaagctaaaagctggagggaaaaaaaatgggtcagggtgtggcaaggtgagactccaaggagagtgggaagaggacgacgggcacgcagagtgaagtgagctcgtggagctgtgtgggccctggggtaatcaattaccagctaaacggggtaacaagctgcttcgtgatcctcccgccatgccttccctcagtcacgatggatggcgggttagttttttcttaaactgtaagtcaaaatgtgaccttcgtgccagagttgctttatgtcaggcgtttgatcacagccaacggaaaagagagcaatgtgcgctcaaacacagcagctccgttctgtctgctcgttctgcccaattagcatctggaagctgtctctcccattctctgggctggtaggtcaagaagagtcctcatctcacctcagttcctgtgggcacgtgacctgatcctcactagccgtcctcctcacttggctaagaggtcttctcagctgatatagtcatactgttggttttaaagcctgggctctcattcttccattaagaggagggctgctctgtatttaagtctgggtgggtcgctggttgaatgcctaagggagaaatgcagaaggatactgtgtaacttttggagaagtggcggtgatactcattatggttctgcagtctctactctcaggatgactcctctcagcaagttctcgcttagaaactggcggccatattttaatgtaaaaacctccaggtcacgtggacaatggaggtagcatgaaggactacccctggccaaccagctttcaaactctctccctgatgccactgaccagagaatatttttagaagtggatcttgtggtcctcactgttccagccaccagccatttgagtttcccagctgcagatctgcagacaatggagggagaaatgccgcctctcttatgttctcaccgtagagtatgatcattcaaaacaacaaaacaaaaacatacaaaccaaaatccggccatgtcaagctgatcaattcgagggtcacttgttacattgtaggaataaatagaacacgtatgaggccctatgtccacttaaaatgtcagcgattcccagacaataaagtcctaattcctctgcccgcccccagcactaacctgtttcctacccaccttagcagctccaggcccagctttactgcaggtctggattccccctgctatcataggctcccatgtgttggcacccacaatggctctgtctgggtgtcacaaagatagccacaggaaattggggaaatagaaatctatttccctctctgggttcattttcctcagagacaaataatgatagagggaacccaaaagagatccaggtattctgcgaattcatagaatggaggttagtttcgggatctttagatgaaatgtcatttatgcatatgggttttggaaagagatcacctgctccacattatcatggacgattatgctttaattgctccatctagaaaacacagtactatgtagtgctttgtacagttaaggcaggcattgaatgtggttaagagtttgggatgctgcccaacagaggatgctgtgataaacatttaaaataaaacatacctacaagtagtttctgttggccattaaatcttgacctgcatcactttctgggaggggctttagtgactgataactcccctacagttggatgcatgggaaggtcccagtcccagaaccttcgaaccttcagcatatcccagccaatttgtcactggctctgcggtactatcattgtaatgactacaatcctgcaggctaccttgtagacttaaaatatttatctatttagaagtgtagtcttgctcaagttggtcttgaatttgataggaagagagcctcctacctacacctctcaaggatgggattgcagccatgaagcacgtgccccgctagaggaggtcattttcatcggagtagatgaagggtcttattgaaaagactgaattaggctcttggtttggactcttgccaagtctattcgcttattcccaccggtgcatcgttaacaccagggggcgctgtgggcgcaccgcatcttcaccaggtagtcataactggcccagatgtcccgcagcagcacactggtcagggcatggttcccactaccagctccgtggctccctcaagcaagcattcctttccattttcgtttctatgtgtgtgaacttatacgtgagacagtgtgtgtgtgtgtgtgtgtgtgtgtgtgtgtgtgtgtgtgggcgcgtgaagggaacatctcttgcagacatgcatgggtttataaagctgtaagctatatttctcgcttccagtcctatcagcatctgtgactcgaaacacgttgctttttctccgtgactcgaaatgcaaagtgtttctaggtttcaggcttcaagcgtccctagcccccacctccctagcattaaatgcacactccagaagagagattcaaccttgaggcttttccaactgaatcagcctagtgcacgcccagctctccaggaccttgagtgaggttctcagttcacctgtgctaggagggtgaggcacatccatccctctgggtacctagaccaccagcatccttgcgctctccttgcgctttcttcccttgctggggtctccattgctggtgaaccaagggctttgcagagaggtgtggagggggcggggaaggggcccggaggggaggggcgagggagcgctgtcacagagtgtcacgctgcccctcccgccctccgcccggagtgggggcgtggagcgcgggagggcgggcttctccgccagcctcgcagcacccggagcgcactggcctcctgagaagggcgcatagcgcgctgccaggagcccgcagccggccgccgtctgccctggtgccccgggcggctgcagggttcctggagagcgcgtccagccatggagcctttgcacaaagacgccgagaccgcggcggcggcggcggctgtggcagcggcagatccccggggggcatcgtcgtccagcggggtggtcgtgcaggttcgcgagaagaaggggcccctgcgcgccgccatcccctacatgcccttcccggtggctgtcatctgtctcttcctcaacactttcgtgccgggattgggtaagaagtgtgtgtgtgggcgacccttgtgacccctttaacccctgcggtccctgcgacctgggctgcctgatggagaccaggcagggcagaggtaggcactggctgagacccgtggatgtgtccaccagcttcaggctgtgctcccacggttggtatctagcaggtggctgaagcctgtggcgtgggcatcctagagaagaggtaccacgctgggggggtctccgacccacaagcgaggtggccaggcagagaagagctatgaaattgacagagaatcttggagtcccaagcagggacccgacggctcactggctccaggctaggctactgtccagaagagtggaatcttggcccttcttccccatcaagtgcgtctgtgatccctttacttcgggaggagaggaggccgaacaggaagaactcagggctgtgatggggttgaccaggctccagggagtctgggaagtcggttgagctgggggaagggagacacacagtttcaggagacacactgcatcaggtcacgctttcacgcggtgcagagcctgtggaggtggcagttctttagccagagtctcttttcctggtgtccgcttttctgcctgacacttcgcagtacaccgacggaaaggggtgattttattattccgtttgcatgcatgtgtatttagactgcatgtgaccagaagtgagccggtaagaaagcgaagagtgagccttgataagtctgtattaggctctggctgtctggacacaccccaaagccactgctgtcccaaaatagtgcctaagggtgaataaagttaaagaatgagagctttcttgatcgcctctctccagcacccatctctgcctgcatgcccttcccccacttccaacttgatctcctgccacgggtggaccctgcacacgagacggaggcgccctcctcggcagcgtgcagggctgcagaagcaggcatcctatgcattcttcagagagcctgctgctgccagccagctagttgcctgcacatggttgcaaagttcccaaaagcagaggtcaactagaagtggcctttcctttcactttggcctttctcacggccttgctcctggagggcccagcggggacctcatctgtggtgattttgaaggccacgcccactcaaactggacctgttggttttgcctggactcttaagtccaggagggatgctgtgctgcggagtcccatctgagtagaaagtcagagcctttaattgggcttatcccctgagtgaggtctctagcagcctgcctcaccgtccaagtcctcaggcaaactctaaactactgcagggtggcaagctgctgttaatttccatgtgtcagcaatgtccacccactggagtaaagagagagcacctgtctgtctccctgagaatatcaaggccacaaggcacgcgcgcggggtgcatgctgttagaattataagtgttgaaataacaacatcctgacataggctttgaggaaacaaagaattaggtgggcaggagagcactgaggcgctgctggagacagaagtgagcttgtgggaagccagccccaggaggcagccagggccactggctcaggatgcaccagagcatgtcctccctgtgaaacaccagataccccgagcctgctgccatgatcacatctactctgcttgcctctaaaactttaccccacagacctagcgttctctccttcacagctccatttgtagatcagaatcctgtgggattctttactgataaagtacacacacacacacacacacacacacacacacacacacacacccctttctaagaaacttggatagaaagagacaaactacccaagaaatatgaaatgtggaaaagtgctttttcagctcaggcatttttcagtactcacctcggttgctactgcatagtttcctgggggtgcaggccttggcacctacccacaaggagtgggagatcccaggctcttggtaggttgggcttctgatctgtaagtctgggatgcttggtcctttaggagactgggttgatggaatgtgagctgtcaaagcacaaggctgatcacagaaaacatgctagaaacgggtccatggtgtcctgctccctgtgactctgtctgtctttctgcctgtctcgtctcttctctctctctctcccatacttctttttactttttcagataaggttttatcatgtatttctagctatcctggtacttgctaaggagcccagtctggccacaaactcaaagcagtactcctgcctcagccttccctatgctgggattatataccaccacgctctgctttgcctcgtttgtctcgttcctgggtggggtagctggcacactggcgcctctgcttctgagtgctcctcatctctgtacctgcagtggagtcctccacagaccacacaccttgagagtattttttccttgctacctccactgccctggctagggactggtttgggtagtcccagctcctggaagtcctctcttggctcaggtctgcatatgctaatccttctggcttgctcaaagctcgagagccatctgaatattcagactgctgcttctgatccatctagccatccactgggccaaagcaggcctcgcccacccgcgccaggcactggggatgtgcagatgcatcaagcagccaagacagtgcctgtgtaggagaattaatataaacggaatttgctcggtgttaggagggaaacagggacatagagttttagcagtagttaattcttcctggggtggggttggtttgttagaggattcttttgagagaggtagttggaaaattcattccgtggctccatgcattcctcccgctccctacagcatccactctttagaaactgctcagaccactgacacaaagagcctttctttctgctggaaattccctttcttgcaagttccttctttttctcttttctttctcttcttttatcttttcttctctttctttttctctttcttcctttttctttttcttttttctttttttcttttttgcaacaaagagggaaactgaatggaaactacccaccaccccatgttgctgggtgtctcaggaccatcagtctgtgagacctgccccatcctttaaaccctccaggcctctctccatcatgtggtgtgtcttagtcagggtttgtattcctgcacaaagcatcatgaccaagaagcaagttggggaggaaagggtttattcggcttatacttccacattgctgttcatcaccaaaggaagtcaggactggaactcacacagggcagggacctggaggcagaagctgatacagaggccatgaaggggtgctgcttacaggattgcttcccctggtttgctcagcttgctttcttatagaaaccaggactagctcagggatggcaccacccataatgggccctcccacccttgatcactaattgagaaaatgccttacagctggatctcatggaggcatttcctcaagggaggctcctttctctgtgaagactccagcttgtgtcaagttgacacctaaaaccagccagtacacagtgttccttggagaataagatcttgccataagagcaatgctccctgcttggggcatgcatgggaaagagacatgacttgtaattacttcccatgatcccagtgaaaacttatttatttattggtgatgggatggtgaggagagacagcttcatcttagttcagataaactgttgataaagatgattgctagggccttcgtgtttcaagaatatatttatggaggtcatatacataatcacacccatatattcccaggtgtaatgaaagttaattgtgtgccctgagatggtctgaaaacttgtctgttaatgacacataagtcatcattatgctgccatatttaaaagttattacctgctgtgagttggtgagatatgaatgctgatgcttcagagagagagcaggtgacagggaggccttgcctactgaccattaactgctccatcagccccaacgttggtcgttaatctactgaccgtcacataaacatctatccctcccgaactcactgcttatactcagacaccacagaggtcttccttccagcctcgggtgggctcagtttccagcgttctcctttagcccaaggctcaaagcgatgcccagtcagcccccaccttgcatgtcatctgtaccgatgactttgtgctacctgtttgagaacttatatgtgctcatctaaagaaactgcaaacccctcgagagcagcagctatttaacattttctctttgatctcagatgctacgagtgaacaggccctgacaacattatactccctgagtaggcgttagggaacacctggtccagcacctttatataatacgaaagtgaaataggcctgagattttgagaaccaggggtgtttatcttctactcctatctcttaagggagttccttgaagatgcttttccagcagagtcagggaataaatgaaagaagaccttattggctcttggggctttaatgagacagaggagggagacccatctctcccttggcactgagctagtgttaagcagtgctaataagttaagatcacaattggctttaatgataaggaagctgcctgcttgacagctggagaaggagctgaaggatttgagagcacctggctagggcatcagaaggcagccaaggcagagagaaggcaagggaaggcagcgagccgagactaaagaaggataaatactacacaaggcggagaaggaaaactgcagcgggcagaagtttcagagtgctgtaaagtctttttcgctttcctttatttaagttgttttttttttttttcaagacagagtttttctctgtagccctgggtgtcctggaactcactctgtagaccaggctggacttgaactcagagatcccccctgcctctgcctccctgtcctaagattgtaaggcatgtgttgtcactgcgtggcttgagagttgtagagtctttagggacaaaagtcttggggacttccaagtcaagagctctgacactggcttgtgttaaaggctaaataaccccaacttcctaggtctaaaacaacaacaaagctgtatgactgtcaagggctgacttctaaatccccagatctatacagaggctgcaacacttgtagggctaaggatcctggtactggagccctggatgaaaattctaatgggaagatgctatctgtggctgcctgctgccaaactctgagtgtgtgtgtgagtgtgtgtgtgtgtgtgtgtgtgtgtgtcgggggttggggtggcaataaaaactgcctgtgacacagttgaagaacttctccttgcttacttacagtttctacctggggtaggacaaaaggacctcacccatctggttggtagcactacttaggccagccagcaaagcaaccaagagatgaaattattcagcagtctggaagacagccagtattcattagaataggaagggtagagagccccattaaagaggtctctgagggtgacatgaaaccacaacatttcacacggtagagactattactgagaaagcacaaaaaaatttaagattctaatggggaaaaatactgcaaacaagagaaacgaaggtaattagttggctcagtatcgtggtttatacctgcaatcccttcttcactcaggaggctggcacaggagaattccaaatttaaggctgagccacattagcaaacaagactttgtaataaaaacaggaagaaaggaggaaatagagaaagaagggaaaagacagttggtaattgtagtaaattaaaaggccatgcagaagcgttaagacccaagtgtggagatacctgctcagttaattcagaagtcctctgactacagaaagaagaggaggaggatttccaacaacggctggaaaagacttccgaggctgttatcaggggatgtgtcccataaggcatgtttctccctatcaatgaggaaaaaaaaaaaaaaaaaaagagacaggcagtcagaaacttcatgagaacaaaccaaatccatgtcatgaactaaatactgattgtctgaagtgtggcccacttgtgagtaatgtaagccatagactgttggaagggatcgtctaagcccatgtggtagcatccttggtgccgcgctataggttatgggctttttggatctagagtgggagtgtttgcttggttataatgatgtaaatactgccttgtggagttcaccttctaaaatcaacagcaccctgcagaccacgtgaactacccacagagaaacctataaagactttccacctttataatacgaggtgaaaaacagcccagagaagctggacagcctaagaggaaagatgtggaaggctggaggtctaaaccacagcttccaaatcttcatcatgaaagaaagttgcacagtcttgcccagtgccatagggcttgtccgcgtctggtggaggagaccaccttctcctctgcccattggcactgggctttatgcatgatctgatttgtgccattgcatatgagtggaagcaataatctgtcctgaacgaatcctgtaagaggcgctgtgagattgtgtcctcagtgtccgaggctgagtcccagcactagtagggtatggctagtgagacctaagttggaactaaaccgttgttagttttcatcattactgtcctggatcatgcaccgaaactgactggcaggtagaggagagggcagaggtatgaatgccgtcaccacatgcagtggggagtgaatcgatgctttctatggttgataggtgaatagcgggtaccagggtgaccacaagataaagtgcacccgcagcatggtgggacgacagagcggtggtgggatgctaggatgaagtcagaacaagaagaaagggaggttcgccaagctgatttcatgtctcatagcagaaggccaataaatggctttgtctgtaagggataaagccagaaacagctttacacatgctcctcggagactagggagatgaagaattggcatcatcgtttttctcctgtcttctggctcatcccagcagtgtatatacatgcagaaattgtgtctcatccttcaaagacagacttttggttatagtctgccttgggctgtcttatagttctgtactctcttgtacaggaaactctctgaacctgtggctgtctggatttgtggtctccactatgttttccctctttctaaggtttttgcatctgttacccacctagctggctctcgtaggactcactcttctcctctaggttgctgaatccaggggccaggtctgtgcacctccttcctggacccaccagccttggactccgtgcttattgcctgctccttgaaaggttttcttcatttggcttcgtgttcctttttcccgtggatccttcattcccttagctcctctctgcaacctctggatgtgggagttccccagggcctccatcctgactttgatcttctttctcctgcccacacttgctgccttggctttaaatcgcaactccacgatgataacttccaagctcagagccctagataagcccttgcttcaaacttgagagtctcacatccaacccagcacctccctcccaaaccacaaggaatcttagacttggcctttgcagaaaccaatgcctgctcttcccccaaacctgaatgtcccaggctggaaccagggctcatccttgccccatgccccctctcacccatacctgctcctgactactttcaaactctataccggacaacttcttaccatcctctagactaaaccaaactactgtgagagctgtgtgtgtgaacagtgtatgtttgtgtacacatatgtgtgtgtgtgtgtgtgtgtgtgtgtgtattatgtgggggtgctttgtatgtgtatactctctgtgtgtgcacatatgtgtttattatgtggggatgctatgtgtgtatatagtctctatgtgtgtacacatacgtgtgtattatgtggagatgttttgtgtgtgtgaacagtgtgttgtttgtgtacacatgtttgtgtgcattgtgtgggggtgctttgtgtatgtatagtctctctgtgtgtgtatattatgtgggaatgctgtgtgtgtgtatacagtgagcacagcacgcatgtgggcattagagagccacacaggcatcagtccttaccttctactttaaaacaaggtctctgttgcttttttctgctgcacacacctgactaagtggactgcgaacttctgaaattctctgttctccacctctcatctgctcataggagccctgggttacagaagttcctgggtgctccctctgtgcccttggcttttccgtgagttctgggaatctgaattcaggtgcttgctctcacagcaagcgtttttgacccattaacccatctcttcggcctgttggattttgcaaaagggtctcactctgtggtccaggcagggttcccgagccacgacacttatttttgacagcttctttagaacatatttccttcattttatgtatatgggtgccttacctgcatgtatgtctgtgtaccatgcttgcagtgactgcagaagccagaagagggcgttggctcacctgtgactggagttacaggtggtcttgaaccactaagtagatgctgggatcaaaccaatgctcttaacccctgaaccatctttccagcatttgatggctgcttaaatggtcttctttccttcacggtaagcccttactagtgtctcttgcagtctgttctcaacatatcagctagattgattgtttgtgaccaaattagatgactccactcttgttttcaaactcccaaaacaaacaagcaaacacacacacacacacacacacacacacacacacacacacacacactcttaaaccaaactaacccccttcccaaataactcccacagcactcagtaaaatctcaagtcttgttataatttgtacaaccctaggttagaattttcaatggaacattataagaattttataggtctttaacaatttctggcacctaaagtacacaaggttaaaaaaagaagatacatcttaacaatatatttcatgtcatatatatacatatatatatattactatcatttcaatgtatatagacaacactaaattatcggtgagactttagtgtttcttttggtgtgtaagaagttttcaaaacctgacaaaatctagcatgtgttttacacctgcagaatttcaagtggttgtgtaagctgtgctcatgtttctttctgagatatgacttggaaactaactgtagccaagggcagatactgccaggaacatttcagtgatgagtaggcaacctgccaagcaaggaagttgatttgctactgcctttcaaacagacctgtgctgtgcacctactgtgtaacagctttgctctttggagccagaatccaaagacagtagatggataccagcactcaggagctaattgtctccccaagaaggaaggtcaatagatcagattggggtgtgtgctctcctgagggtgggctgcaccctaattgatagagtcagcttcctgggaaacttggagacttggaaaaggagcagcagaagactagtcaggaggatcatgagtctgaagccagtctgggctgcctagtgggagcaatctcaggtcaagtgagcagctcacctagcctctctgagatagtctgcctgcctggcctccctactgatcatcatgctttgttaacaagaaagaaaagaaaagaaggaaggagagaagaagggaaggaaggaaggaaggaaggaaggaaggaaggaaggaaggaagatgctcaatggttataaatgccattatccattaatgtgcatcaacaaagcatcaaatttgttctctaggtcactgaagggatctttctcagactgacaccagaactggacatagcatgtaactggcgattgtacctgtttagcatcttcttcccttgagtctcagggagccaagacccgagaattccatctgggcatttgtgctagtcagctttccgccattcattgtagcagagtacccgagacaatcagctgacaaagagaataggtttattttggcccatagtcttggagttgccagtgcatgctttgggactgtggtgaggttccatcacggcaggaacacgtggtggagtcaagttctcacctggagagaaaaactgctcaaaagagagagaaaaagaagcctcactccccccgcccccaagggatgatgtaagatcctctgactaggctaagggttcatactgactaagctaatggtttcacggtgcgggccacacttttgacacttgggcctttagagcaaggtgcaaactatagcggtacctgaccagacaggccacatccagtatgccagggcaagaagagccaagagtctccagggtttttttaaacaaaccaagaaggcatctgtgtgatacttccatatccaggaggtgtgtattgaggctaactttacaatttgtcaaaaggccatggaagcagtaaagtggggctcactttacctatcacacacacacacacacacacacacacacacacacccctacctctgtagctatgcctatggttattttgctataaattcgaagttcctgttcctgtatatatttaaaagtcctagtttgagcatccttgaggatgcactggtggtggcatggtgtcttgaagctgtcggttggggttaggtgcacctttggaatggaaacatccgtatgagaactgaactttactgttactggctagacagagggtttttttttctcaaatgggatagggacaatattttccccattagaggttgaacataggactgattatacacctgtttgtatgaaagatcataaaaaagcaacttttcttgaaaaggctaagaggacacaagaccagggtgaccttgaacatgagtgggtagtaaatcaggatggcccttgaacatgaatgagtggggtccatggccagggtgctctcttgagctgagcacttcattaatttcattgactgagaagtttgaccttgaagcaaagggcgaatttggtttgagtggaggacatttatctgtggagaaacagatacagataaaagagttcaacttttctcaggcaacggaactagaaggctttctaacttattccatttacagctgagaaaagggaccccactttctccccagtgctcatttccacttcaccatccatcaccccagcctcatggttttcctgtgtggttcctggagggtcactaaatatgtgttaaattaaggaaaattttgaatataagcaccatggacagccacacaggcattggagcagcggaggatggctaagccagagctgccagcaccttcccgtctcattttcatacctcagttccctgcactcagttgtcgttgctcttcttagtgtatcagcgtaaatgcttagctacattaggacacaatgccactcaagtctcttgttgaacacaaagcatgtacatggcaagggaacaactctctctgattctgcccttggccctggtcagatgaatgacgtcatgcaatgtgagcgacaccaagaggccaagctgggggatgggaaagcaacaatagtaggaattctgtgtggtgggttaagcacatgtccacccatgtctcaactctgatcattgcgtcttccactctgaaaccctcggtaactcctcatcattctccgaactaagttcatgatccacactggacctcaaaggtctaattagccccatctgttctgcctctacctcactgtctagccttgtacacaacccacatgtccatctcaagcagcctccttggacttcaccatcccttcgaggtcagctcctctttccttggatgggtctgtcaatccactcgagtcaccctctgcctcaaacgctggttcttttgtgaccatcttaaccctctcctgtgaaattgtgtcattgatatgtgctctactgatcttctacctcctgtgacactttctgctcctccagtgagtgtttgcgatacctttacagtcttactatatgttgagtggagtaggcctgctatagtttggaacaagtgtctctcagaggtcagaggcttaatccccagcctgtgatagttttaagaaatggttgaacccttaagaggtggggcttagtgggaggaagttaagtcatggggacatgccctggaaggagaggtttcaatctcaaccacttcctgtctctctgcttcctggctgccaaggggtaagcaactttacccacctcaggctcccattactacaggtgctgtctcatctggcacaggcctaagagcaaaagacagagccaaacgaccacggtgggagtccctgaaaccgggagccaaagcaaaccatccctcctctaggttccactccagtcaccctcatgcagttggttatggcagtgaagagttgacaaaaacagggtccttgctctttcaacctagtatgcccttattcaagaggcacacatttccacttgcttctcagtcttcctggactagagtaaagtaggttagcattttcaaggccctgagtaggggagggtgaccgaggaaatagcgtgagactgtacactatcaaaagaggagtgtggagctaagggtcatgtgatttgatctgtgggtgacacactggaggccactgcccaccatcaattgtgttcattgaagttgtgtttctaaccactgataagtgttcaggaagtggaggggttggtcaaccttttaaaaaattactaccactactattgcgtgcatgggcatttttgtctgtatgtatttctgtgtaccatgtacatgcctggtgcctgcagaagccagaagaggacgctgggtcccctgaaaagagagtcacagactatcatgagctgtcatgtgggtgctgggaataacacctaagtcttttagaagagcaattggtgttcttaaccatggagcaatcttcccggctctgagagggtcaagcttaataaagactgggaaacagacagtgggaagtggtgttgagcttgtgggaagtggggactgggcactaatgtgtgtgaggcgatggaacgtccccaggatcctaaaaaggagagtggcggtgcttatccaaccccgcaagtacactaaaagctgctcaattaataacagaccagatttatagtatgtgaaagatagctaaagctgcttaaaggttaatgtcaccaagtaaggaacaagtagacatcccaggcctcctgatgccaacaccacctttgagtaacctgagtttattcaagaggaaatatcagacaaattaaaactgaatcatgaaaattgtcataaaagtactaaagaaatttaaagacgtgacaacaagccaagtgaggtggtacacacgtgtaatcccagctctcaggaggcagacacaggaatattgatgcaagtttgaggctaccctggtctacacagtgataggcaagagtagccttggactagatcctgtgctgaggctagcctggtctatatagtgataggcaagtgtgttgccttggacaagatcctgtgttgcagctagcctgatctacacagtgataggcaagagtggccttggactaggtcctgtgctgaggctagcctgatctacacagtgataggcaagagtggccttggactaggtcctgtgctgaggctagcctgatctacacagtgataggtaagaatgttgccttggactaggtcctgtgctggagaagaaaaggattccagtatggaccctgagaaaactgacaaaccgggggcacaggccatagacttgataatctattaatactaagcatcctaagttctataattgtgctataaatttttaaatgagtatccctgttgtctggaaaatataacaatgtatgcaggcacacagggccatgaagtcagcaacttattcataaatagttaaagagaaagagggagggggtgctggaaatgtaccttagttgatagaacacttgcagagccagctccaatacctggctttgatctttagcaccaaaaaacattgtgatggaggtggaggcagcaggatcagggttcaagttcatcctcagttctccagactgtccccctaccgcaaggaagggaggggggagggagggaggaagagaaagagaacaaggaagagaaaggccaggtaaatacagagaaatgttaggtattggtaatctgacagagtagacagtcacttagtggtagtttcccagctctggaaaatgcttgaattttttccctgccagtttgaatgtattttaaaagaaagaagtttaaaaagttacgtagctaatgtctagatgtagccagagacattgtacctaaatcccaaattctgtccttactcagtcataccttctttcttagcatccttgtggcatgacactggtagcatttgcccacatccccaaaggagattcccctggggcgcctaccattacagttctatggacacatgatgttcagggttgccactgttggggagtctgaggtgcccctctgcccatcaggcttgtcactctgacaagtttcccatcatgcaacggtggtgcacaaggccagatgccacttggtggcctgataggtcttttgggaccaatcaagaatctgatgcttcagccagaacagggccagctgtcagtagctcaccatcatcgggatggctctcttttcttggttattctccatctcatttggagtccaggagtcattcatgggtctcagagaaaccagctcaaaccattagtcattggctgtgccaggccaagcccaggcgctgtgagccttcgacttggctgcttacaggggtaacttggattgaacacacaaaaggaatgagtccaggaatcaccctgtggctgactcaacagagaaagagtaaacatgaccatcttagggccaaactgctaggcttctggatccttctacagaaaggttggcggcttcatgccctgagctcagaggtttggtctggccagaggcctgtgtggtcctggctttgctgcccacaatagactgaggctgatgggtcctaaggggctttagagctttgggactgacttgcactggaggctaaggagaaagagcagcatcatggacttgttatgtattgatactgactcacttaggccggtggttggctgggccactacttttcctgtggttcaagactgttttagaactctgtggtgggttctgatgcggcccaagacccatgtctaccatgggttgggatggacgtcctctggggaggtagactgactcagggaagggaggggtggatggttctattcccaggggttgtttccggttcctcatttcagtttttatggtccctccagggactgccaccaactgtgaagggaaatgatcatgggaaagtgagaaggcagtatgtatagaaaccaggaattcgctcttccaagttacctggtctccttgctgctctggcttggggtattctgatatatcatgggggttagtctggtcttttgaaacttctgtgtgtcttctccagcatgtgacccagggcagagccccaaatagaatccagctattcctgctgacatgatgacctgggcaatgtgcctttgagtcgaagcctggcttcttggcttcctgtttcaactctgcaataagtgtacgcttgccatgatggtgcccactgtgcctggtcccgctttttttttttaagatagatttatttatttatttatttatttatttatttatttatttattttatgtatgtgagtatactgtagctgtatagatggttgggaaccttcatgtggttgttgggaattgaatttttaggacctctgctcgctccagtcaaccccactcgctccagttggccccactcactctggtcaacttcacttgctcagtccctgcatgctccggcccaaagatttatttattattatacgtaagtacactagctgtcttcagatacaccagaagaggtctcagatctcattacgggtggttgtgagccaccatgtggttgctgggatttgaactcaggacctttggaggaacagtcagtgctcttacccactgagccatcttaccagccccctgccccgctttttatccatttgaggtgggggtggttattagtcctgctttcttgtgtgtgatgagatagttaaggagataaattcaggtccagaggtttctctcttcgtgcagccctgtgggagctcaggcccctccttgacctttctcatgctttcaggtcctgaatgcatgagaagttctaacctcacagaggttttgagaccagggaatgggcttacactaccttctctgtctcctcatctatttctaccctcttatgactctgcctgctctgcatctgaagttttcctctggggcctgtatcataccactccttggctccatgtcttccaaggaaggtctggaaaggtgtaggagaagaggagagaggttggggtttgggttttgtcttaaggcttctattgctgtgaagagacaccacaatcaaagcaactcttataaagagaacatttaactgtggctggcttacagtttagaggctcagtccattatcaccatggtggcacgcaggcagacacggtgctagagaagcagctgagagttctactttttgatccaaagacagcagaaggagcctgagacactttggccacattgagcttctaagagctcaaagcccacctccacagagatacacttcctccaacaagaccacacctcctaatagtgccactccctatgggccaagcatttacacacgtgagtctttgggggccattcctattcaaatcaccacaggcattttttatttcctctgtctgtctgcctggctatggccatggcttgtagtctacagctccaccccagtcttctgcccaccccttcaggcctaggtacatgcgcttttgcattcttgcctaagctcctccagtttagggtttgcatctcacatgctgcaactggaccaggggaccctgggctgccagccctggctcacactgcannnnnnnnnnnnnnnnnnnnnnnnnnnnnnnnnnnnnnnnnnnnnnnnnnnnnnnntttcatgaagaagttggtttccactttcttcctcctggaagctgcaggaacagtcagctctggagcccgagcctcctgctgtctgaaaagcgtgggtgtccagcttccagatggctctcggtgctcaggagatgccatggtcccaggtgggctgggaagagactgactctgggaaggatggtcactttagaaggtgcaaataggactccccagccaggctcctccccaggcagtttgaatcctggtggcttggctctggcagctctgtgccacctgctccagttttgagcatcttcagccacaaggcttcgacttgatcttcttgggagtgccaatcctttcctttgcctggagcccccactttggaaggtgcaacatctgcttgaagaggtgctgatgctgcaagactgttgttcctcatggcaggtgaggtggaaggaggcaagtactcgctgcatagtgtactgcccaccctcaggacccaccattttgctcgcttgcttacccagctattggttctggtcttggagacccagtgcgggatgaaacaaggtttgctcttccgcactgcactcacaggaaagcctcccggtgtttgcctgtagggttcccttgttatgagccaagttatcacaacacgcctattgcgttttaaatcttagaaaagacaccaaaaattagcgcatcttttatttaaaagcatcccctcccccttcgctagccacatcaactgcatacttaaaaagcaaagaggttctgactgggttcttatgaatctgcccccacctccgaccccttcccgtgtgatttgtgggcagacttctgagatgaacaggttttataagagagattcagccgggctaaatcacagtggtggaggcttatgcaacctgctaaaaacctatgagttaaaaatggaatagtcttgcagaatagggaaggtaataatatcagtgatatgaaaatagaaaggacgggatgagtatctcagccattcgagtctcttagccacatttcctctgcaccaaaacactttggtcccattttccagaataaatccaaagtccaatcttttactggaaaagccgaactgcgctctatggagtcagccctctgttcccaattaatccagagttgagagccctttcctccgactttccaccatcaaacaggctgcgtgttttgtttgaatccatgtgttcgttaatgcccataaaggaacagattttagattttttttttcgtaagtgggttttggttaatttgctattttaaaaatacttgtgagacctttaccgttgccatggtgatataatttccataaacatgatttttgtggggagttttgcacattgaaggatgaggttgatatgcagtgttggggggaaagtaggtggtaaatttggcagccaccctgtgactgtttccctcaaatgctacaaatacgttccaagaatccgtgccacagcagggtcttaggtctccatagacaccactcacagctatggatccagtcaggttagaaaaatagggtgaaagttcacagggtttttgctggccacttgacctgtccgggtcatgattcccgagttttccccccaaactcttaggtttcagaaagcctttggggacttagtctggagccatctgaggagtgaagcctcctttccactttgagcattttaaagaaaaagaagtttgtcggaagagataggtggtcccagtgaaacaggctctgaagttgcttgtgctaaaaaatcgcttagccctcacaagggcctacagagtaaaaaggcagaggggaagcccggccctgctgtcttgaagatgactgtgtctcctttcctttggctcagactcctatttgaccatcatagacgtggtaatcactcagtgagggcctggctgccttactggcctagttgctcttcagggctaaaggctcagaaaggtcatgtctggaagattccaggaagaccaaagcctcctgggacaggcccccacctcataacagggtgttctcttcagggctgggggtgaatcctagggcagcaacactcctgagaaacagagttttagggcatctttggactgcttagaagaacttgtgggaggatgatggcaggaccataccttgaccagagcagtttaattatgtatcttcctacctcttgctccaactcttcctgttttaaaccccagagatagattttgggtcgctgggcccctttatctgtctctcttctcgatgtggccatattgggtaaatctcctctttgtgactgatgcgttgttcttgtcttcaattggcatcttggggaccggtggccaagctcagcgtggtggggctgccaggactgaggcttttgatctaggaactttagctataccaccggcactaggtggcaacatcatttatcaatagcgccaggcatcagtgccgacttacagagaagccgtgttcccaggcatgaacaatacaaagatgtggaggggtggagaggggcaaagaagaaaggatttgaaaagccataggaactgaaagtgtctgcaaagtacaatccccacaagggctctctcgagagccggtcaggatttggctcagtgctgcttaagtgagcacctgggcattgccaaagggtctgaatcattcagaactatgactcataaggaattatgaattactagaaagtcatcatgtggactgttattttgtagtgccaggaacacaaggagggccacccagaagaggaagtgcaggatatcatgtctggccaaacatgaggtgacgtgtgtgtgccaagcgtgtgcaggtctgaacatatctatcattctatctgtgtttaggacaactgtgtattgggaactttgtacatattagaaaggtgcatcacaccagtcttgtgacatgtggccttgttcctcacacctgtgggaaagacccacaaccatcccctgtacagatggccgagacagtggtagctgctgctgctgctgtgtgcttcactgaggtggggttgttttgtttttaacaaaaattgatgaatgagagatgttaggtaggattttgtgcttccataacagtgaatgaggcctggacagggcttatttctggggtgctctggcatgcaggtcacaccctaggctcagggagaagtgatttctcctgcttacccacctgtccagctgtcacccctggcagtgacttgtcgagggcctgccagggctgctttgaggacttcccaggcattttgtttgtgctctaaaatagcccagagtaatttggcaggggcagctgcaggaatgtggctcaccacccagtccagggtggaagtgggaaccggtgcctcgcccgacacgcagctccagcctttccctgcaacacacatctaattgaaaatgttttaaagcacccatagctggcagcttgactggggctggtgggtggccagaagagagaggatcctgctgggtgaggacagagagcgtcaccctgcaacagggcctgcctgcctgctgtcccctctgaggaccactgtttgggctgagctgtggagaggatcctggatggaccgtggacagtttaaggtgtgaaatgtcttgggggaagaaagccagctggtgtattctctgagaagcaagaaacagaaacaaagccacctaattgctacacagaggaatctgctaggcaacattcttagctggctccccagcgcgggcggattgatggtcctccatcaggaacccaggtcgctggggtggggtaggtatgttgtgtgcaaacaattatgtgtgtccttccccaaatcctggtgatctttttctggatattttctttttagctggaagaacactcaagctggcttgcactcgaccacatgatagctgtgtgatcttggccaaatgaccttgatagctgtgtggctttggtcaagtgacctatcccctttgcatttcttctcttttttaaagtttttctacttgagcaatttttttttctgcctccaggtcccaaaggttgtctcatatatattctagaagtttgatagttttaggctttataccatttctatgtgtgcctcagtttcttgatctgcaaaatgaggataatagtacctatttctttggaccctcttagaatgatttgagttattacatatgtagtcctagaatagtactttgcatacagtgtgattattgtacatgaaatttcactgtggtaaagtcacttcaactcccctggtctagttccacgggcctgatgctatctgaatcagtaggaccactaaactgtgggctggtcgagtgcaggaggggtcctcttggcctgtgtctctgagcttggtgccttgcctggcttgaagcacatacttagttcatttggagtgataaggatgatgtgtgatcttatgctgctgacctctggcctcaggcacatcagaatcccctgggaagtcaggcaaatctcctactttcaaagatgctgatcaggaatagagtgagctgtggtctccgcagtctggaaaggatttcagggggcgtcagtagaagcttggacttgggaaaaggaagtcccatggtgattgcttctgagagcaacttgcctttgtgcctcctgcttaagtctgtgtccaggacagcatgggtgagtggggattcacatgggagcccttgaactcactatgatcaacccagaagatccaagccttccaaggcaccaaggatgcaagtgaatgtttgaatcaaattgaacatagaactccttggcaaggggtggtaaggtctgccatcttagaaatgcaagaagccactggaaagacggagccatgtctcactggtccatcagagtctgccccagcaaggcttcaccacagctccaggctgggctggcccacactgcttgctccacctccttgaagatcctccttctcaagttcccgcaaacagagcattcgttggagtttccttgaggtttaaaatgtggcctttggcaaggagctgttcacagaaactaaacagggccatggagaagactctgtggagttgagtggggaggaatgtgcttttctagagcagtgtttaaagatgcagctgggatttgtttcttagcaacagggctcatccaaagcacactggcagtgtcagaacacccgacaatgctggatgcccgcaagcaccatgtaaaaataataataataaaaaaagaaagtactgaacaggagccaggggctgagcacaactcctccaacaggtgggaaactcagagccacggacagacagatgtagatgctatggggtgagtctagagcaccaggtctggccacactctgccctccttcttctgtttgtccatctgtccgcccgtcccttcctccctccctctttcccccattcttcccacacacaggagcttccctcttcttcctccctccctccnnnnnnnnnnnnnnnnnnnnnnnnnnnnnnnnnnnnnnnnnnnnnnnnnnnnnnnnnnnnnnnnnnnnnnnnnnnnnnnnnnnnnnnnnnnnnnnnnnnnnnnnnnnnnnnnnnnnnnnnnnnnnnnnnnnnnnnnnnnnnnnnnnnnnnnnnnnnnnnnnnnnnnnnnnnnnnnnnnnnnnnnnnnnnnnnnnnnnnnnnnnnnnnnnnnnnnnnnnnnnnnnnnnnnnnnnnnnnntcccttcctcacacaggatatcccttctctctgtgaacattaataagcctgcctctcctccagcctcatctttcccagcccccgaggcccattcaaagggcctttgagcccgttagcctgaagacaggggagcagttaggaacccacagtcatttttcttagctccattttgcaccatcagatccctttaaggtcgagtcattctcagaacaacagcgttgtttaaaaatacattttaaaaatatatctattaggttggcttctcaaaacgccccagtgatatcaacaagcaattttcagtgccagtgttaagcacgaagccccagccccgggagtagtgacaagtgtaatgtgaagtagtggcttgagggtgctctgaggctgtgtcgctgtcatgggagtgcatcaactctgtccaggcaaaagcccagcctgctgtgtgccctcacagcaggaagagatgcttcaggcaaggcagaggttagtggcaattgagggatttttttttctgtgtcacattgtagatcgtggctgtgtgcaccaggctacccccttatagctatttcctgtctccatcctcttctttccatgtcctggaaacctgtgcttctcgcacacctgcactgttgtgtacagacagacagacaggagcagcaaggcagacacaatagatggaatcgagtgaggactatttcagcttctgtaaggacttgtcagggtgccattcagtaagccccgtgttattcttcacaaagagaattcacagcgcaggctttctcaggtcaaggccaccgaaaagtcatttgaacttgaaaaatatgagagctcttggagagctctttgaaaaaattttttttcagctttgatccccaccccaccccactccaccccattaaatctactcacttatttaacaattttgatatgcacctattaagtgtctaaaatgtagaaggttctcgactatatctagggtctacaaggatattcttaggaagctgagcttcggtggacaccagggaacctaagatgggaccatgaccacaaaggctcatgctgaagggaccagtgagtctaagtctctcacttcatagatacagacactgaagctcacaggtaggaatgacagatttctcagggaactatttgattagcatccttttggccaggagccctttgaaatctactgaggagccaggacatctgaacgtcgtcctcaggctgcgtctgagctggtgatgcggcaggcagggcttctgattcccagagggtgtggatgtcagctttctcagtgagcaagcggactgtgggagtaaggcacaggggacaagcaaatagagcaggtgtggacaaaccctcccgcccagtgacagttctgaacagtgccaagatattgtccaacagcagggtgaccttgcaggctccgtcaagtatccaggctccccaccaagggttgccagacttcccaggggctctaggctggacagctcctagctgatcaggatagggtggctgagtgaccatgaagagcttggatagagagggtgagaggactggcaggcaagcagccagcccttgtttctacagcgcctgccagggagacatgagagagtcttttggtgttggccaaagtaccagattccccatgccatggcatttccaagaggtgggggtggggggtggggagtggggggagagaaagaaatagcatttaaaacaacaacgacaacacaaaacaaaaaagccaccagtcatttctacagagactgtgtgctctgcccagcctcttgtgtcccagccctttggctccctaggaccgaaaatgttaaaggaaattgtgctggattcatgctccgccctctcagctgttgcttcttgccctaataggaaacatctcagcaagttctccccagggcctgctgtggcatctggctgggctggtgcctgtctggggctgctatctccatcccttccctgcttgcttggattgctagaaagagaagcccttggcctggcttacaagcccctttatgttgcctcttcctggcaagttctgcagcgtccgtggcagagccttccctcggactcagtgggcaggaataaggctgttctgtagatagactgatggctgtcttagtccaggtctcagaagaaagagagatggtgatctgtggggctgctggcttagaaaccgcaggagctggggggagtccatgtgtttgtgagacacaactggggccaggggagggcatgtattaggggcatagtcggggtaggaactaggagggactctcaggcttggagaactgttgtgggttaacagtcccagttgcagtgttcatgcaaacccttctcaggggcctctgtaatcagcttgctactcacaccaggaaagatgctgcctgtgccctggactactcgacgcctgaccctacctgccctggggggttggaggtgaggtggcgtagagtcaatgacacagactctgggagcaagtgagaaactgcagcaagctcatctgagtgctgctgcaagctcctttaataccctccacctgagctccattcatcccaagaaagcatctcttctgaacagcagttcctgattggctggcattctctgcacgaacaatccttggtctctcaggcagttctcaattaggtcctcctgtgggagatgcttttatggctgcgcccctggcatttacatagaggtgccccccccttattccggctacagaaaggactgttccttgtgtgccaaaagttgaactaatgaatccctaccccaagagaaatttagtctaattgagattatacctcttttatgaaagacctacctctccctggagtagccagggagcagtgagttgatgggcatccaaaggcctgggtcagccagcttcctgttgctataagaaacatcctagataaaactggcttgtacagaagaatggtcatttatttagggttcataaattcagcctatggtcagttggcccatggctctggtcctggggcacaacactgtggtaggagcctgcttcagaacaaaagtagtcacctcttggttaggaaggaaaaaccaagaaagaacagacggcagccccctgcccccaattcccttcgaaggcgtgtccctgatgacacagggccctatttgttaaaggttctactacttccaggaacaacaagctggggaccaaaccttcaacacatgggcctttggagggaattcaaaagctaaactagcagggtgttttttaaaaagttgtgctaagttggtggatataacataaattttaccagcttaactaattctaaaaatttttgtggtgtgtgtgtgcgtgtgtgtgtattgtcagttttctccttccatctttatgtgtgttccccaggttgaactcgggcaccccactgtcctcctccaccccagctctggtcatatacagcaagctcccttaccgactgagtcatctctccggtcctaacgtaaccattttttaagtgcacagcttcgttgcattaagcacattcacacttgtgtaaccgtctctgccaaccacctccagaacacttgcatcttccagaacagcatgtctgtagcccttgagctgcagctgtgcaccccacccccaccccttgcagcccttggcggctacctgagaacagggcggcggagtccggcagctgccttctgtgtgcctcctcgatgatgctctggaaatgtcttcttcatgagctcctgttgaatgtattgcattgctgtctgcattataagtggaagcaggctttgccttgtttcttaggtagccatagcttcatgctttccagatgccccctgctcttctaggcacccagagcctcctttagtgcacataaccacatgaagaggtacagggtattgctctcattttcaggaagaagggcaaaatggttgagtaacctgtccaaggtcacacggagaggttatgtgacttgtccaaggttacataggtagtgtgtggcagagccaggttcaaaaccaagcaggtcattcttgcagcccatgcaggggatagagtgccacttcctgggattgatttttagccagggactgtcctcgctgtggccaggtacactgatgtcagcaaataagagaacagaaagcaaaccaggcatcagaaagggctccagaccacagggaagcctggagataagaccaggttgtctcacgaacaaggagggctctctccaccggccctcagttccacactatcaatgttaacacacacaaacacaggcatttacacacaggacacacatatacacacaagcacacatgtatacacacaggcacatgcatacagaaacaggcacacactaagaattacttaatggctggatgatcttttttacttgtttgtttgtttgaagcaggatctctcactacatagccttactgtcctggaactcactgtgtagactagtccagcctccaactcataagacatctggctgcctctgcctcctgagtacagggattaaagatgtgcaccaccaagcctggctggttagacaaacttaatgaaaaacttccttagcttccaggaaggaaactgagggtgcctctggaaccccagggcagtttgtcaccagtggagcaggaacaaccacaacttaatctggttattgtgagcacagtgagatcatggctgcttgtcggcttcccagaatgccttagcatcttcagcttgtctcagtatcatggccgtatgtgcttcaaatgtctttcttccttttggtagaacccaggggtttacgcatgttcactgagttcatcaagttcctttctcagttattttcacaaacaatagtcttaaatgctctcctagcaactcagtccccttacaaaaagccagctctttctgacaagtgctgaggacccacctccactaccttggagtggcacagaaggaggtggccttgctcaggtgtgtggggtataaacatagctgctcagggaccctgccttggaagtcagggcagatttccctcttgtttctcctggtcacaggtgttgactagacagggtaatgaagctagtcttccctctgcctgtccatagccccatggggaggaggaactgaggaccatggaaaaggcctgcagctctgcctgctgctactgttgctgctaatgcccttctgggtagatatgcatatccttgaaggccacacaccctgagtgtttgtggtggtttgaatatgtttggtctagggagtggcactattagtacatgtggccttgttggaggaagtgtgttactgtgggagtggggtttgagactcttctcctagtcgcctggaagacagtctgctcctggcttcctttcgatgaagatgtggaactctcagctcctccagtgccatgcctgtggggatgctgccatgtttatcgcctcgatgatggcctttgagcattcagttcttggataaaagacacacaactttttttgttatagtaatccttaaccagcactagagctgagcagagatctactctgtaagctattagaatctattttcccattattaacactgaattataatttgccgtgttccgtctgggctgctctttattccaagtggccagttctccagccatgcttctaagactcacctaacccatggcagcttccttctctcctcctccctctcctcatggttctcctcagaccccaagcccacctgtctcacttcatcccagatataggctgtaggcatctttattcaccagtcagggggaacttgggtatttgtgcaaattctctcatccttgggggcaaccaggcctcggggccaatatttagcattacaatacatagcaaaagacccaacctcaacaggaactcaggttctcttgcatgacagacagtttagctgctgaatcatcccgttggccccaaccctgggtttcctatacccatggacacacacctgcactagtgtgttccatctggcccatcacactgcattactttaggttctgcccctgaagcatacaccatgcttgccagttctttgagagggaagatgctggtcctaagctcatactgtcctctgtcaaatatcttggcaataggttgaaaaaaagacagcattagacaccagctcagtgatataaggcaggggagtgggatgctggactagctggtagtggctcaacatgtctgacacggtctggaaggctcaggcttgcttgccgatagctttgctgggtttggagacttgatttaatnnnnnnnnnnnnnnnnnnnnataggctgtaggcatctttattcaccagtcagggggaacttgggtatttgtgcaaattctctcatccttgggggcaaccaggcctcggggccaatatttagcattacaatacatagcaaaagacccaacctcaacaggaactcaggttctcttgcatgacagacagtttagctgctgaatcatcccgttggccccaaccctgggtttcctatacccatggacacacacctgcactagtgtgttccatctggcccatcacactgcattactttaggttctgcccctgaagcatacaccatgcttgccagttctttgagagggaagatgctggtcctaagctcatactgtcctctgtcaaatatcttggcaataggttgaaaaaaagacagcattagacaccagctcagtgatataaggcaggggagtgggatgctggactagctggtagtggctcaacatgtctgacacggtctggaaggctcaggcttgcttgccgatagctttgctgggtttggagacttgatttaatcggtggattcactatgtggtggctcttgtatgacttttcctatggatatatgaacaaatatagacagtgcactgatgaatggccaaagaaataattccattcaagtccagtttttgaagtggtgggcttatcgggcttccccacaagaagcattgcttgcaagaacacggagaggtggggtgcagggggggcttcagaacagttataacactggaaagtcccattgggatagatgacgaccgaccacctgaaagcagcttggaaggagtcattccctcagataacttctgccctctgtttattctagtgcctgccaagccccggtgcagctggggggaggtgcaggagggagtggctggagtctcagtgagggtccgatgggtaatcacagccactctcttttcaagattgtgatggccatgctacacatggatataggatagtgttctatgaccatgacattactagaaagtggtagaaacctgtggtggaggnnnnnnnnnnnnnnnnnnnntgatataaggcaggggagtgggatgctggactagctggtagtggctcaacatgtctgacacggtctggaaggctcaggcttgcttgccgatagctttgctgggtttggagacttgatttaatcggtggattcactatgtggtggctcttgtatgacttttcctatggatatatgaacaaatatctacttaccttcgacagtgcactgatgaatggccaaagaaataattccatccaagtccggtttttgaaatggtgggcttatcgggcttccacacaagagtgtgggtgaggcattgcttgcaagaacatggagaggtggggtgcaggggggcttcagaagttataacactggaaagtcccattgggctggatgacgaccgaccacctgaaagcagcttggaaggagtcattccctcaggtaacttctgccctctgtttactctagtgcctgccaagccccggtgcagctaggggaggtgcaggagggagtggctggagtctcagtgagagtccgatgccagccctgtttctgtgaagagtggtaccaagggcaattttgttagtctctgtgggtaatcacagccactctcttttcaagattgtgatggccatgctacccatggatataggatagtgttctatgaccatgacattactagaaagtgatagaaacctgtggtggagggtatggattggaggcggtaggtcactgggggtgttctctggaagagacccttgtctctgcccaccagcttcctggataccatgagtagtcctaggctactcccctaggcctccccactgtgatgctctgctttcccatgagcccacagcaataacaccaagcaattgtggactcagacctctgaaggcaggaaccaaaaggaacctctctctgtgtccccactttataacacatgccatcacaatcggacatcaactccagacacgagattgctttgtgtgctaggctaggtgctaagaacacagtggcgtaagcaaaatattgcacgctcctctcagggagggcagcttgctggctcttagagactgtgtaggcagttagataagctacatgcaagggagaaacttagggtagagttctgggtaggcaacaggagttgccagccaggggactactgagggtctcctgaagaagccacactgggctgagacaaagccagtgggaagtaggtgtgtgtctgtcctctgagcagggctctaggaaagtgggaagcaatatatctgtgtgcaaatgcagagtcctgaaggcctctaggactccagtcagatgccacacaactgctggacagccacgtgacctgacacacttcctcctttcttccttcttttcggctagcatctacctagagatacccaatggagctatctattgctgccctaaattccatggtgtgaacattttcaaaattctgggtgtcagaaatttgagcatgagggcatggtgcggggtgacttggtggcagggttagtacactcatcaggaagtgtcctctcttccacgtgtgctgggtggtactgacttgggttgtcacaagacctctcaaatctcatgagggctagtgtgcatcttcacagcatggcatcagggttgcgaaaggtactagctttccgaggcaggaaaatagcctgtctcttccatccctttctgttggtggcagtcagagggcagcttcaacaaaattgcccatcttcacagctaataaccttactggccaagactgactatccataagaagtgtcaatgaatctggcaccatgttttaagatattaatacctcacttgggaaaaaaaagttaaggaagatgaaacatgaatagtttctgtgctagcttttctgataggcttcctctttgagtgtgagcttcgctgatacacagcatcatttagctccctctctataacccaggatgccttaggtttttctcagggacctacctatgcttgctttgtgcagacaggcattgtaggtaaagctgagccacatctagcttggaggacaggcttcattacttaaaattatagtcacattcttccatgctaaaggttgatttagcatttttgtgactcacagactctggtctgcgtagctctcaggagtccaggttggaatgctagagcagacacgctcttctctagacatgtagtatttggatgtgaaaactggaactttggcaattgcttcgccaccatgagggatgttggccctgtgaaaagcacagaattgtggaacagtgatggaaagcactaggtttataatgagatattggaccaagggattgaaccaaccctgaatgactgttaataataagaaaacaacccattgctaagcacttagcttgctacaggcactttaagtgtataatccctcttagtcccttgctctatctgcctgggtattattcttctccacatctttccagggagaaaaccagccctgtaagatttggtggagtgaagacaggggcttgcccatgctcacacagccagtgaatgctgaagtcagcagtaaaacttataaccaccaccccatctgtctttctgggctttcccagtaattcactggaaaattaaacccatttcagttggttatgttcaaaataagggtccctgagggggaacccttccctatagtatgggatactctggtgttgtgagcaacaattccatttcatgagtctttcctatgagccctggcaggaaactgccctggacactgggatatacgtgggctaccctctagggcaccgtgcctggaaagagcgaggcaagcctgagggagtcatcagtcagaggaagaacacctgagcctgggctgcactctgcactgcttctgccctttctctctctccctggtcctcaggaggctgaacagccagctcagctgagtcaccttcctcttttgttaagtgaatagaatccttagaatccctgcattgggtgcacaagcctggtgacctggatgctgcagggcaggggatgctgcagggcaggggatgctgcagggcaggggatgctgcagggcaggggatgctccaggtcaggggatgctccaggtcaggggatgctccaggacaggggatgctccaggtcaggggatgctccagggcaggggatgctccagggcaggggatgctctagggcaggggatgctctaggtcaggggatgctccaggtcaggggatgctcctgggcagaggatgctccagggcatggggtgttcctgggcaggggatgttgctggttagggggtgttcttcaaagctctgggttcttagtggtgcttggagtccttttcaggacccctgtgattttctgtcaggtgtctgtgtttcacctgtcttctcacttgcttggctgttacagctccttctctgtagccaggaagatgcataccagtgcgggacatctttgtaaagctgaatctcaacaggtgcttgcaactttttttttttaattttctaaaaagagtatttgttttggggaaaaaaaaagaaaagaagcctcagccgtccttccacagtaaaggcagttttccgctttgtttaatacatgcctgtccctgtccacatgcataaatatttaaaaataatctcctcgcacagtatgtggtctatttttataatctcgcttaaaaggactttcccatctctctgtgtagccacgatcagacttctccaagctgcataaaacttcgacatatggaggaaaccaagcttcagtcttcgtgaaacggaccccacgaacttagcagttaaagtaatttttaaaaagggtccgggaaaatagcacctggataggatgcttgttgcacaagcgtgaggatcggttttgtttcctcaacctcacactcacagaaaagccatgtgcagccgcacacctctccaaccccagtgctgggcaaagacgggtggatgctcggggctactggctcaccgtctggctgaaatggtaaactctagattcaatgaggggtcctgcgtcaaaaaaaagatcgtgtgcgacagagggagacacccagtcaacctcctgtcacacttggggtctcacagcccatctgtgggtttggaccctggcattccagtgcctgactcagtactctgtaacattgcattctgtggctctctctctctctctctctctctctctctctctctctgctaccctgtgaggctcttgatagccaggatgctggccttctgaaacagcatccatagttttgcccttttcttggtccccagaagatgctatataaatgttagctgaatccacatgggggctggcatgagctgagtctggtttttaggcaaaggcaattctcgtttgggcagcggtaaaccaccaactgttgtctctcacatctctgctggctgcaagtcagagagcaacaagctgcagtgcctgtgagctcaggaggaccccttcctgtttctgttcatagacaggaggcccagaggatcctgggggcttgtgtggggctctctgtcccctgtgaggtcctgcatccatcatgggcagcaatatgagcacctcagcaaaacccagtcatctcctaaagacctgagtgctgataataccatcagattggagagcaaggtcacaacgcaaacctggggacaagggcacaagcattcatcactgggaagcaacttcacacctgggattgcatcttccgggtctggtgttgaagtctgagatgttgagttgagttctgttatgatctgtcatgtgtcagctgtgtcccccccccccccccaagcctctgctgtgaccagaggaaaggcctcagggcacactgctcttttatcttggagtgtgtgaccactatttcagacacccaaagacagttccttccagtttgcctagagatcagccacatctaaccttgaactcccgtagtgtctgacaacgctggcttgcaaatgctccctcttgggtggtggggacccagggcccctgctccttctagagttgataagcaaattaatacttaataggcatttcataatgttacttatcaggcaattgaatgaatctcagccaccagcccacatatcttagtctaacccagctgtcaaggactgctgttaaggaaaaagacaggcctaggctccattttcagcatctctagtgctcatgggagaactggacttcatcagcatccttcatgtccttggtcacagaaaggctcctggcagctgccagcctgggtaaggcccctctctgcttttaatctcactgcctctccatccgtggaaatgtcatctggccaggttataaattcttaggcaatggaagctgcctcctccttttcggcaaatgtcactgctgatgcatcccccactctttcacctacctgactgtcctcagtgagagacatgctggatagggatgagagcagagctgggtgctttggggacttcacactgctttacccctcctgcccatgccctgagccctctccccacgtgtcctgtggtgctggagcccaggatctgtgaggagcaagactcagtgctaaaggactaagacactctgtggggttaaacttctgcccatgcctaatatcccagagagaccctcagggagacctcaggtgtgtggctctgctcggcagctcctcagctccccacggtccctccaggtccagagatggagcaggaagggaggttgacggtagagatttgctaagctcagggcagctgatgcaatgccagatgccattaaaattaatgaccagttccagctgacttggtctccagcgggacaatcacccttaagtcaaggtggaggcattgagaagggtgaggtgggggctggtctcatctccacagtccttgtcctcaggaaggaaggtcagtaggaggagagctccagtaggcatactgagatgagtggtgtcaggggatgctgatgcccgcatgagggtgtggtatctctatgaggacatcagtgctctttttgcaaaactgaaagctaaccataggcccttcctaccactggtccaggttgtaggtatcaaacgtattggtgattttgttctgaagaaccttgacgttgtcgagatgatgatgtaaggcctacccatgcttacctcactatacacacactgactttctatgacatggtcttgaaagttccttgctagccaggatgtgaagctgtggacccaggctggttctatgaagtgctctctgggtgaacgaaatgactcagtgcagttctccatagaagacacagctgttctctaggctgctgctagccttgggacccagggtcttgaccatgctaagcaggcattccactataaacccacatgccaatcccagttgggtcctccaggtctgcctctgccctgtcaagcacagctttcttctcagatagtgctccagggtgactgtcctgagaagctaacaggctatggccagagagggagaggctgttagcttctaaggccaccctgaaccttgtccctagggtttttattcagaaatgctgtcccctgtaaattctctttcctttgggcttcccttgatgactggctaacacaatctctctttacctcattctgccctgagcaccaggctattgttctcagtggggcttatttctcgtgcatgcatttgtgcatgcgtgtgtgtgtgtgtgtgtgtgtgtgtgtgtgtgtgtatgtgtgtgtgtgtgtgtgtgtcttgaacttccaaataactatccagtagggtcagggctcccttaccaccttctttctgtccctcagagcttattttcagagtcaggcctagaacatgggcggctatgtccaaccaagtgatggaagtatttagctgtgtcttctatggaactgcattagtcattcattaccaccaatacaacttaacgactgcagaaccagttgtggggcacatctggggtcaggcctgatttacagcctagcacctaggagtgtgttttactgcagcgacagaacagcagcttcactgaagggcagaggacggtcctgccttctctaagctccaagagtcagcaagtgctctcccaacccaaacccagcgccttctccagctcccacgagatgcacacgagaagccgaacccttttctagctcccaggttctattcttgtaagcactgccaccccctcttctagaggggtgactgcgtggctcacttctgcctcttctcaatcctgacagaagtgggggaggggacggaaggcaagttctgggaactctgtccagagagtcctttggggacttccatgggttgcaagaggggagtagagggttattcctcttcccattgcctgcctcagacctgcatcccgagttccttgggggaggtggccacagacacctcatcaggtggaacggtagccagagggattgtgtggcatggcatgtatttgttgtgactctgtgggaaggccttcctcaggttgctcccacccacccatctctgtcacagccacggtaggatgtgtggaacacatgcccaggcctacactccaggtgctatgtagcacaaacttcagtgcttggtggtagtgggttatcattttgctgtgccagttgatgtggtcacctctggaagcagcatggccaagacctgggccctggagcagcattaacctgcatcgtattaaaaaggccagaaccatgggcacttgagttattgataaggttgagttctctatgtgtgcgtgtctgtctgtctgtctgtctgtctgtctgtctctgagcctctggatctctctacctctctctcatgcttgtgcatatggaggccaaaggaaaaggacaggcgccctgcatgttcttcacactaaacctgaggctcagtgttctaggctggctggccaggaagcacctgggatctgcttgtccttatccctgtcaccccagccccacaactctggaattgtgtctgccagggatctagggattccagcttgggtcctctcgcttgtgagcaggaggtgctcttaccctctcagccatctccacagtctggttggacagttgtctgatgttgtgtctctgcaccccgagtactctcaagcttagtggtgcatccgcatcacctgggggagtgtttgtttcctgtttatttttggtgtcgaggatggaacccaggtcttcatgcacgatactcagccatatcctagcctctgtctcgtgcttttaagcaagcagttccccagggtcatccctgcgctttcagtgagagattgaggcagagcttggtggcctgggctatagagcataccctgtaggggatgaatccctactttagaggtttcctcggcaggaagaaagaagggaggccacagttacagaggtagatggtcaacaagaacccacagtgactgacaatgaaggacgaaggtggagtgattcacggctatatgattatcacgacgtacaaggctttccgcctaacatggtagcacacacctgtaattccagcacttgtgaggcagacatggggaggagtcagggtaggcctggctacatgagactatctaaaaaaaaaaaaaaaaagtcttctccattttgtgtgtgttggggagttagttgcatccgtccagatacatgcttgcaagactgtgtgcttatggagaggccagccacgaaggctggcggcctgagttggatttctggattttacttggtaggagagaatggatttctcgcacactgtcctttgatgtctatacgcatgcagaggcacgtgcttctccctctaataaataaataaattaaataaaaagaaaaggcagcgtaggtagagagagggtagcgtgtgttcagcacactgtaatggcatctgtgttactctcgccttaatatttctcccccacacatccggttcctctcccaccatctctttacatctgcagggctctcttgtataacgctgtcagcctgtgttcctctctctcctcttccatacacacgatgcttcaacagcagcaaaggacggtgccatgtgccctgtactaaagtcccctgtgtccttgtcacttctcaagggttgcagggtcacagaaaggcacactcttcttccagtgctgctcaaacccaacagccctgccgagagcgactcactctcttaattttcctttcccatgacatacatttctttcttgctcaaagcttccttggggctctgatttctgcaggttaggtagagccatgccccagtcttcaccttcaccccatccgcttacccgtgtcactcagctccagtgctgtctaagctcacacctctcccttaccaggtaaagtgggtctcctgccccaggtcattccccattccttctgcaactctgccaagctgttaaccttcccgatggactgtgagtctctctgtagcacagcaggcaccaagggcagggctgagttagtgcctgaggcaactaacatggacttgcaagggagtaatccccctgcctcatgcatccagaaaggagagcccttagccacagtgtgcccttgctagactatcctttctgtgaggacaagagtttggtcctgcagttcccatagtactgccatgcgctgtgctggtgtggtccaggccagcttcctggttgacacactccagtgactttctttattccttgggatggagcaggggagcttgtttgacaagatttctgggcacttcaggcgttcaaggctgttggggaacctggtcgctgtgtctgtaacaagtgctgctgctgctggtgtaaggtctgaagagactctgaagaggcagggttgttcctttaatcactgcaaaccacctgctgtgtgagccttgctagtggtctgagaggaaaagaggtgatggggtggggccttcactggggtggcaggtgagatgaggaggagggcaggggtaagaaatcagcagcaggactcccagggcaggccagagtaaggcctgtagcctgagagtcggagccatcaagccgggaaatggggctggagaccaagttcagtgaatgggcaacctcagtgccttcaagggcaggaactgagagaattggggtcgtgagaatggttaccagtctatggctcaacttcccaaaagtctcgatttagatcctggtctgccttcgacaaggtcattggcctctggggccagtgtgggctcagttgtggttgtgagcctggacaacaatcttactttccgagtctctatgtaagccaggatggaaggctcaggaccggcccccaaacctgtgagtgtgtgaatttacccaatgacagggagtctgagacaccatgaagcaggggatcgtgagagatgagattatccaagtgtgtcctcacattaggcaggcacgagggccagggttcagggatgggagaacagcaggtcaaggattggatgctatgcctctggctcttgccacggagcaaggggctgtgagccaataccataggcagcctctagaagctggggcaacaggaaatggtttccctatactagtctaatagccccattcagactgccctgacctccaaagcagaggaaggatgtgtttgtgtggtggaggccattaagctgtggtacttaaaggggtaagactgtagaagttatgtcctgattcttggtcccagcctcatgctcccagaagtaagactcatactcaaaatatattttcaaataccttggtcatatagctagactctcctctgactagaccatagcttaaattaatccatttactctaatctacatcctgccacatggctggttacctgggctccagcaccgtccatctgtacttgtcacatcttccctggagaatctcctgtgccttgctctactccagaactctttctgcctccccaatgtcccaccttctagtctacccttatcctataggccataggtttttaaattgacaggtgatgcatccatacaatacaaaagatattattgatacagaagacactggtgggaaggaagggaagagaagagaagggaagggaagaggaggggaggggaggggagggaaggtgactggggaaagggaaaagaagggatcacctctcagatggctcttcctactacacccctcccctggggttggagtggttgtgggaacatcagggatgctgagactgtccttgctgtagtcctgaactccataggtccaatagtcttgtcccctagcaaccactacataggctgggattgcttcctgactgtccagatctctggaattccccctctgagattggctcctgggtcaccgtatgactctcgttctccagaagccataggcatgatgctagaccctggtagctctgtgtcacatctctgtgtgctatcctcactttggtgacacactgtggctgggacccgagcaagagtgctgcccaagagatgcaggacctaccggctcctctcccagcactggtggccaagcaacgggggaggactgggtcttacagcctccttctgaagctatcccttctggcctctcccaggtacattcgtctcggcattcactgtgctgtgtggggcacgcaccgacctcccggacaggcacgtgtgctgcgtcttctggctgaatatcgctgcggccctcattcaggtgctcacggccatcgttatggtgggctggatcatgagcatcttctggggcatggacatggtcatccttgccagtgagtaattgttggtattttctgagggcacagcgggctggagcctggccagggtgccagaactgtagaggaacctgggaagaacaggaggcctacacttggtgcaggacctctcaccctaaaggcactcatattcttgaaacagctcctaaggccacaccctagtgccatggccaccagctccagagcattttctctaccatgccagtcctgcagggcgggtccccaagggaggggtcctttccagctaagacaccactcactgcttttgccaacgaagcagccatctcactgaaactgggtaagcctcctggcccatggttgtgtgtctccatcacagtttctagaggaagagcagggccatgaactgtcttcacccacaggaagctgtgtaactatgtcttacacatagacctgtgtgagtcttaacagcgttacactacactctttggctgcttggcgtcaaagccttacacattctcactgtcactgaaggtgttcgtgattcatccattgttaatgcaaaatcagtctatgcacagacgtgtttggtggaagcatttaaagttgcaaaatcaaatttaccagagacaaatgatcattttaaaaataacctggtggaatcttacatcagacgtcacctgtcttaacagccgtttcccatacctccattcctgttcctacctcactgactggagacctcagtaacctaggccatgtctcctcagccactttgttctttgtcccctgtccccatctgctgctcctcactgggttcacaggttaaattgccagtgtagaagcaagccatacctggggaggcaggaggaaaagccaagatctggaggccatggaatgataaagaatagtctagaatgatctaggacttacttagccccagtaagagttccttggaaaatgcaggagctttatgcatacacagtgctaggaccagggtcagagagactcatcaaattacctcaccagaaaaaactcaagtgtcagagcctggtggaattcagtgtgggtggccagggcaccagacctgacagcaggtcttctgggaatttagaaaggaagtcagtgggtcagtggagtgtcaggatgtcccataggtaaagctaagccctcagatggcagccagcgggaggaggagcaccaggcagaagtgacgctcttcccctgtctgctggggaagagctgtcagatcaaggtggactgtacagctctgtgacccgcatctgataacccctctactggggctcactcgcggtgctggagagggtcagaacattgcttttaggagagacgtaccaccatttgtgccgccagccactgtgagtcccaaagatagcaccgagacttcccaggagccaccgggtcacttcctcagggacatgtgggatgtctgcaggcgccagatcccattcccagctagaaggcctgggaaggctgtagcatccttacactatggcttgtctgctcctcagcctggcattggagtgagcagtgttgggactttagtaagagggctaatcagctttctgttactataacaaatgcctgtgagaaatcaactttccaagaaaaatgagtcacattaaccttgagttttagagggctcagtccaggctggattggcctcattgttctgaattgtgaccacacagcatttcatgacaggacaaaagccacccacttcgtgcctgggaagggaaggaaagagaagatacaagagtctccatatccccttaaagggaatgccctatgcaagctgaagactcaccattaggagaactttgtacccgggccttcaggggatattccaggtctgccacggcagtgaggaatgtgcccgactgggtctcaatacgtgtgttggtgccacatctgattcctgcagcttcctggtatctagaggctctttgacttccagtggattaccaaccattgaacctatcgcaggcaggacgatcatgtcaaaaaatgagctcagcaccccaaggaacacatcttaaacttgagatgttaagagttgaaccactcttaagtcaggaatcttctgtacctgtcatttgtcccccttcatacccaggaacaaggggtctataccaaagctgctcccgttagacctaggtaagataacataaacgccaagatgtgctccttcattgcctgtctcccaggcttcggacttgtccagaacgctttggtctggtgtaggagtcacaggatgagcagatgtcagggtctccagcccaggcattcctccttgccctctcagctcccttgtgggttggccaggctcttagtagatggaacatatccaggggttctgtctcagcaccaaatttttcaccatgatttttggagactgcagaaggatatcagtctctgcctcctctgccagattcccccaccaatctcaacagccactatctttttctctttttctaaaaattgttctcaccctcaaaagatgaatgcaccacttccacgggatgggctggggttgctctgagcagccatgtttgagaaggtgtcttggaatagatccttagaaggggacagctgcaactgactttgtcccaagaacacctgggtagaggcttactcctactgcatagctgaacaaaaaatacaggctgggtttcacacggcacctttgggtgctaccagaaatacagtatcaaataaaaacttctgagaagattccgagccttggctggacattagaagctccatccatattaataatgagcagcaatgctcatagcagcttgtcttggtcaactggtcagtacttgcctggcagctctctgactgctctttctattacgacatccatagcagacattgctaatcacttgtggcatttgtctcagcataaagctctgggcagtcattaccaattgatcctagatgtctgcaaaatgttttctctccttggctctttcccaaagcatcaggctttgtacgtgtgggtccagtccataggaaggactaatcataaagactagataaagctggactgggaccaaggtcaccggaggatctttagtttgtcacttacacctgccttggctctacttgtccctcttaaatcattcagaatgcaccctgagagcataggctgggatcagggagtaaagaaaaatggataaagacaggaggtgagcaggggtgtgggcgtggctgaagggggcactgatcagacagtggcagggaaacaggcagagttggatcctggccatgtgactcttcactgagaaggctaaccaccccttggctgaagccctgcctctgcagtgtctttggtagagcccctccccattctacatgcccagtgctttgccttgtgttcagatgtgttcagactgtcttctctctcctcttccttctgctgccttgaatctctgctgctgcagtctcccaaggtgagtctgttggtagatacacaacctctctcctgcacagatatcccaccttcttcagtggttagttgttggtggcacttttagcttttctgtggaaaagagtacttagcaaacagctccctaacatctgcaccatctttgatcactctcttgtattgctcctatgcccctaatgggcactggattatcagcacccaagattgacaggcatccatactacatagagagagactcagctggggctcctggtgttccccctcagaccaaagacactggatggaattgtcccagatcagtatactccattatcttagctctgtaatctcacctaatcagattagcactgtctatgctgacatcagtgctccaacgttccccgggaggaataggggtacagccggagccagagcactagtggatctgtgtgagggcctgggtctcatctctgatcctgaaaagcaaatatctcatgattagcaacgatgcactgaagactctgtgggctccagtctcatcctgtcccagttatcctgctggctggacctatggcagacagttgttcccctcctgggcggccaatagccttgcctgtgaacagtagatctttgctgcttcctgtaccaataaggtcctcatagaataggcaaggtctcatgagtatattctggtctggggccgtgttggacaaatcctaaatggaatgtctccctaaccacctctcctctccttcttccttacagggtacaaggatcagggtatcccacaacagctgtgagcctacaggacctgcgggggaagtccagggtcctgtgagggccacgccaggtggctctaggcacaaggaccttcacatattctcttctgccatttctcagattggggtagaaagggagtacttacaaaatactatttattttgggaagcacacctgcttttcttagcaggctccaaggctaacttctctccctgctccagagcgcacaggaggaacaggcccagaacatcagactgggctagaggcaggatagtgccagtgccagggatactgggcatgcttatccaactacacactgaataggcaccaagacctgtcaggctgggctgctgtaggtcacatgcaggtgatcagtcactctcctaggcgtcaggacttcacggaacacttcctctgggtcctcacgccctgcttgaccacatggttccctgtatttgctcggtggtctcccaggggcagtgtcagggtggggttgccagtgtggaaaggccaggtgatagcctagtgtgtaaaaaattcttaggttcccccaggagtctgataacaccccagtgttcgagttgttgggtgtgactttgtgatttgactgggggtagtggggaggtggcacccactctacttctggaatgctactgttagtatctgaatgtttatatgcaaaatgaccagaccaagctatgaatggctgcagaccagcagccctcttggatatatttactatggtctctcgtcccctctcctttttttccccctgacatgcatgtgtttctgaatccagatggtttgttttgaggaagatgatggaatccgtttgttactgtttcttgacatcccagtggagtctgggcttcccacccattgccaaacacgtggatatcactcgagaatcctgtgaatagtcagatgcactgggactcatgaaatgtaaatagccttgcccaagcaagtcctgggggacgttggagactggactgcatttgaaccgtgagacctgcagagtgacatcatcaggttggggactttgacctgaagttcatgtgtgctgcaagaagacgcatcgtgaggctgaagttgttggcggggcatgtgcccctttaagcagcaaacctgggactgatcagtacagagccagatccttactaggcagagcaaacatcaggaagtgggaaggtaccgatatgaaattaagagaaaggccgactcaaactgatggcgtccgggtggctacttacatctctctccatcttattctaacataggaagaactaacatgtgggacagacccagggctcagttcccggtcatgctggccttgagccatcagtgggtccctcatcatctgcctgaaactctgtcacagtgtggccagggctaaagaaaggagccgtccactttctgccttggtggatggaggctcttgaaaagcagctcctgtttctctggggttccaagaccccaccccaccnnnnnnnnnnnnnnnnnnnnnnnnnnnnnnnnnnnnnnnnnnnnnnnnnnnnnnnnnnnnnnnnnnnnnnnnnnnnnnnnnnnnnnnnnnnnnnnnnnnnnnnnnnnnccaccccaccagccttcttaattgcaatctttagaagtccgacatcatgaagagatggagtcccatgatgtactcatttctggccctgactctgggctggctcgcctgccctaccctgtgtctatccatcagtttcttccaaggctgtgtgggaacgagttgtacctttggaacacctgccaaggggtctagttcttcctgtgtttctttctgttgctctgtttgttctcagcccctgtcttggggtacggggccaggctttgttctctccacagcagatcactgctcccaaggaggctacctccggtagcaaagctgtaccagaaaggggactgatgggtcagtgtgccctcccacgatgtccgcccacagcccttcatcccacagagctagtgatgacaggcctggcaagagcggcccccacagcgagggagaagtctatttccctggcttctgctgggggtggctaccgggggagttggaaggagatggtaatttgtattgcttgtttagtgacatgaaccagactcgagtgggactttcctgagtgacaagtgtcaccatgagttctagtgtgggatggcttaatacaggggcttgtgagcttgggaagctgtttcctccctagcaccccctcattccaggtggatggtgtgggtagactttaggagcccccagaacagtgagtctgaggggtgctactagctccaagcatcagccccctgggccaggcctgattagcataaccattctcagccgatagacagtggctaattcactcctcacagtccaagcaggccattggttctaggtgaccagagttcatttactgaacaccagctatctagaaagcagggctttggacccagaaagcgcttagtggcaccagggctccttagtgacaaagctgcctgggtggcatagctcagggctgctgtcccaaccttgggaaataactcagaagaccatgccctggctatgagtgccaggggcagacatcacaggcacacagagaaaatccacagagactgtggcactgccaggatctaatgtggcattgttatcagagtggccattccttctaccaaaccaggaccctggagcaagagagaggaccaggtagcctactgtcgtagctccatttctgttgctgtggtaaaataccctgaccaaaaagcaacatgcaccaggaaagaggaaagttggtttgtttggtttataatctagcctatgtacagtccatcgtagggaggagtcatgatggcaggaactagaagtgcctaagtcactacatccacagtcaacagcagagaaacaaatgcatccatgctgtccatgctcccccacccccaaccagtttcatgtactcttaaaaagtccaagatccagcccacgaaattcagggtggatcgtctcacttccattaaacaaataagataatcctccacaggccaatctaatctaaaataattcctctttaagacttccctggtgattctaggttttgttacgttaaaactattcaacactgtgtagtgtattttagggaccattgaggaccccagactgcggccaggaagccactatgagatgacccacactccaccctcagactgccaaatcttgcctgggtcaagtctctggctgccctggagagaagcaaaggaagtgatgagggcacggtctactccctgcctccgtggccccgacctgtgtctagccccagcgacccgcccccaaagggggcgtggcccaggtgccgctcagctcagttcatctgctgttctgtgagcaacctgtggggagtttttgttaagctttcacaaggagaccagaggcttctccctgagacacatacctctcagaagtcacagggagggatgatgaacgtcctccgaaggatgagagcagtatttctccatggccctcctgaatccttgagctcacccgcccccctggcttctgcaggtcccgaatggaagatggaagcagatggcagctcaagacagagtcggtgcccggagctgcctggctcatgggatctaggtcctacactccctcacaggaccgaggctgcaaatcgtggggtgtaggatgctgggggctgaggagcagcggggagaactcagctataggagacataggaagccaattagctacatggttagcacgtcccctagacggaaaaggattaagatgtgcaaaagaaaagccatccacacatcgggtctaaggccagcatagagtgggctgaaaccccaagaccagaaaaatccccccaaaggcccaagggtcctgaagcaagaaagagattgaatgagtgttcctttgaccttaagattaaaaatgcaaggccttagtgatggtaaatgacctgcatgaagaaagctgggactgtctgttctgtggttggagagggcttggacttagagaaccagctggccactgcatctcctactcccaggcagaagcgcgtcggattgcagagcaaggtttccctctagtggaagcagggagccaggataccatctgccagccctgggatgaggttcactccctgtgctgtgagggaggctctgcagttagcaagcgttctttcagtgctaaagtgctcaggtcctgagctcagatcaaagatgccctgtaggtcacatccctacagtatccagcctccaccagtgacagcaagctcgggaagaccttttcttcacctaccaggagctctgtctcctgctagagagttctgtgcccaggtagtagaggatgtggaggtcatcttggacagtggtattgtgaagaggtcatctaagtggtgagcaagggacttagagtcttcttcatctttcttcctgttagtttctgagagctgaatgctcacagaggcagtgtatacttccactcagagtatgacccagcctcaatcccacgatgcaccaggacacaatgaatcccaaccagagtggtcctgtgcatcccatcagagtgactacagtcttgttacagcaatgcccttccatttaactatctacagtatagaaatcaggccagtccgtcatttcccccaaccttgccaaagccaagagtctagagagtccaagcccagtcaagcacagccccactgggagagcccagactcttcctggcaaaaacaaacactagttcggtatgccacaaccccccaagggagactaaagaaatgactccactaaagttaagtctgggacccagtgagtctatggagcattggtgactcttggtaagctatgtcactgagaagcccccaccccagtgtggggacaactcaaagccacaaaactgctgtcctcaccctggccagtcacccctcctcaactccgtccactgtgcacaccggttgccctctcctggggtctgtgggatcagaattcccactgcatccccctatccagagctactgcagccccccggctccggattggtctgctggtgtgggggaggggcagagacctcttcctgacgcttttctgcgactctggcaggatttttatttctgaacgagtacactgcctgccccagcccaggagccagcaaggagtagaggagggggcaagttttaagcagagacaaatgacgttggggcttgtgagaatcccgcgatttcctgtggagtagtcgcgggctcttcccgggctggctcccttgcacccgggagctcttttgttttggaagatgctggcagcatcactgtattaagagcaggccgcgttgtgttgtggattactgttttggtgttgccgttggcttttgtctgttaaattaactgctgtacattttcttgttctctgacgacatcgggggcttacttttctcactccttctcacagggaccccatatgcccaagtccaagcacaggtggggggtggagggcgggtggggggtnnnnnnnnnnnnnnnnnnnnnnnnnnnnnnnnnnnnnnnnnnnnnnnnnnnnnnnnnnngcccgggggtacggaggcattgccagcccattctaaagattacaagtgttcttggagactgctcggactatctcagcccttggaaagattctagactttcctggcttaaactgaagcatggggcccaggtttgacttttgcttaattttctcagtgtccccaggcttgagtccccacccttgttttggggtccacagagccccgcaggggtagtgcagggctcccgcttctcctccagccttctgccagctttgaagaccttccttccagcaatgctactgtacacgtggtgaggaacgccacccgcaacaaagctcgtgtacatatctccgtgtacatacggagtgtacatacatacatacataatacagtgtacatacatatagtgccccgtgttataaagataacagagcatggcatttctttggcattccaattttttttaacccttggaaatatggttttggcaatcttttattcttctttttcctcttttctatttaataaacatccatgtgaccttcctggtagcttcttgaattcctgtgtcttccatttctgtaatcagatctccagctgccctgaatgctttcgtctctctctctctctctctctctctctctctctctctctccctacaacctcacctgctggtctttccatttggatggccatcttcccctttccttggggaccaatccaacattttctccgctcactgggtcccctgtagccaaggatgtagactctgaacgaagcaccaggccccgagggtgcacagtgcccgtttccttcctgggaggttggactggctggcaaaggaaatgtgtgtgagatagatgttgaaatgatgctaaccacaaatgagcacggggtatgagtagtcagaacttagagctgacggttgccaccacgaggggatcttctgaaatgcagcgggggtggcaaggtgcagtctacagcccagccaacatctttattagctgatgcgcggagacctggggaacctaacaaatttaccgatgaagggaaagaaatagattacagataaacacaggagaacgcacaaaactgttgtaaaatttgataaaatagacttcgaacaaaacaacaatccatcgggggaacattatgattctaaatgtatgtgccctgaatacaggtacacacaatctcataaaacgcatgctatttagatggaaagtcacagattaaccttagcatgatagtactgggtgacttcagtaccacactcttaccaataggtcatcccctcaccacaaaatatacagaaacattcaaattaaatgacattgtacaccacatggtcttaacagacatctatagagcacttcattcaaatgctgtatagtacttactcgtctcagcagcccatgggacatcctctcgtacaaggacacaacattaaaataatttccatatcctggatgagtacaagactgtaaggctacaaatcaacagccagagaaacgccagaacacataccaattcgtgacgaatctagaaagttctggataggcagaaaaaaaaatctaacaagatggaacccttgtgggttatggaaagatcagtgcctgggggataattagcctctgggcttccctgtacccatggaatattctagagcagtggctctcatatggtgcctcatgttagggtgactctcaaccataaaattaatttcattgctggttacttcataactgtaattttgctactgttataaatagtaatatagggctggtgagatggctcagcaggtaagagcacctgactgctcttccaaaggtcctgagttcaaatcccagcaaccacatggtggctcacaaccatccgtaatgagatctgactccctcttctggtgtgtctacagtgtacttacatataataaataaatacatcttataaaaaaaggttttaaaaaaataaatagtaatataaatatctggtttttttctggtggttttaggtgacccctgtgaaagggtcacttggcccccccaaaggggttgagacccacaggttgaaaatcactctcctagggcatctcagggttcatgagcatcaggtgggtagaaagaatacatcatctcctgtcattggttcaggagcagctggctgaaagacagagagagatgtgcctgcaattttaccaccagtgctggggtgatcagggaccagcacttagctcctcatatgccaagggaaacgtccagcctcttcctgtctatcagaacaacccacagctcgtgttagctttcccatagctgggggactagaccgtctaatataactcaaaggaagaaggatttgtttttcaaatcgtttcagggattctaatctatgttggggatcagtggtgagagtattgtaaagcagagaatttcacatcatagcaagaaggaagaagaacagagcagcaatcaggaggggctggggcaagactacacccctaagagcacacacccagcgtggaggacagaagggaggacggaggactccacctatcatctatatacgtgcctggggccaggtgtgccctctcctgtgcctagccttacacgcccacagcttggccttccctgttatatagagagggaaatgagaatgtgagaatggccacactgtgtgttcttcacagtgctgctgagccagccaaggtgatggtgagcctgctagaacctcagctggggccacagcccagcaagcactagagctgagctgtctccagctatggtggtgtgacccagacctgtagacctggctcatggtggtcatctgttccctaatgtgaagccaatgcaggcgcttgaagttacggaataagaaactgcctgggcgtggctggagagatagctggctcttgcagtgattatgcacggctgtgatctaagcttacagtactcttcccccccccccccagagtcatgcacgtgtttacttatgttgtagtaataagtgctgaaaacaggaaataggttggaagtaaccttataaaacagacatttgccatacatggtaaaagcaacatacaaatattgttttctgggccaactgggtcagttggggttagctggtgtcagttgggtctaagcgctggaacctgaggtaacagacatccaagcctctgccttgagcccttagggaatgagtagagagggcagcagctgggccttcggtattctttaagatccaagcctttcagccagtatccaatcagccattcccactgtgctctccacagatcaggagctacgatgcaggtcgatttatagagaggggtgggtgtctcaaacacacactagctactgacttctggatgtgtctcttcatctcctaccagctgcatccctgagccaggtaactggaattacaaatgcctggctgctgagtgacgcgagacacacctgtaaactgcccctccccctttctccctaaaatggaaaatcttttacacctaatgtagaagtgggattggttttgaagtgttggctatttagccgtgagattaaccacgaacctgcaggagtagaggctcaaaggattttgtttgaaccggaagggaggtgggcaggaaggggacacctagaagatgataagtcaaaccttaaggaagggtggcagggctttctggctccacaggagtgagcgaggctgacctggcaagcttggtttctctgcactccatggaccccacggcatccagactgtttccttaatttccctctagcttacggcctcgacctcattatagaacttggcatctctccactggttagcatcatttcctccatgcagaagtgtcacctcatgtcattgccgaggagcccccagggacacctgtttgtcactgggagacactccacattccccatttgcttccgctattccttgcccaggcctgagatccggctatgaccacattgtgagctgcacatgggtcctctgcacatgggtcctcggctctggccacttggagctattccttccctgtgtctctgtgctgtgtgtctgcttcctccatccttcaaccctctggataattcatattcagcttctaaactcattttggtggcatttcctttgcaaagcctttcctaaatggcctttatgttcctgacttgggtgaggcctcttttttgtcctatgggaccccttgttttttctgcatggtgtcctttatactgtaccgtatattcctgatatctgtccaccaccaccactgtgccttaaatgtgggctctggtatttactagagcaagatgtcatttgtaaattaaatgcattccctgactagcctccttgtcctagggccatcttgcaatgcaccttgatgtccacaagggggcaggctccctaatggggcctcgcggtttctagtctgtcttgaattcatgccagcatgtgttctcagaaagcatgactaaaattgggcattttt

SEQ ID NO: 40 - DNA, 603 bp, Mus musculus
cggagtgggggcgtggagcgcgggagggcgggcttctccgccagcctcgcagcacccggagcgcactggcctcctgagaagggcgcatagcgcgctgccaggagcccgcagccggccgccgtctgccctggtgccccgggcggctgcagggttcctggagagcgcgtccagccatggagcctttgcacaaagacgccgagaccgcggcggcggcggcggctgtggcagcggcagatccccggggggcatcgtcgtccagcggggtggtcgtgcaggttcgcgagaagaaggggcccctgcgcgccgccatcccctacatgcccttcccggtggctgtcatctgtctcttcctcaacactttcgtgccgggattgggtacattcgtctcggcattcactgtgctgtgtggggcacgcaccgacctcccggacaggcacgtgtgctgcgtcttctggctgaatatcgctgcggccctcattcaggtgctcacggccatcgttatggtgggctggatcatgagcatcttctggggcatggacatggtcatccttgccaggtacaaggatcagggtatcccacaacagctgtgagcctacaggacct

SEQ ID NO: 41 - protein, 196 aa, Mus musculus
GVGAWSAGGRDPASQHPERTGLLRRAHSALPGARSRPPSALVPRAAAGFLESASSHGAFAQRRRDRGGGGGCGSGRSPGGIVVQRGGRAGSREEGAPARRHPLHALPGGCHLSLPQHFRAGIGYIRLGIHCAVWGTPPGQARVLRLLAEYRCGPHSGAHGHRYGGLDHEHLLGHGHGHPCQVQGSGYPTTAVSLQD

SEQ ID NO: 42 - DNA, 80420 bp, Homo sapiens
ttttgttgccactggggcatccaagtagtgagaccattttctactgaccaggagtcagtatacaagtgacaaatcctgaatagctccagcctcctcctgaatagctcggaggacagccaccagttcagctagctggctgctcccaccccttccttcaacagaaatgctcatgtttttaacaggattatgagccacagccttccagcatcgggtcccaccaatgtatttggcggatccttcagtaaaccaaatgtgtttctgattctctgggtttagttctttaaaggatttgccccattgtaggtggcgggagtggcgggggacggtggctctttccttatctgcaggacttgcttggtgtgtcctgggttggcaaattttgtacatcctcatgtaaaaacgatagcccctttggccccagcttagcaccaccttgtatgtgccatttccatttgatgatgcaactttttttgggtgtgccctatttggtgatttttggggagctcatgacccaagtcataataggaattttgggcctcataatgacatcacggttgaagcaggggcactctgtttccggcaaagcccaagaacaagctaacaattgcttcttgaaaggggtataagttttgccggcctctgacagtttcccggtccaaaaccccaaaggtaccctcttcccatcttgtttctgccaaagacttcaattagcatgttgatctaggacagttacttgcagttcttctggcccatcctgcatgagccatagatccagggccagttgcactgcttgtttcacatgtgaaagtcatagggttttctagtgactgcatgcggaggttgtaaaatgttacccaagtggggaatatgatgtctccagaatccaaacaagccaataaatttctgggcctcttttttagtggtaggggtggcaaattctagtattttagccttaacctttggtaaaatggactatttctctgcattccataggacaccaaggaactttacagtttgtgcaggtccttgaatcttactagagttaatttcccattttggaaaaacccagtttggagctgggtttttacctgctccaaaccccggctgactcgttcttcagtttccccctgaattaaaatatcatcaatataatgactgatttgaagtcccaaataatttagttctggccttgtagcatctaaatgctcagcaacttgccgacggcaaatggtggggctatgtacgtacccttgaggcaagcaagtaaactatattgtctcctgtcccatgtgaaagcaaattggtcccatatctgagggtttaaagggatggtaaagaaggcattggctagatcaattacagcataccatgttctgggatgctgctggaccagttcaacaatggttattacatcgggactgcagcagttagaggcagagactttatttaaggcctgataatccatggtcatatgccaactcccatcagatttcctaacaggccaaataggattattctactgagtggtggtgggcactaagacacccgccgctacataattctgaatggtttcggtaatttccttgtgtcctcccggaatataatattgcttcaaatttattatttgagtggcagcaggaatatctacctcgtaatgcaatttgtctgtggtaactgggcagactaactttaaggacctgactttgaaggagtcttggccgtctcgcaagtagagttctcccttttaggatgtcaatgccaataatatatttggggatgggtacaatcataactttatgtttttttttccgtggctatttcctattttcatttgtatagcagaatagtaggcaggaatctctttccctctgagaccagaaatgaccactttgggtccatgaaatgtactggggtttccatatattagagtggcctcagcccctgtatcaattagggcttttagggtagtaatagtattgtttttccaatagatgttaagcttcacatatgggtgcatatctatgcactttatttgcaaaggggcctagccttcctgtcatagtcctgctaaagaatccaataattcttggtaagagcctcccgatggctgggttacaggggtactcaatggaggcacgccaggggtgactcccggccccaaactagagggcccacctgttgttatttggcgcacattcctcactttttgttggtatagtttccataactctttagcttccttgccatcaatttgttctctgggaacccctgccttcaataaatctgcaaacatatccttctgactaacctgagattggtcccgggtttgtctgccccactccttaatcctctcctccccacagggcatccgatcccccaagtcctgtagctgacctagttgttccagtacctcccgtgtgggagtatctgtatgggaaaataataaagatgttaacaccattctataagcaggtggagcaatctttaaaatcttattgcggattgtaggacttaaaggtgttgcctctatgttatcagccattcccagtaccacagctgtttccatggcctcctcctttaaccgcatagcatactccttaagtgtatgccagggctttcccccatctggccaggcatcctctgtggaatatttctgtctggccacattgatggccaattgccacaaagatatttcatctaaaacatttccctcatcattagtagggtggggtgcagtagcccaatttcgaagagccagctgaattttgggtacccatgagagggtaacaaactttaaaacattccctgagtccactctaatgccattggcaccctgttcattaattcgaaccaaccaagtaattacactttcccctcccttttgtcgaaaggtttgtaaaatgtctgttatttcctgctgggtaaagtcttctacagcgtctctccagaccatctgtccattccgcccccactctatggcccgtggccgcctccggggtctggcctcagcaggttccctttattcatcaggggagtaagtggtcccttcttcatcatcatcccatatatctccatcccatgtgtctgggtcccactcagggcctactcgagcaagagctacctgtaccttctgcctatccaccttgccttgcctgttcttatacttgtaccaggccacccagacagctgttttgtcagcaatagcctggtagctttgggcttgatcagtcaggacataggcctggcattgggccaaagccagcctagaagttaagtcagcattttccttttccagcttacttttttattgtagcaaccaagatagggatcctatcttgacacattaacttataagcagtaagcaagcaccatccatgccagatctccttggaatctcctttgcccactggaatcccctgcagcacttcacgcacagccaaaggttcaaattgcactaatttagattcccagttctcacaaaggccagttcccctggaccattcaattgccaagggggaaaactgggggagttcccatcctgggatatgggaagtccctgagcttccattcctgtccttccagccaaaaagcggcatacttttgttttcgaatcctgttcatgatgccataaaatgttctgtgcaggaaacgcacgaggggaaaagaaaagacatacaataccttttaagagtaagcaacctttatcccacgtatatagcaatacagatataacaagcaaatgatataaaatgcaaattgcagcggaaaggggagaagggaaaaaatatgtatatatatatttacactcaccagactatggaggaaggatcactagaccgggaagcaacaatctgggttccagagtcggctgccagtctgtgcacagacgaggaaaggtctcatggagcttcagcacggcctgggaacctagctcttttgtaacgagttgtttggcatgaggcccagtcatgagggcccttcatgactgggctcaaggaacacaaaaaggtcaacttgtttttgcagctgtccgttgtttttcaataactaacgtacaggagcagatttctccgaaactttgctggatgaatgcctcaaggggctcatgcaatctgttctggggcttagtgaccattgtttatgtccacgttcaatggagttcaaatttaatatttaacttttcctctgcagcaggcagccgcaagggaaggtcacaggtaggctggaagcccatggcaagagctgaagcttgatgatgtccttcagctgcagtcaggaagaaagttctaaggggaaaggagagcaattgttgacccagcagctacttggaggatctccctcagagaaggcccatttttaaggagctcaagtcaggcccacccatgataatctcccattaattaactttttaattttttttctttttaagacagggtcatgctctgttcccaggctggagtgcggagccacaatcatggctcattgcagcctccatttcctgaactcaagtgatcctcttgcctcagcctcctgagtagctgagacttcaggcatgtgctaccacacccagctaatttaaaaaaaaattttttttttggcagagatgaggtcttgccatgttgcccaggttccattgattaacttaaagtcaactgattgggaactttgttttatttattcatttttttgagacaaggtctggctctatcacccaggctggagtgcagtggcgtgatctcagctcactgcaacctctgcctcctgggctcaaaccaccctctcacttcaacctcccaagtagctgggactacaggcacgcatcaccacacccagctaattttttttttttttttgaagagacaggattttgccatgttgcccaggctggtcttgaactcatgagctcaagcaatccacctgcctcagcctcccaaagtgctaggattacaggtgtgagccaccacgcccaccctgattgggaactttaaatcacatctgcagaattccttcacggaaacacccagatttgtatttgattagatacctcagagaagtgtgtgaaaactacaaaatggctgctgcctcccttctgccttccaactcttgagcaagaatattcccattggcccaacataaatggaaactaactagaaagggaattctgtgggctagagttgagcctagccaagttgatacatcaaaaagacattacatccatacttttttccccataaactaaatttgagttgtgttccatcacttggcatgaaaaagcttctgattcagttgccatttacttattgagtgccttatacgtattatctcacttaatcctcttatacacaaatgagctaggtattatttacaattttgaagaccgaagctcagagaggttaaaaaactttttcaaaggctcagagcttcaaacaaagtttgtctttccactgctgatgctatgatgccagtctttgccaaaaaggaaccacctggaagctctcttccaggttggaataggaattcctcatgcagtttggaagctgacttcagcaaatttttattttagctaaaaaatgtccaaaacttgatgtactttattcatctgatgacagaacaaggccaagaaatatatttttatcttcatgacccagtgcttggcccagatgtattatttggctgatgtaatgaactgtttggtctgtttcccctgttgcgtttgtgtctgattttttgagatgatcatttaaggttttaacttttattcggaagcctcttcctccctgaaataccttagatcttaaactctcctacaaacatcagctgcaatcacaatgtcaagtagatgctgtataaacctcttgcaagagcggtaaggaaaaaaggaatgtacagatgaacaatataagaaatgaaagaggagacatcattacagctttgacagacattaaaaagataagaggaaagtagaaaaagttttatgccaacaaattccataacttccacgaaatggacacgttcctagaaaagggatacatagcatgtgagacattttagctaggatctcagagagttaaatctcccaactgccaaatctaagggcacttttggggttttaccttacccttcagtgaatttgacactgctgactgcatcctccttaaaatcttcctgttttggcttccatgaaacactgttagtagtgtttctccatgtaaacctcgtttccctcctttttcctttctgcttaattacagaaattctgtaactttttttttttttttgagacagagtctcactctgttgcctaggctgaagtgcagtggtgcgacacggctcactgcagcctcgacctccccatgctcaggtgatcctcccacctcagcctcctgagtagctgggactagaagtgtgcaccaccacgcccagctaatttttgtatttttcgtacagatggagttttgccatgttgcccaggctggtcttgaactcctgggctcaagtgatcctcttgcctcagcgtcccagtgttgggattacgggcatgagccactgcgcccagcctctgtgactttttaaattccacatctgcatacagggctctaactaccatttgtatgctgatggctcccaaatctgcagccccaattgcttccttgattctcgatttgactcaatatccaacttttatcaagacaattatctatgctggccatttatcaatgagtccccgctacctctcggatgtgttcagacccttcaaactcatttcctccttgtctgctattaatacccagttttcatttgggaactgtccctaccccattctcagtccttttcagtcaggaagagtcctcctccccctcagcctctatataagcatgtgacctgattttatcccctccagcccatcttccacactgtgaacaaatatatctcataatggtggtggttttaaagcctaggcccaagtctttgacacccctccatagagaggcggggtgtcccccatgaaatctgggcaggcttgtgactgcatcgaccagtaaagccctgcagaagtgacactgtgtgacttccaaagttagggcagaaaagtccaagtccacacagcttccactggtcctgcaatgttcattctctgggggcctcctctcaggaaattccctctcagaagccagctgtcatagtgtgaaaagtccaagtcacgtggggaggccatgtgtaggcgctttgctgacccatcctagttgacccagctttcaagttaccccagtccaggcaggctgagattcctgagaatcttctcagaagtggatcctctagccccagctgttccagctatcagccatttcagtctcccgagctgaggctccagatacaaggagcaaagaagaattatcttggtgtgctctgtccaagctcctgaccacagaatttgtgatcagaaaaaaatggttgtgttaagctgctaaatttgggggtaatttgtgacacagtgatagtaactggaacacttatgccacacccctgcttaaaatgttccagtgattctgcatcaccaccaccgagatgaagtccaaattcctttgccattcagtactagatgcctgtccaccccaccagatccatctcctgtctctgcccacacaagccctagtgccagccacactgcaattcctggaatcatccctacttccctgggctcccatgcctttgtatattttgttgctctgcctggatgtctttctgacatccaagatattcagcaaatcatctggaaaactgggggatgcaaatccactgacgtccctgaaatcctttttctccaggaggaatgattgactggccctaagacagttcaagtgctctgcaaaagaatattcacagaatgtgggttattttctaggtctctgaataaaatactggttatatagaattgattctggagccagattgcctgcattcagctgccagctctaccactgattagtgggggactttgtgcagcctgtttaacttctctgtgcttcaattgccccatctgtaaaatggggtaataaataatccttactttgtagagttatggtaaggattaaaagagttaaaatgtgtaaagggtttttagaatgatgcctggcagagagtgcttgggtaaataagtgtttgttgaaaataaaacaaatctgcaaatagttaactgtagtcattgctcaagtccctttgagtatcgccttctttgggacacctccccgaggcctcccccacgctagctggcttcacagataggtccatgttgtcgcagcacctccagcacatcacagctgcaacattcctcactgtttctgtaagtctatctttgtagttgtcagtatctctcagctcatttcttagattcttgaaggcagaggctggattttactcatttctctctccctggaatctaagtcttagtaggccttcaataattgtgtattaaatggaagcttgctatgattttaaccaacacagtaactccaggccagaaaaggctaagcgagttcttctaagccatacaggttttagtggctgaacaaagactaaaatttttaaccctgttcttctgactgccaaacctaagctaatgactcgtgtgtgtgtgtatctgtgtatgtgtacacacgcatgtgtgtgtccaccagtatcatcactaacccctggccatttgcttttaaaattattttattcagagacttatacaataagtataagtatacaataacccatgttcttttagcctcttctgagaccctgggttgtttataataataatcactattattcctgaagggaggctattgcacccttccaattattcagacgatttgctgactgtctggataattccgaagcctttaacccctccctaacgttagaggcggtaactttcatccgtttactttttccaggtgcggaggcgaagcagccttattcagaaaatcgaattcaaacaggacctcaagctgccggctgttgcttctaccaactgccccattattaacgccagacggcgctgtgtcctcactggctctttaaccaccacgtcgggctcacagaaggctcaggtttcctccagtatagttcaggggatggtgaacgcttcccaacaagcctgcaacaggcgcatttctttctgcttttggtgcgtgtgtgtagggaagtgtcccatcttttaactagtcttgcggagacctggcctggtgtttgcaaatctgtttcctctattatcgatccgatctctggattgctttttctctgacacttgaaacaaattcactcctatatattttttaagtgattttttttttttttttttttttttacaaaatagagctggggcgggggggggggggtctcgctacgttgcccaggctggtttcgaactcctgggcacaagtaattctcccaccttggcctcccaaagtggggaatacagacgggagccactgcgctcgccccaaacaaaatcatttaaatcacaatgcactgaaggccgactaggtgtcaggcgccgcgcggtccgtcccttgtccccatgtccctggccaaaggcttgctctagatcaggggactcagcctcgaggctttcccgacggtgtcagccaagcacacactcccagttcgcagggcttcgtggtcaaggttcctagttcacctgtctgggagggcgaggtgtgtccaccccttccagcacctgggcaaacagctccctttgcggtcctcttccactgctttccctccgccctgattttccattccttgtgagcggtggttttggttggggggagggggcggggaaggggcctggcgaggaggggcgtcagagcgctgtcaccgggtgtcgcgccgccctccccgcccctccgccgggcgtgtggggacgccggagggcgggagtctccgcgagccgcgcggcgcacggagcacggcggccgcctgagctcggcgcggagcccggagcccgcagccgacagtctcctgctcccgtacgctgggcgccagctccggccgtgctgcccggctgcctgagagcgcgcccggccatggagccctcgcacaaagacgccgagacggcggcggcggcggcggcggtggcggcggcggacccccggggggcgtcctcgtccagcggggtggtggtgcaggtccgcgagaagaagggccccctgcgcgccgccatcccctacatgcccttccccgtggccgtcatctgcctcttcctcaacactttcgtgccgggactgggtaagacacggctgccgcgacccttgcgacccccaccccgccgcgggagggcgtggggggagagaagggcgcggccggagacctcctggcggggccgcgcgctccaagtgctgcgaccacgcgccaccgcccgctcctggcgtccccgggcaggtggcagaagcgcgtggagtgtgcaccccagaggggagaggctgcgctggggtctccgacccgcaggcggggccccaaagagccggaaactttgcggccaatgttggagcccgcagcggcggccggaatggctctgccggcttcggagtaggtctcccgtcccggcgccccgatttctgctccttctctccgtcgtgtgcatccgtccgcgagcccacttccccgagaggaatggggtcggatcagaatgagctctagggcctcggcggcgaggatcaaactcccgggcgtcgaagtcagctgagccggggaaagaggacgagccgggctagatatacctgcagccccctttggttcgcggagtgcggaccgcgtggggacgagaactctagccagagtctcctccgcctcattcaggggtacctgcacttccgccagcaccccgcagggcgccagggggatgggggatgattttattagtttggatgcatgtggccagagatgaacccatagctccctcggatcccttctgttcctgagaagtagagagtgcgccgatgtaattctgtgcaggactccggcagccggcaggggttctggtggcatctatgtcccacgttttaaagcagaggccccttacagagatggtgcaggagggtgaatggaggcagggaatgagaagttttcctgaccctccctcccttaactccacccccaggtctctgcctgcacgcccctcccctcctccagcttggcactggctgctcctgcgtgctgggaggtgcccccctctcccgtgcccgcccgaagaaccaggcgccccagtgccctctccgggagaaagcgtgcccctgtcggcgagcctgttgccaacgtatggttccgagttcccaagagcagaggccagctggaaggggttttcagtttgactttggcctttctcacggtctcctcgctcttcgcctgcttagcaggggcctctgctgcggtgacagccaaggccacagccacccacgcaggacccgttcactttcccctccgagcttacttgtctttctaccctaaggggctgctgcggccagagcagcctatctgagcagtaagttaggtggcctttagttgggcttctctcttctggggtgcctccagcagcctgtccccctggctggtgtcatcagatcagctctctttgcacatttagacactgcaaggaggccagctggtgttaatctagttttatcagaaattctcacctgctggagtaaaaagagactgcctgcccctccctctggcggatatgaagatcctcctgagccagcatgcatcttgatccacctttttttttttttttaagtggtgaggtaaacgccaccctatggtcttttgaggaaacaaatgcattggtgccaggtgagaggggctgcaccaagtcactgctgcacgaggaaaccaccttgtgggagaccagccccaggagacagcagctgcccacgcatgtacctgtgtgtaccctccctggtctcccttcactaggtgcctttcccagccttagccctgctgcattgacagcatcggctgcagggcaccgtccattccgctgacccctggctccttgccctggggatccagcttttccctttgtgagatcagaatcctatgggatttttgtgaaacaaacaaataaacaaacaaacaaaacaaaccattataagaaaccaggagaaaataaagggaagatatgcaaaccacaaaagtaataaaacaggtgagctgtaggtgcacagatttctgaattttcagtgacataatcctggcttttttttttttaattttgctttggttgctattgtacagtttactgggtgcacaggctcctgctcctctccacacggaatgagggattcctgatccttggtggtggttctcatctgtaagtcaggcacacctgtctcttggcgttgctgagaggatgaaacgtgattacataaagcccagcgtctggtgcataggaagctctctggggatggtgggtccatcttgctcttctgcagagctgagcactggtcccatctctgggtgggggtcgctgcagccagggcagcactgccctctggaccactcagaagcaaaggctctttgagtgcttttgatccctctgctcccctctccacctgcagtggagtcccaggcaacaaagcagctcagaccaatcttgcaggtggttttattgccccccttccccaggagtggtttaaatggccccagctcttggaaatctgccacttggcccagatccacttctccaaggcctcctggcttatctgaagctcccgggacaactgaatattcatggctgattctgctctttgatgaaatgcagcttctttcaattcactcattcatttgaccaacacaggcacctaccacatgccaggcattgactggggttgtgatgatgaataaatcagtcaggatgtcatagactgttgaggaaaattgaggccaactttgtctgaatttgataagtgctaggatggcagcaggaacagagtgttgtagcagaaattcttcctgggggcgaaggaagggggctcagagaaagcctccctgagggagtagtgttaggttagaacttgctgagaaaatctatcacgtgtcctcagcacttgccatcctcactaaactcccattctggaaactgcccagaccactggcccaaagatcttttctttttttctggaaacttccttccctgcaagtcctctcctggattgcagattggatgagagggcagtttttgctgaatgaaggctcgttttttatttttattttttccctttgatgtaggtgtctcaggtccatccagtctgcaggaccagctgtggagaagccccatccttaaaattccccagtgccttctccacccaagcaacagtgctctcgggataacactcatatcatgagtgggatgtgctgtctcctagggagtggctggaaaggagaagtgatttatgatcactccaactcctcactgaaacaatgaaaaacaatttttacaagtggacattagtaaagagagtcacctctagtcctattcagtgaaactctactaataaagaccaccgttggtaccttcatgttccaacaattagggtgtttataagtatatacacgattattcatacctgtaatgaaagttcattgttatgccccaacatggccagagagtttgtctagtggtcaggggtataattatacttttatatttaaaaattatatctatcttgatttggtgaaacgaaaatgttgatatctcagtgacacggaaagtcgaagggaggaggacctccattgacctttaaccactccattggactcaggacatcagatagggacaatttatccctaacacactgcctactctttgatgctgctaaagtcttgcttgctcaataaaagcaccacaggctggctctgcttcttctctctctctttcctctagacccaaggctcaaactgatgattaatcatgtcctacctcctggcatcttttgtatcatagattttttgttgctgttttgagactttattctttgtctatctgagtagatcttaaactcctggggagcagcaactattttaaatgtcttcttgaaagagcatgttatccacaaatacatatagactagaattatactcctggaataggcattagagatcatctggtccaaagcctttattcaatataaaagtgaagtaggcctgaggatgcaaggaccaaggaagtttacagcctactaaaccttttgaaggaagttcctgaagatgtttttcaacaaagtaagggagtaaaccaagaaaggagatatgagattcaggaaacagtgaatcctatacagagtagccatgaaaagcaaccctgggatgaaattgttcaacagaatgagagagtagttacttttcattagagtggaaggaaagaggtctccgaaggtgacatgagagaaggacattctagagagtagagagtattattaggacactgcaaaaaattaaggttgtaatgaaaagcagaaagcaagccaaaaaaaccacccaaacaaaacagaaagcaattagtaattgcagtaaagacaaagagccatgcaaaagcattaagatccaaaattgaagcagcttgcccaatcaggtcagaaggtcagcaggcttcaaaaagaaaaaaagagtccaaacaataaatggagtgggaagaaatttggaggttattagggatatgatgtagaaggcaaatgtttcttctatcaacaagaaaaaagaaacataatcagaaacttctggaaaaacaaaacatttcttatgaaagggatagcctaaatatgaagcagtccaaaatgtggcctgattttgagcatgtggtggaatgtaagaaaggctctaagcgcatagggtctgtcattggaacagtggtgcatgatatggactgtttggctctgcagtaaagaatatttgcttagtcataataatgtaaatgctgcttagtggctttcaacttctaaaatcaacaacaaagcactgaagactacttaagaatagctataaaggagtacgtaaagagtttctggcttgacaacataaaagaagttggaaagtagaagaagagagaagaggaactgtgatagattaaattattgttcccaattattcactgttctccctgaaagaggatttcacacccccacccgatgccatatggcttgcctgcccttgtaggagaatacttcctcccctgtccactgatacccggtttggccacgtgactcgctttggccaattgaatgtgagtggaaatgacatattccatgccgaacagacacgttaagaggtggtgtgaagttctgacattgttcttttccctctctcctgaaaatggcaggtctcagatgggggatgcccttcaactagttcccagaataaacagcacatcagaagcaggccatggcatggcatgtgaatcagaaataagcctgagttgctgagattttgtggttgttggtcttgttattgtcccagcatgacatatgcaaagctgactaacagcagatggtagggtagaggcatgaataccccaatcatataaaacgggagtcaagagatgctgtctgtagttaatagaccaagaaataaaagtcaccaaggtgaccaatagatgaactgaaatagttgatgtgttgggacagtgggatgagagtgaactgctggaatcatctggaaacaagagtaaaagtgcgctgaggggtgatataagcaagctggcttgtgtgtattacagcagaaagtggataggtaatgtctaaatttgataaaacatgaaaaagcaatataagtgtactctttggagactggggaagcatcagaattcccagtctttctggcatcatcaattttcctgtctactggctcattcccagcagcacacatccatgctgaaattgtctatcttctaaaaatagcctctcctgatccattatcccctctgacctgtgcccatttctttgctccctttcaccgcaaaattccctgaaagagctgtctgtatttgctatctccaattcctcctctctcattttctagtgaactcactttaatcatgtttttgcctccatcactcacttacactgcacttgtcagggtcgccagtctcctccaggttgctaaatccagtggccggttctctgtcttcctcttcctggacctatcagcagcaccggccataggggctcactccctcctcctgaaatgctttctttacttggcttctacagcactactccctcctagttttctttttacctcaaggctctttgcttcctttgcctctcttgacaacctctaaactttagagctccccagggcacttggtcttcttgaccctgatcttctcttttctgcctgtattcactcccgcagtgatcttgcccagcctctgggctttcaatcgcatttttatgatgatgactccccagtttagatccccagctcaggcctcttccctgaactcttgagtcatatatccaactgccttctcagtgtctccacttggaaaccaaaaggcatcctagacataacgcatccaaaaccaaactcctggtcttcttccccagacctgcttctccctcctctttccccatctcagcaaatggcggcctcccagtggctcaggccaaaaactgagactcaactttgactcttttttctttttaaccccatgcccaatctgttaggaagtcctcttggtctgctttccaagcctgatcagtatctgaccacttcttaccactctctgattcaagcctccacgttctcctgtattactgcagtagcttcctacatggtctgcttgtccgtactcatgtcccttagagtctgtccacaagatggcaaccagagtgctactttttaaacacgagtgagtcggattgtgtcacttttgagctcaaaactttctaatggctcccatgtcactcaaagtaaaagctcgagtccttataatgacctgtaaggacctaagccagaactttccaacagaaatataagtcacatagagaatttaaaatttttctagtacatacctatatcataaaaagtaaaaaggaataggtgaagttaaccttaataatacgtttcatttaacccgatatattcaaaatattatcaacatataatcaatatgaacattattcataagatatattttcttttttgcatagtaagttttcaaatccggcgtatattttacacttatagcacatctcaatttggacctgtcccatttcaagggtaatttgaagtggatgtgttaacagcatccaaattccttctgagaaatggcaagggacccagctgccatgggagtggtcagttaacgatgatacagaggaagtttgtgtctcaataaagtgtagatagcttgctaagcagaggagggcttccttctgagtgccttcagcagcatttcactcttaacatgctcctactgtgtgccaggtctatgctaagagctgaggcacaaagtcaaagaagatgtggtccctgccctcaagaagctgacagtctaatgggaaggcaggcactaatgaatacagacagtagtgtgtgctttaatggaggaaaggatgggccaccggggcccatttcatccagtctgcagtggttaggcaatgctttcctggcaaacttggccatcggggagatgagcaacaggctaaacagaatgacctggatggtctaaattaagtgccgtttcgagttcaacattaggttcatgatgccacaaagcatcatgaaaagggagatgaactagaagccaggaggtttcagacctaattctggctcctcagtagcatggaaccttgagcaggtcacttagcctctctgagcctcagtcttctcacttgtaaaatgaaaataataatctccgcttgggcatctgacaaagtcatgatgccctgttaactgtaaagcactccacagtcagaacaggttattgttaccaattaatattagcaaaatcccctttgcacttttaaattgtaaattgacaatttctaattatataaatttgtggggtacaaagtgatgctataatttatgaatacaatgtggaataattacatcaagctagttaatgtatccatcatctcaaatacttaacactttttgtggtgaggacatttgaagtttactcccttagcaactttgaaatgtacgatactctattattaactatatttaccacactgtgcaatagaactcaaaaaagggaaaaaatcttacttctcccatgattttgtaccttttgaccaccatctctccatttccctcgcccacctcagtgcctggcaactaccattcgactctgttcttctatgactttgattcttttagattccacatgtgagaacatgcagtatttgtctttctgtgcctgacttatttcacttagcaataatgtttttcagttccattcatgttgttgcaaatgatagactttccttttttaaggctgaatatttatataccgccttttaaggcatatatacccccttttctttatccattcatctgctgatggacacttaggttgattccataacttaactattgtgaatagtgctatagtaaacatggggtgcagacatttcttggataaacacatttcaaattttttgggtaaatacccagaagtaggattgtgggtcatatggtcattctatttttagctttttgagccatctccatactattttccataatggtcctataattcgcattctcaccaacagtgtacaagggttccccttttctccacgtcctcaccaacacttgttatctttcatctttttaataaaagccattctgacatgtccaagaagagaaaattataggcccatatccttaatgaacatagatgcaaaaatcctcaacaaaatactggtgaaccaaattccacagtgcattaaaaggatcatccaccatgattaagatttatccctaggatgccagaatggttcaacatatgcaaatcaataaatgtgatacatcacattaacagaataaaggacaaaaaccatatgatcatctcattagattctgaaaaagcatttgacaaaattcaacatcctttcatgataaaaaatctcaccaaagttaggtgtagaaaggtcgtaccttaacacaataaaggccatatatgagaagcccacagctaacgttatactcaacgtgaaaagttgaaagcctttcctctaagatctggaacaggacaaggatgcccacttttgccacttctattcaacataatggaagtccttgccagagcaattgggcaagagaaggaaagaaaaggcatccaaataggaaaggaagaagtgaaattgtcattgctgatgacataatcctatatatagaaaaccttacagactccaccaaaaaactgttagaatatgttagagtataatacaattaagttgtgcaatacaaaatcaacacacaaaaatcattagcaaaatcccctttgttcccaggatcattcctggggtatttctctgagtggcaactgggggtggacagggtgactaacaagcacttccaccttttttcagtagctcaattccatgcagcacatggagctgagacctaggaattcccactgggcacccaaccagacctcccacacgtgacgtgctggcttgaaggggaagggcacacgttctccagggcttagttcaacacaccaactggaagctttctccactgtactccccaaaccctgggcctgtgcgagggatgcgtctctgaggctaactttacagtttggtaaaaggctgtggggaacatcaaagtgtggactgaatgtgtgtgtgggtgggtggatgtgcacctgtgtgtttgtgtgcacaaatgttccatagactttacctatagttattttacaataaaaattagagcatcgttaatttctaggtctgggtttgaaaatctctgtgtccatatacctttgaggcacatacttggtggtggtttatagcacacttgaagccccacaatctggggcagggtagggtagcaggtgtgtcttcggcatgggaacttcccagtgagaactgggtgctgggtttcattggcccaggcccagcacatactagaaatgacattcctaggggaaagcggaggcaatgggaaggagaccatattttcctaatcaaaaggtaggacacggggattcaccatgcatttattttatgacagaccataaattacattgatgaagtaacttttcttgaaaatagtaaaatgagataaggccaggactgcccttgaacctggaatttgtaggggccatggccagagccccctgttgagcagagcactcagtccagctctggtctctgttgtgtgagaagtttgaccctgaggccaagagcaatttgctgtttgtggagaagagcctgccttgaaacctcaacaatgaaaatggttcaactttccaagggccaaagaactttagggcggctgcaaccccttcaatttacggacaagggaagaaaggaggcctcctaccacgtcgaaggctctgacccacaatttcaccatcagttaccctggcttcggggcctccctgcctgtcacagtgcctggcttgtcctggagggttaattcatatttgtccagttaactgaacacaccgctgttaatgaagacctggtgaggactgcggaggacaactgcacagccacatgacctgtcagtgaccacatcaatcaatgcctgccaccaggaccctctcctcactgctccacccttgtccctccggaacaatgttattgagatgtgtttacatactacacaagtcactctttcaaagtgtatgattcagccaggacgtgatggctcacacctgtaatcctagcactttgggaggccaaggtgggaggatcacgaggtcaggagatcgagaccatcctggctaacatcgtgaaaccccgtctctactaaaaatacaaaaaattagccgggcatggtggcgggtgcctgtagtcccagctacttgggaggctgaggcaggagaatggcgtgaacccgggggggcggagcttgcagtgagccgagattgcaccactgcagtccagcctgggcaacagagcgagactccgtctcaaaaaaaaaaaaaaattagccaggtatgatggcgggcgcctgtaatcccagctacttgggaggctgaggcaggagaatcgcttgaacctgggaggtggaggttgcagtgagctgagatcacgccaccacactccagcctaggtgacagagtgagactctgtctcaaaacaaacaaacaagacaaaaaaacacacaaagtatatgattcagtggcttttaggaaattggctatagccttttgctccttcctcagccctggcttccaacctcactacttgaccactgttcttccagaaccttggaagtttaatgtgacaggaacaccttaatccaggtgctcttggggaagggtgatcgtttgggaacctttttgccgttgctgtctccaagttctgccagtgcaggaatccacgtctcagaagacaaagctcacatcagtgttgctggttggcaagacgcgagcagcctccaggctatggaacattgtttcgatgattgtcatcttctattttctgtttcatttgaaaaagaagcatgtcaccgagcagaaaacattctcaatgaaaatggaatagcacagagacagtggcacaggttgaaatgtggggcatgtgtgtgatggagtgagtcactctctctgggatggataagttgtggccctggttggggatgttgcattggtttcagaagtgtcactcttaggccaagctgcagaagggagcgccgacagcagatcaaatggaagtgggtcccctgggtcacatctcagaatggctgtggtataatgctcccattttgattttctctgttagcagactaagcacatttctattcatgtctcagctctgatcattagattctcctcccctgaaatttttcaggagctctccattgtccactgaaccaagttcacattccacattggacccacgagggtccagcgagctttacccattctttccctcgctttatgtaggcctttatttgggagcatcgttgctcctgctataccctcttcctggtacaccttcctccatcatcactgtctaactcctaaccagccttcaagacccaactcaaatgccctcttccgaaagcctttcctgaccatgccagtgaggtgggctcttccttcctcagaatggtcaggtcatgtaggacgttcctcttgctctccttgagattctggttctttggttgtcttaatccttctatgggaaatcgtctccttgagggtaggggctgtgctttacttatcttctatttccaatcgcaactagcacctttgtagtaggtgtttgctgaagtgaaggtatgtttgcatattaactactggtaggaaaggtggaatcaagagcaggtccttgttcttttaacctagtggacccttccccaggagacacaggctttcctgtcacttcttggccttcctagctcagagttctcagggctgcatgcagaatgagggcagatgtgttgtcctgcagcgtgtgtgtctctgaggagtccttggtccccgaccactcagggaggaactggaacagaggagagttgttgctaggacagatggcctggtctgtgggggacttgttggagcagttatgatgttactgagaagagcggggccaccaactctaattaccctgtgaactttccagttgtgtagctaaccactgatgagtgtcagaggagtggtggaagggatcaatcttagtaaaccttgttaataaagattggtttggtcaataaccatcaaatctaagtctaaggggaagttggatgaggagcaggatatttatttgcatgattgtaaagtgtctacccttggaatgcttctaacttacacagggaacatgagagagtgcaggaaccagatagcatcttgactgagtgaacgcaattaacatcatctgaatcctgaaaaattgctaggtgaaagaactcagtcacaaaaggccatgcattgtgtgattccactgatatgaaatttccacagtgggcaaatctgtagagacagtatgtcgggtggggggtgaggttggggggaagtggggagtgaccattaatgggtatgagctttcttttgggggtgatgaaaatgttctaaatgttctaaaattgattgtggtgatggttccacaaagctgtgaatatactaaaagccactgaattattcagtgggtgaattttgtgatatgaacattgcatctctggcctggtgcagtggctcacttctgtaatcctagcacagtgggaggccgaggtgggtggatcacctgaggtcaggagtttgagactggcctggccagcgtgatgaaaccccgtctctactaaaaatacaaaaattagccaggtgtggtggtgcatgcctgtagtctcagttactcgggaggctgatgcaggagaatcacttgaacccaggaggcataggttgcagtgagccgagattgtgccactgcacgccctctcgagcctgggcgacagagcaagactccttctgaaaaaaaaaaaaaaagaaaagaaaattgtatctcaataaagctgttaaaaattaacatcatcaacaagggaccgacatcatgtacctcctgatatgatatcctgagaggaacacaatagcacttttgtagtcttctagccaggggttcataaactggatctgctcatggggaaacatcagacaaacccaaattgaggggtgttctacaaggtacctggcctgtattcttcaaaagcatcattgtcataaaatattaagggagtctaaaacacatgacagctgtatacaaaacgtaatcttgaattacatcctgtactggaagaaaagagaatcacaataggacattattgagacaattgacaaaaattagaatacagattgcagattagatgaaatattgtatcaatatttagcttcctaagtttaactgtgctatgaatatataagagaatatctttgttctttggaaacacattgaaatataaagaaataaagagccatgatgtcggcagcttattcacaaatggttcagaaagaaacaaataagaatgtggagagaaagagaatggcaagacaaatggagtgaaatgttaaaagttgggaatctgggtaaagcgtagaccagaattctttgcattatttttgcaacttttctgccagtttgatactattttaaaataaaaagttaaaatatttggcaaaaagccaaacacactcatacggttcagacatagtgattgcacctaaatccaaactactgtactctaagccagtcacatcctctctcttatcacttccataaggtctaccagccataagtaagtcaggggctatctggggaccacaggaaaaaagtcagggcacaaggtggcattgatttgcaaggcccaggcccccaaaggagatttttccagagatccttactattaaaaccctaagggcacacaaaagtttattgcagccatttgggagtatgaggtgtttttctgctccatcagcataggcttgatgaactaactcagttaaagtgagttccaggaggccggggtcattgtgcacacccaattcccttcagtggcccatggatctgagcaggctgcctttgcaggattcctttggggctgatcaggaatctgaatgcttcagccagagcagatcccaatgctgcagagctattttggagaagtcttcattttcttcgttattcctctttttgacttagcatggagtccagaagttgtccatggacctcaaagaaacacctcaaatcaacaaccagtgactttgccatgccgagagggcatgagagaactgcccctttgccttggctgctctgagaggtcatgtgggttgaacgtgcaagtggaatccttccaggaattgccctgtggcctgactcagaagggaaaaaagtaaacattaccatcttaggcccaaatagctggggttctgaggctcaaggcagaaagggtggtgagctctgatgcaccctcactcacaggtcaggcttggccaaaaggctcgggtggtcttgcgtccgactgcccatggctgaactctgaggctgatacatcctgagcacaaggccctcagtgcttgggaattgattggggctaaagggaaagaaaactcaggaaagtcttgagtctggcgagatacccaattacttgggcccactcttgggtgagcccactgtgtggtttatttttccttttagtttcccttctgagcccaatacatctcatgcccaggatgttctagatctctctgtgtgagtttccctgaggacttaggagctaggttaccctgtttcaagatgtcggtcctcaggaaatgcttggaggtcaagcaaagcacttcttgaaggaggacttagggaagggagtgggtgagtggctttgtctcccaggcctatttccatctcattgtttcttattcttcatggggttcccttcccagcatcatgggagcggactgccaccaatcatggggggaaaagagtgtgattcttaacatgcatctgaagacagtcagcaatggctggggttggtggttgggtgatgggtagaacgtgcattggaaccaggcatctactcttggattatctggtctacctgccactctaattttgagttttctaacttagcatgtgggttactcttatctctttgattataccttttttgtgtgacttcctctagtggagggcccactgcagggcacccagtagaatcccagccctacttgctgggtgataatgagctgggaaacgtgcccctttctcaaggagagtgtggcttctgctggctgagatctggaatcctggcttctcattccagctcatcctgttgatgggagcctcagcgcttagcctgatgcatctcatgcattccggttctgaatgactaagaagccttgccctagcagaggtgggcaggggaggaggcttgacaggtaggccagtggctcccactcccctgccctcccccatgcattttctgctcttccctatcctgctctggacccgaggaggccgacctctacggcctgcatcaccagtccccttgccctcgagcttccaggtgtcttagccaatgggaggcactggtaggcatggaggaaaggagggagagtttggggtattggtttcccattccctccaacttcctgtctatgaccacgaattccattctacagcccccttctactaccccagccctctccgcccaacaacagccttccctctccctgcccctcaggcccaagggtgggagtggcctcctgctgttgctgggtaccagcatttcagcctcccatcctgcccagacctctgtgtatagttccttcatgaagaccctgggggtgggagcctttgcttcctgctgggaccccctggtcacacagagatgtttgtttttagcacccctgactagactgtggggtcctgaaccaccagccttggcatactactgctcccccaccgtcacttctcatcccacccacctccacctggttttcctaaagatgttggtttctaacacagtcttcctcctagaagctctgaaacagccagtacatggagccagggcttcctgccgtctgaaaagtgtgggtgtccagcttgcaaatggctctggtgctcaggagatgcctcagctgggggaggggtggagacttgagaaggtgctaggcgtgactccctgcccggctcctgcctgggtagttctgcataccccccatcctcccgtctctcgcccacgcttggctcagagatctctgggctgcacctcctgcccagaggattccccagcagcagaatcctggttctgcctgctctcctcccaagaaacccagatggctggaagcatcgctgccttcccggaatgtcatctccctctttcacctggagccttcattttggaaggtgcaacagctgcccagcccattgcttgtgcctgggcttaccagcgattcctccttactctttctgtgataaacagaagatattgaaagcaaatcgctactcagtccagggtactcccctctccctaggacctaccgttttgcatttttgtcccccaccaccctttcttctgttcctcttcccttggagaatgacacttgcttaggaatggaatcctcagttgcgtggtttgatttctcttcctccactcacagaaagaacctccactgtttgaaatgtcaaagcccccaatgatttcttgttatgagaagtcatcaaaatacgcctattatgttttaagtctttacaaaagacaccaaaaattagtgcatcatctacttgaaagaatcccttttgatagccatgccaattacatttttaaaaggcataaaggttctagtagggttcttctgatttttttccccctcttgtgtgatttgtgtgcagacttctgagaagcaggttttataatagagattcagccaggctaaatcacagcggcagaagcttatgcaactgctaaaaacctatgagttaaaaatggaatagtcttgcagagtggggaaggtaataatatcagtgatgagaaaatagaaagtaataaattagtatttcagcaattcaggtctcttacccacatttttttttgtaccagaaggtcttggtgccatttttccagaataaattcaaagtgcaacctcttaatagaaaaaaatcaaactttgctttcaccaattcaaccctctgtcccaattattccaggatcaagagcccttttaactgactttttgccaccatgtcacaaaacacatcttatatttgctggaccttgtatgatcagtaattcctacgaaggaacagattttagatttttataagtgggttttgttaatttgctattttaaaaatacttgtgagacctttacagttgccatggcaatataatttccataaacatgatttttgtggggatttttgcacattgaaggctgaggttgatatgcagtgttggggggaaggtaggtggtgaatttggcagcaactccattgctgcttcccgcaaatgctgcaaataagattccaagaatccatgttaggacagagacctggatttctaaacaacacacttgacacaaagggcttcttggaagtagatctggttgggggagaaggagaccagcctgttcctaggatgaagccagtagggtggtgaggccggggcacctgctctgctaatcaacagtcctgtccaggccagattgacctgaaatctcttcccgagccttgctttcaaaaagcctttgaagactgtccgtcctggagctatccaacgggtggtgacggccccgcgggctcttttctcaaaccagattcgttcaaaaagcccatttaccacactacactgctaaaatgctgaacatttgcagtggaaaataacggaaaatagaaacacaacaatattagctattaaacaaagtaaggaaacattgaataagaaatagttttatattcatcctgaatgccagtggttgagggaaagcagatttaatgagaagaggtagatggtcccgatggccctaaacagcatcatttttctcagtgatgccagacatttgttatggctcacaaacaggggcttgccagtaaactttatttcccagagaatgagctatataaagagatcgagggaggagatgaacaggtaagacagagaattttctaatagccaaacacacattggagaagaaatgacaaataaaagcatttaaaagtggaagcgtgccagcgtgagatggatgattctgccgaggggtctctagtgagcaggtcacgcatttggcaccagatgctgcctaattgaacacctgaacacagctgaggggcttgaatcatatagaattatgaatcataaagaattatgaattactagaaagctattgtgttgacattattatttatgtattgtcagaaatgcgaacagggcaccccgaggaggaggtaccagactacctgtctggctgagcactgatctccattccttggaagccaaacctgagacacccgggagaggtcatgtgcgtgcccgggagcctgcacaccggcatcccacatgtgcctaagacaagtgcacatccagaagtttgcacaaatcagaaaaactcagagcaccagctccactatgcacagtctcacacttcacaccagtgggaaaggtcaggagactgtccattctgcaggctctggcaacggccggcagctgctgctgatttgtgatttgtcaagtgtgtttattgaaaaagaaagagtttgtgcttctagagtagtgaggtttcggtgggcctcattccgagggtgctgagggctgtgagtcccactgcgggttcagggctgccgtcaaccctaggcggggtgggttgttcagggcctatcagcactgctccaagggcttcccaggcattttttctttgccctgaaatagtccagaggaatttggcagggacagcttcaggaatgtggttcatcgccccatccagagtgggaattggaaccagaacgctgcctgcagcgcagctccagcctcttccttcaacacacatttaatttttttaaaaaagtttaaagcatcagtagcaggcagcttgactgaggctggtgggtggccaggaggagagggaaggagcctgctgagcaaagaacagccaggtctggtgcctggctgcctgctgccccctctggcagccactgtcccagctgtggggaggagcaggcatgtcccttgtcccttgactttggctttgaaaggaggcccaaggcatgaaatgcagtgaggagcttcgcccctgcgacgttgctctctggaggacacctcattgctccagggacagaccttgctcctggtgccaggaatgagggtggcctctcttattctctagaagtaaggataagcagaagcagaaacgccggaccacactgttaagaggaggtggggtggcagacagaggtccttgtagggtccctagcaaggggaccttgctgtgcccacacacaaggggaccttgctgtgcccacacacaaggggaccttgctgtgcccatgcatgtgcccacacgtgcatgcttccccaagttttggtgtctcttttctggggatgacttttttttttttctgaaggaatacctcctggatccaacggtatcacatgatggctgtatgaccttaggcaggtgacttaacctctctgtgcctcagtttcttcatctgtaaaatgggatcataatcatacctatctcatagggctctcttgaagattgaatgttattacatataaagtcttagaatagcactttgcacatatatatagtgaggcttacatgttgtccttattattattatccttagaatttgtgctggggtgaagccagccctcccattccagctgtgagaggcccaatgctctgtgacccagcagggccactaggctgtgagcctgttgagcacagggtgagtcttcactcagctccgcacctccatggctggtacaatacctggcttgtagcaggtgctcagtaattttggggccaaatagcttgtcagggacatggctgatgtgcggtcccacactgcagttctcagacctcagaatcccttgggacgcttggtaaaaatgtaaaaccccagcttctaccctcagagattctgactcaatattagcagaaatggagtggggccagataacttgcattgtttgaaaagcaccccatttgagaaacactcctggggaagctcaatgtaacgtacccccaaagcctgggattgagggacaagagggagagccaggagtggctactcccagctgtggcctgcctgcgtgaccctcttctgccttcaggactgggaggggatggtgggatctgcgctgtctggtagaaatactgaagaggggtagagcctggcagggagataagttagggttagatttggtttgaagcatttttaatctggagctgctctgcagtaaggtgaggtcagtggttcttagaaatactaaaaaagagcctccaagacaggcccacagctcactggtccctcagggtgactgccacacatcagggctcctcctgtcctcagctcagcccccaacctgagccccgcccctccctggaggccctccttcacaagccccctgctggatgtttgcagggctccaggctggagtgatgccctcctttctgctcagggctgtcacccggagctctggtggctcctctgggtaagcagaacagtcagtgagatttccttgaggttcaaaatgtggcctttggaaaacagctgttagtgtaacccagcagcccaagaaaagacataatggagttgagtcaggaggcgtgtgcttttatggagctgtgtgtttaaagatacatctgaggtttgtttcttagcaacagggatcatccaaagcacattggcagtgtcagagcaaccaatgatgcccaaaaccaccctgtaaaatacaatagaaatctacagagtaagagggaagaagctaagcacagttcctccaacaggtggagaaactcagaaggctgaacagatgcagtcgccattgttttagactagacagcaccagggtgagagaagtttccaccccacaggggccaagccacctccctccacctggcttccttctggccagagcaggcttttcttcaaggagcatcatgcagagagctcttgcctctttgagctccccgcttccccagcacctggagctgcagcatccaaacaaatgatcatttatccttcatatgtgaagggtgagggctgaacctgggagaagatattagagacctaaatccagaggttcttaaccttgtttttgtgccattggaccctttagcgttctgatgaagccttggaccccttctcagaataatggtttttttaaaaatgcatttttaatgcatttaatacatagactttaaaagccccaatgatattgaaaaagacttattaaaatatttttaaaagcaaatttgtaggccaggcactgtggctcacacctataatctcagcacttttggaggccgaggcgggaggatcacttgaggaaaggagtttgagaccagcctggtcaaaatggtgaaaccctgtctctactaaaaatacaaagattagccaggcatggtggtgggcacctgtaatcccatctattcgggaggctgaggcaggagatttgcttgaacccgggagacggaggttgcagtgagccgagatcacatcaccgtcctccagcctgggagacagcgtgaatgggactgtctcaaaaacaaaacaaaacaaaacaaaacaaaaactatagaaaaaaatttgcatatagaaacactgtgcttctgtattgatgtattaaataagaagatccagtggagggtctaggaagtaccataacttcgaaatagtgataagtgccaatgatattttgagaaatcgacttcttgaccgtagcaggaatatctatggtttcctgctacctatttggtgatgaagaccaggttgtgttaatattactttggttattgtctgcatttataatgagagggaatgctaaaattgagttcaaggttagtgaaaattaagatgcaaattttttttttgcagttatagttcatggatgccccagggggtttgtggaccccagggttaccccttggaaccttctcccttcttcttcttcttcttttttttttttgagatggagtttcactcttgttgcccaggctggagtgcaatggcgtgatcttggctcactgcaacctctgcctgcagggttcaagggattctcctgcctcagcctcgtgagtagctgggattccaggcatgcaccaccaccctcggctaatttttgtatttttagtagagatggggtttttccacgttgattagtctggtctcgaactcctgacctcaggtgatccacccaccttggcctcccaaaagtgcttggattacaggtgtgagccaccacacccggccccttttcccttccttattctcctacttcgcacttctgagtgcctggaggcctcttgagcaaagttgcttagaaacctgtgttgtcagagctgctacactggcatggacaggtggtcagagcagagaggcaacaagacactgtcgaacaagcacagccaataaacaagaattaaagggcatgatgatgataccggctgcggtgagaacctgccacccttgtcatcaaagaaacaggcaccatcaccttcctccacagaggggcattcacagcacaggtgttctgggtcaaggtcattgaaatgtaatttgaccttggaaaggtgagagccattgactctgagattctcagggcttttttcagtctgtttttctaatacctactacattcatttaacaactttcaacaagtatgcattgttgaaagtaggcacttggccaaatcctgggtctacagggatactgtcatgaagctgggcttcagtggaaaccaggaaacccgaggtgggagaggctaacagccctgtgcggctggatgcctcggggagatggaaaggggaaagtggagctggtcacagttttacgatgagcagacggagcagaggggagcacgctttgtctaagaactcccagagggcagggcctcccggtggattaagcaggccagggaagcctcctgagttccccaagtccctgagtcggcctttgggcagcattcctgggactcaggtactctggctgctctgccccagggaaagtgccccaacctctggggaaatgcctggaagcccctcaagtggtcctgccatggcattgagcaggaaagtcagggtccgcggtactagttctgcaggaatggcttccttctgtttcacgggaccaggctcatgaaaagttagagctggaagggtccttgaggaacacacagtccaagcctctcattttacagacatgggcactgaggctcagaggcaagagggactctcccaggtcccatggtggcagagccagggctagaacccaggcctcctgaccctgatccccagagggaggtcacatgggaagcagtaggatgaagatcatgtctgagtcctgggcctgccgcaggtttggggtttggtttgttgttgttttcgtccaactttccggagttggtccagcacctgctgtagtgttacctgggcacctggatccctgcataggttagttaccacatacagcagattttccaaagtggtgcatcggtctgccattcctgaccggccctttctaaccttggccaggtcaattaagcattttttgcttcaggtttgatgaacctgatgttagtagtacctacttcacaggcttgttgccataagtgagttaatgcacatagagcttttgtaacagatggtggcgggttagtcacgactctttcagttaaaagtgttagaaaaccaactcaagctggtttaaacagaagatgggatttattggttcacagaacagtaaaatccagggcacagtggatttcaggccttgctggatccaggtgctcaaagatgtcctcaaggctctggttttctttccagctcttggcctgacttccattcctctatattgcttgatttttaagtggactctttttacatggtgactcatagtgatccacagtgacaatgtcttttaaactagcaattccagtaaaaagagggggttttatttatttttaatttttaaaataaaaattgtgtatattgaaggtgtacagcatgatattttgatatacgtagtgaaatgaatactacagtcaagcaaatgaacatatccatctcctcacatagttacgtttttgtgtatgtatgtggtaagagcacctgaaatctactctcctagtgaatttccagtgtacaatatactttttttttttttttgagatggagtcttgctctgtcgccaggctggggtgcagtggtgtgatctcagctcactgcaacctccacctcctgggttcaagcaattctcctgcctgagcctcccgagtagctgggattacaggtgcacaccaccatgtgctgctaattttttgtatttttagtagagatggggttttaccatgttggtcaggctggtctcaaactcctgacctcaaatgatcctccagcctcagcctcccaaagtgctgggattacaggcatgagccatagcccccagcctacaatatacttttaataactatagtccatatgccatatattagatctctaggcttgttcatcttatgtaactgcaactttgtgccctttgacctctgtctgctgatttcaccagctatctgaccctggtaaccactgcttctactctctgtttctgtgtatttgacttttttagattccacgtataagtgagatcatgtagtttttattctgtatctggcttatttcacttagcataatgttttccaggttcacccacgttgttgcaaatgacagtatttccttcaaaaagagggctgtttttccctaattgtcctgtaaacctcctggagttgaatgtcgttggcccggcttgagttatgtgcccttccctgtgtaatcactgtgacagggcaatgagacgcttggatcggccagacctgtatcatgtgcccaccttgggaattgggggccaaggtcagtcccacccaaattcatggcctgagcatgggggagacgaggaccccaaaggaagctatgcgcactgtttccagaagaggaactgatgcgaagtaggccaaagtgacgggtgaccaggcctgtgagagatgtggagacctcacataaacaagtgcacctcagggagcccgaggtggggacgttaccgttgccaactctcagagtggagacagctttgcaagagaagtgataggactcctgaagcccagagggcgtgtctcggggtcagcggggccccagggctttgggtctcacaacccctcagaggaaaggcccaccccaactcatggggaacaagcaaaccgcaggtgtggaccgcggtcagttccgagcagggctggggtcatatgtctgggctccttgctgtccgggctgctggctccatcccagaactctgcatatgtggactcactggctgctcacagcaggcctgtgaagtaggtgctagcgggaggagagccttgggcacagagagcctgatggacctgcccaagttaggaaggggcagagctggtgggctcaggcagtcgggtaccaggagcagtcgcctgaccactgctctgcacctcacagtgatttgtgaggactagatcaggcctatacagaatgggccaggacagcagaagccctcaataaggtgagtgctgtcacgctgccctattgcacagatagatagtgtggtgggaatgcagaaaagtgacttctcacccgaaagttgacagtcagctccagctggaggctgaaggttcccagaaagacagattggcctggtctgacgctccagcaggctgccctccaatccctgccggcaggcacccagggtgggtgaggcaggaggcaggtgatggtggctggccaggtccatggactgggccgcgaggcctggctgggctctgggttgtggggaacagagtggggggtggctaagtggcagtgggactttctgaacagggttggggagaagacggggcaaaggcccaggccagggcaaacatgaaggtgtttcttggtgttcaacaggacaagatttcccaaagtgccatttctgggaggacaaaaataactaacaccatgtcatatctggtcacccatttttcagctccttttaggcatgtggaagcctgcagtggatagtctgaaccaccaaaatatcaaaggcaactgcacgccaatagatagtcagcctttcacatccgcagagccttctttccctaataggaaatgtctgctggtgactttctccccagagcctgcgttggcatcaggccaagggctgagtcctgccctcctcatctcaggggctgccacccctgtcattttcctgtttgtttagactgctagaaagagaacgtactgccctaggtttcaaagcctcagttaagtctccctgcacctaatgagttctgctttgaaaatccatcagcctcagacgcggctctgtctgaccctgtgattctctccttggctcagtaatcaggtggggaccaccagaatggagcacgactcctcttccggccgctccctggcaggtggagtgatggtctgtccttactccaggttgcaggagcagctcattagagggagtgacacacagtctcccagagctgctggctggggctgttgctgggcaaggggctagggggacagaactggtattatgggcctgggatggctgggtattctggggttcccagccaaaagtctcctgcaaggccagtagccctgaatcacagcagaaaagaaaaagaaattccccccattctgcaaaagccatgatgaaatgaaattcattcgtggagagattacatgattgaggctcctgagtggctgctgtgtggagtgtatgtgtcccaggtaaagacccatctcttgccaaggttgccaatgactagtgagttagtggacacccaaaaggcatttttttttattgtggtaaaatgtgcataacgtaatatttaccattttagccatttttaagtgtagagtcctgtggcagtaagtacattcacaatgctgtgcaaccatcaccaccatccatctgcaggacattttcatcttcccaaacggaaactctgtgcccattaacatgagctgcccactcccccctcccaggccctggcaaccaccagagtacagggcagcagaaacccacaaacacagcttgtctagttccgtggacacacagctctttgggccttggctgatgcctctctggagagctattcatttaataaacccttatgaaaggcttgccatgtgccaggcattgcactggtgcctagaatataaaggggagtaaatgcaaccctactttctacagcaaacatagctatccacacacttccttagtgaccaccgctgctccctcctggtctaagcacctgttacccctctactgctcacagccacatacagagataggcattactgctcttattttcaggtgaggaaaccaaggcacagaaaggttaggtgacttgtccaacatcacacaggtaggaagtggcagagctgagtctcaaactcaagcagtctggcttcagcattggtgttggtcttcttaacctcttggctgtgctgcctttgaagggctcacagccagtgcagggaagagagtgtcccttcttgggactgctctcccttcaggaattgtcctcattgtgtcgggtgacatgattctagtaaataggaaagcaaaaagcaaagcaaacccggttaaaaaaaaaagtgaaattgtacccagaaatctagtacagctcgagaccatggagaagaccaggaatgaagcctcgggaagtctccagggctgtgggaggctatctgctgtctcactcaccctgccagctcttcacacgaaacagtttctcacacacacacacacacactcacacactcaggcacacatagactcgtgcacgcatgcacgccagggactgatgatgatggctgaaagtcctttacccatggtgttcttcgctgccagagggaaagctgagagcccctcgggccccagggccattgtcttcatgggagtaagggcaactgaaagggagggggggccagcagcagccgctcttactgtgacagcatgcactgcttttggaggctttagtcagattccgactcaggggctgtcctgcagtcttctccccagacaaatgggttgttctgtgggggggatggttgttctatgggatgaaggagacagaggctgcacagaggagacagtagggcgggggagagtgagtgcaaaaacccaaagtcactgccttgcttccaccactagcccaggcaggtgggagggcctggcctacccttttctttgggggaggtctgccccctcggcctcttccctgacacgcagccttactttttcattgtgatgagatagtatcatgagaggcggccccagactgccctccccgtgggcccaggatgctggaccttgttggaccttggtggaggatgatgccgtcaaaaagacattgctgtttgcaccttctcaatatctcaccatcttgcttctgtgtgctttctcaaaatgtctttacgcgtcatcatggtcatgtagtctcttttcaattttttctttatttttaattttaaaaatgtttttaaaaaactgagataaggtctcactatgttgcccaggctggtctcaaactctggccctcaagtgatcatcctgcatttagtcccccacaccaccgccccaacccccagctttttttttttttttttttttttgagaatgcatctctctttgtcacccaggctggagtgcagtgacgcaatcacaggtcacttgcagcctcgactgtctgggctcaagtgatcctcccacctcagcctccagagtaactgggaccacaggcatgcaccaccatgcctggctaatttttaaattacttgtagagacaaggtcttatgttgcccaggctggtcttgaactcctgggctcaagcactcctcccaccttggcctcccaaagtgctgggattacaggcatgagccactgcacccagccccagtcccttttttaaaaggcagccataactgggctgagtctgactcggtgaaggccaagtttaaagcccacagccacccctgcagcggctgcttccctgggcagagacaatgagtgcagctgggccttggaaggcctctcccctcccatccctgagtcttgatcagctgcccctcacaccccagggttttctcttgctgatttctctctcaagcaacgaaataaaaaaagtcacactgaagtattagagacttaatcaaagataaagttgcattttgaaggagaatcttggggagctaaaagttcataatgacaagaagtgagtgctgcggctggaatttccttttccagtggggcccatacctctgtgcatccctaaatttgatcaggttcatgatgcacttgacctgtatggatggtgggttctcgcctggcccatcccagtgccatttcttaggatctgcagctgtgaagccggctatgtgcgctaattctttgagagaagcatggtgtcctaatctcacactgtccctttggcaaatgatagaaggaaactatcttatcttggcagcatggtggagagaagccactgtgaggcattagctgagtgatgggggaaggatggggcatggggatgccagtccatcacgataagggatgccagctcccaacacatgagtgcagccttcattcagttctgtgccaggtgctgggctgcgtgctgggaatacagtggtatcagcaaaatttacttggtccctgtccatgtggtgcttcctgtctcttcgaggagatagacgttacatcagataatcccacccgcaagtgtgagatgaggaggtctgtgaaggagaggcattcagagataggagagtgaggggccgtggaggcctccccaggaagcctcactggccgagaaagagttcagtggggatcagggagaccaacttgggaaggccttatttcttttttttttttttttttctttttgagacagggcctttttcgcccaggctggtgtgcagtggtgcaatcatagttcactgcagccttgaactcctgggctcaatccatcctcccacccatcctccctagtaactggaactacaggcacatgccactgcccccaactaattaaaaaaaaaatttttttttgtagagatggagcctccctgtgttgcttgggcctcaagcaagcctccagcctcggcctcccaacgtgttgggatttgagattacaggcgtgagccaccctgccctgcccctttgtttttattctatgagcaatgggagcagccgaaggataatcatatctgcatcttgaaaacatccctgtagctgttgtaggcagcacagctgtgggagacctgtaaggaggcggcagtccaggcaagagttgatgggaacttgaactaggaggcggtgttagcagagacaaagtgggtggaggtaagagacatttagaagtaaaaaaatgacagatttggtctcagatgggctgtgtgggaggaggagccatggggaatcctgggttctggctggtgcaggtgatgggagtgggtgtggatctctgagatgagaaagggccaggcttagtgcagggacaggtcaggaatttgttcttgtacttgtttttgagagggttttgaaatatcccagaagaggtgtcaagtaagccattgtcagtggtctggagctcagaggcaaggtctgtgctggagaatgaagtcttcaatcaggtgccctgggtggaggggagaggatcttaggagaggctgtgtgctggggagaggagaggtctagggctgagcctgagggcttcaacatttcatggttgatgagggggagggcagagggggacaagtcataccttaagtgtgccccactctccctggcatatatcccatcttttctacttggaacattcttcccccttcctagactccccactcaccctgaggtctctccttcctctcagaagccctcctgtgctcttatgcctgggtcaagggctgctcttgccccactgctccccatgctgccccctcacagcctttatcacattgaccagcaaatacccagctgtgtgtctggatccatcactaatcgaagggttctatgtctgggtcaccattgtgcccccagcaccaaggacagtgtctggtggatctgtagttagagtagaggctcagctgctataacaaagagaccagaaacacagtggcttaaatgcattagaagccctttctctcatgtcaagctatcaggctgtgccaggctggcagggcagctctcttctacgaggtcattcattggaatcatcttggtgaatagtcttctgccaaggcccagggtgcggccctagttcccatggttgaagttgggttaccgccatgtcttctttccagcccataggaaaggaaaagagcaaagtctggggaaagcagctggatttagtttggagatgacccagacgtttcacacatgtatcactttcgctcatagctcattgtcccaaacagtctcatggcctctcttggttgcagaggaggctgggacatgcagactctagatgagtagctaaatgcccaggagtcaaagggaagggatttgggggacagctagcagtcttcctactcactgggcaatgaatattgaatggacggacagacagttggtttgttggtgtcttagtccattttctgttgctataacagaataccacagactcggtaatttataacagaatgaagtttatttagctcacagttctggaggctgaaaagtccaagagtattgtgccagcatctggcgagggccttcttgctgtatcattacgtggcagagggcatcacttggtgacagggcaagagtgtatgagcttagctctctcttcctcttgtttatttatttatttatttatttttcttttttgagatggagtctcactctgttgcccaggctggagtgcagtgggcaggagtacacacagagatgatggtgggggaggatggacagccaggtagtgggtggggagaagaactggaaaccagcaaaatgagctgagaagagtcagtggatgagaagatgggcacatcagggaggagccagtggtgaaggaccgccatcctcttagtggatttcatcctgagccaggcctgccctagccggcttgtgtcactgagatgctctcatccttcacggggacccattccagggacatcctgcacccatccactgtggagtgttgtaagtcctctctgcagctgctgcagtttatctgagatttgactaaaatcttcctttcttccattcctaactgcagccttctgccctgcccctcattgacatgtctggccctcctcttccagctctccctcacttagtcaccctgcagccatgctgctaccagagctgtccccagcctcctcctggaaaccctggtcccagggagcctgaccacagctccactgatacggaggcagacgctgctgctgctgtgccggcccctgccccgggaaatgtcagtgccatccttcaccattgggatgactggttttaatccttggttctttcctgaaatcagttttcttttaaaaagtaggtttctcaaatccatttggctctttgctcttttaagacaccagtatgggctgggcgcagtggctcatgcctgtaatcccagaactttgggaggccgaggcaggtggatcccctgaggtcaggagttcgagaccagcctggccaacatggtaagaccccatctgtactaaaaagtacaaaaaattagctgggtgtggtggcgggcacctgtaatcccagctactggggaggctgaagcaggagaatcacttgaacctgggaggtggaggttgcagtgagccgaggtcacaccattgcactccagcctgagcaacaagagcaacatgccatctcaaaaaaaaaaaaaagacatcagtatgtggaccctgaagggtcaccccaaagtcaatctcatctgaaagccagtgcacaggaagccaggccacttttgtttggctctcaaagtcctgaaaaggttttccacagtcccagggtaggctgtctcctgaagccccagtacctgctttccctcttgttctctgatggagctgaggggccacagacctcaggcctctccctctcctttcctggtaaccaacaagtttgtgaaaacaggcacgggctgtctcagttagcttttgctgcatgacaaacctccctaaaacttagtggcttaaaacaatagtgtttatggagttcacaattctgtgggctgggctcaggagggcatttctttggtcaagctgggcttggttattcttagctgggatggctagatggctgcggccatccgcatgtggtgtctcatcctccaacaggctagccagggtttgtccatgtggtgacagtgcagagctctatgagtgtggcctcagctcaggagtggcacagtgccacttcccctgcattatattggccaaggaaagtcccagggccagcctggattcaaaggatggggaagcagattctacttcttaatgggaggagcagcaaagtcacattgcaaaggctatggatacaggaagtggagaactggggccatttctgaaatctgctgccgttggttaatgtaccattcattctaggcctgttcttgtctgttaaaagagaataaagacttgggattgttgtagaaatcaagtgaggaaatatggtaaaatgctaacttctaatgagtgctcggtgcattacagattgattataatgataatggttttacctttgccagttggaaggctgggaaggtactttttgctagacaagcaagcacacatgtctatcctacaggacagcataaagcaattctgtttttcctcctcagtgccttattagtccattcctgtccacctagaaaggtcctcagggagctcctcctcacaggcctcttcctttttctctttcctcacagctctgtgtcccctagagtcctcctctctgtcactggctatcttttgataaacttctggacttcctatagcatggctgcagtgcagtgttaccctaacagattctctgacttttgtcagttgtcctggcttggtgaggcagggctctgggacgggggatgggagtaattgcccctctgcccaagagccaagcagtacaggcctttaggattctagatgctaaatgattgctgtaaaaaccaaacatcctcgcccacttcttctattcttcttccccctccattgacatgttgcccagtgacactcttgttccaactatctattgttgtgtagaaaacaatctcaaaatttagtggtgcgaaaaaaaaaaccattgtgttatgctcatcttctgtgggtagggatttagataggacacattcgggatatcttgtctctgctccatgatgtgtggggcctcagctagcaagactcaaaaccagggtgactcgatggttgaggactggaatcatctggaggcatctttactcacatgtctggtagctgaaactggccctcagctggaacctcacctgagctgttgaatggaccatctacacgaggtttctccctggagtttctcacctgagctagtttggacttttttatagcgtggtggctgggttcaagagtatgcagctgaagatgcaggaagtgaaatccagcagtttgttaaggcctgagccaggaaactggcacagtgccacttctgttatatgctgttggttattagagttcagttttaagaggaaagtatatgggcccatctcttgatgaaagagtgtcaaagaattggccgcctgagtctacagtggctcctgaaggtctcttgggactggagtcctttcctggcttccaacccataagcctcagagtctggcctctcatctcatctccagcaggtgagcccaagcctgccatttgactgagagccccactctgcctggttaactgggaacaacaccgtaggattgggagctgcattccaggggtgttcctggaaatccaggggcttctgtcacagccttgcagagtcccatggcatcatttaatttttttgtgttagacatctgtgtgcatctgtcccctagtttactcaaccactccattgccttctctgcagctagtgaggagctaactgatagacatccttgaagagttagatctcaacaggttgcttaaaactttgttttaaccaaaatgagaatttgtttttgaaaaaagagaaaagccatggcaaaaccatttttacaatattttgcttaatacactccagtctttgtccacataaataaatattttaaaatagtcccccacacaatatactttctatttgtgtaagctcactcgaagcacttgcccatcttgctgtgtagtcatcacaattataatttttactggctgtaccacactgcggcatagggatgagtgcctagcctcaggcttcatgaggctgacatggtgaacttaacaatgataataatttttttaaaaggtggagtgaagaatagtgccattggccacaagtcaacgtgagagcaggattcattgagatcttcaattttattttcctagtcataattaataactcctgtctgccaagattctgctccagcactgcctcctcagaggacagtccccatcatcctccttcctactcgatgtggggccctcctcatgccccagctaggccttattggtttcatgctgtgttctaagtactttacctgcattaatttaatcctcacgtttacccttgtctactatcattgtgcgtttcgtagatggggaaatgagaagtgctgttacctggagatgaggtctagagaagtgccatcatttgtcaagattgcacagcttatctgtgatgcagttgggattcggaccctggcattctgatgccagagctcacctttgtattcacagtgttatcctgcctgccccgcctcagtccccactcagaggactgaccacacagcattgtgttctgtgggttatttgcctctctcaccgccccgtgggattcttgagggccaggacactgaagcactcagtaggtacttcgtaagtgccagctgaatacatggaaaaatgaatgaatgaaatgaattcggtatgattttaaggaggggacatgtcttagttcaggctgctataacaagaataccatagacagggtagcttaaatagcagacatttatttcttacagttttggaagctgggaaatctgggaccagtataccagcgtggttgggttctgggaagggacctcttcctgattttctcacatggtggggagggagagagagaaaaagagcttggattataagggcatcaattccatcatggagactccaactccatgacctcatcaaacctttgctcgatggaatgcagtcttcaggcctagtgactggagatgttctgctattacctgctatgtcagaggcccactgaggctttgcttctgagggctcaaggacttaagggttcagggtgcactgttctcccacacgcccagtgtgtgtagccacagctcagggacctggggacagctcttcccagcactcccaggggtcacccacgcctggctatgaactcccactggtgcctggaacatttgagctcacacacactgggctgccgaacgctcggggcagtcttgttcccaggcttgcgtttggtaaggagagagtgcctcagctttaacaagctccatgctgagcacatggtgggcacgacatccatgttatttgttatttgggcaatcagatgaggtccgggcattagcctgcatgtctcatgtctcatgtcttagcctgtggattagtggcaccattatggcaaggggtcagctcagggatccctgttctcagttgctgcagcatccccacaagagctccttttgggtctcatcatgttgtaggctctcactgcctttgatctcagagaggctctctggctgctgcagccttgggcagaacccctctcggtttttaatctccgtgtctacccatccatggaaatgtcatcttgtgaggttgcaaattctaaggagatggtagccgtgttgtctcctataacaaatgttgccaccgctgccctcacccatctttccaccagactggccacccttaacaccgacctgctggaaggtaggaaggacgaggctaagccctcaagggccactgcattgtcctgggctcccctgccctggccattacacaaccacccttccccgtcccatccccgtctcctcagttcaccctctagcactgaagcctagactctgtcatggcaggctcgcagttagggaactgagaaattccatgtggttaaatttctgctccagcttaacatcctgggaagacccctgaagagacctatggtgtccagttctgtagcgcagctccccagccccgccacagagtgcccaggctgggagcacatcagaggtctaggagggggcaggcagagggcagaggaggtttgctaataagcacagggaagctgatgcacacccggcgccactaaaattaattattagctccagtcgccttcacccccagcaggatgagaactgatgtcacagtcaggagactgagggggatggaggagggagctggtctcattttccttctgtcctcggaaggaaggacaccagatggatgtgtggcatccaagaaggctcctgtcgtctttcctttatgccagttggaaaatcaaaggcacacactaacagctgcagcccacctgatgccgcaatacacctgcagactgtgacttaccagggtctcacctgtacaccccttgtctgcctgaagactcgcaccccaccgtgttcccctgaccccctcaaacctcacaatcccaacgcatttgccggagaacccttagcatttacccgagaccctgggaggaatgaagagggtttgtcccaagctggcactttctgactggggagagaacagagggcctctggatgtgggggagcagctgaggctaagggagaagtggttcaagatgccatacaccttctctctgctgggagacagaaggccacctgtccactcttcctcattctcttccatgaaacccatgcatggaaagatttaagccataataaatccactctcccatctctagttgatcaaaggtgggttattggccactgggaactgccgatagcaggaaagaccccttagttactgcattgtgatgggatcacaatgaaatgctggcaagttcggctttccaatgggcagtgtgacctcactatggtgtctgtgctttctctaatgttgaaagccactcacagaccctttgctgctccaggatagaggcatcgagggcactggcagattcattctgcaaaagtgtgtggatgttcaggatgatgaggatgctagaactgttcatgttttactctgcactattccagatcggttttatgttctgagtcctccttgcaaattccttgctggccaggacatgaggctgcacacagtgctgggtctacaaaacactttctaggggaatgactcggtgcagttctaggggaagacacagcccctccgcagacctgctcagcttcgaaccctgcgctgatatgccctttggttgacaccttcctctcccacctagtgtggtcttcttgtgctctgttctggagtggccgagctgaaaggatgacactgccttccctcagcacatatgagcacaggatatcccatatcttctgctccatttcttgagaaaacagaacccaaaagagttgccatgaagagcatttgagtggcccaggaccctggccttgctttctgcagcctcctctggtttactcaggccacagccatataggccccattcacattcaaggctacgctgattctgtgtccctgggacttgtccagaagtatttgtgaaacttgtagtcagttctctttcctttccttttctttctggttgaaataattgcacaatgaggcaaagatgatgactagacctcctgaatcagactcttagggtggtggggcccgggaaggtgtatttttagcaatctctgattttgaccctgaacataatctcccatttagcttattctggccttgaactaggcagcccttggcaatgggtcctgtttcttagggtgtgaagaacctgtttctttggctttcaaaatcagctgtacatttccttcctgacccccaaagctcacattcagggtaaggccttgaaaaaaggccttcctcaaccaactcctccggagaagtgagggagggtgtccaggtgtaaaccacagccactgaggagcagcacatcataatgactgcagagccagctggaggtgacatctgggatcaaacaacttgctggcctaggtcctgggggcagtttttactctgaagcagctgcttcggaagacagctctgcctttctcccactgagttccaagaggctttaagatcccctctccagacccagcacctcccaaagctcccacgtgagtcatgcgaaaagctgaacccggtgagaactccaaggacacttccagctctcaggctctatctcgtgggagcagagccgcccccttcctgatgggagactgtaccagccactcctggctgcttctcttctcgtgcctgacagccaagctccaggaactctccccagaggacaagcccagagaatctctttggggctcccaggacggaagtggagggacccttttctctccctactgccttgtcttggagcctgggcccggagctccttggggaagctgagagtacagagaccacagtgatggcagccagggctcagctctgcttgtgtttttgctgcaactctccgtgggaggacttccccaggcctctgctgcctgcctttcttcccaggatcatggtaggacgtgcaaaccacatgtctgtgcctaagtcccaggtatcttacaacacactgattttggtggttgacaatacagttcattaccatcattttccttgtgccagttagtgttagctgggacctccaggaacagcatgcgcagggccagcctcagcctccctgtccctgctgcagaggaccatctccccgctccagccctgagtcatgtgggggaagccgttggacagagtgaaaggccagaatcatggactcatttctgatgaggttgcgtgattttctcgttctgtatctgccaggctaattcctccacccatcagagcgaggactggtatcagctggaggaatgttaattttttttttaaacaagcaattcctagatccatccctgtgcctgtggcagtctagaggtggaaccttagtatctgcatatgaaccccagtttgagacgtttgatgcacacactgcttcggaaaactttgctttggatcccttccccccaccatccccttctcattttaccgagaaccttcatgtccacttatcccctacttggttatgtcttcaccctgtcccccgacccctcccggcagcttctcctcagcagataaacaagcttaagtttctcccacttaaggaaaagtggtcctcacccacaccctggaatccacacctccattctctccaagccccctgacctcctgctctgagccctgccattctcccgactccctgtagagccactcttggcctaagcgagtctgcgattgcacatggcccctctcactgaaccttgctgaagcaggtgacctgccccagcacctcttcctccagacggttctctcctgtttctgggacgccctcccctagccactctgattggacctcccctgtcccctttgtggtcttcttttccctttttgctcaccactaaaatcttggtgtcccctagggtctttccttgaatttcatgccctcctggggtgacctcattcacttccaaccactacttgaaattgacacctctagagtccttgtctctgactcagctctcttcaatcagtgggcattttaatctccatgtgaacggccaggccagcctgtctccagatgctcttccctcctctgagtccagtctgtgtaccactgagctctggactgtgcaccgcttagctccagatggccaggacggcctgtctgcagatgcttttcccctcctccttccctccatgagtccccatcagcttcccagctccctgctccatcgcctgctctcctgtgaagtctttcctgctacggccaaacagaattcatcactgttcctggtgtgacccagtgtccttgccagagtgtgagctcccgggcgggggtggcaagttcccatcacctgtctgggctcccattcctaggactcagcattggcatatggctggcgctcaatagaataaattagaaccaacacattgctgttgggtagagcgttttatttaactggtaagactcatttaaaacaattaacacctcttcgtaggaaaatgtgctaaaaccattttttaaatttactgctgaagagattaaaacagtttttatattataaatccattcacttaatctctaccttttatggcatgtggtaccttatacggcaaaagggacctgttgtcatagtttccttattagtgatatctgagttcacacaactggacaatatgtgtgcacatgatagaagtcagtatgtgtataaggttatatttttacatggcttagagttatcatgagtgtgtcaacatgagtaaaagaaggagcagagaccaaaaatccctctgacaccacacacatgctaaggttgtctcctcctttaaataaagtgtgggccagcccagcttttcctaacatataagccaaagcctttgctaaggatcattcagtttgcacagccctgctcatctgcagagcactgggctcaccaggccttccccgctccaccaagaacaggcaggtactcagcccactggcctctaatcactttggcaattccagtgagatttcatcttttggccagagataggcttgacgaccttctgactctaagaatctctgagttcaaggacaaagtttccttatgctcaaaactttcatatacacattaggctttcattagtcagctactcttgacctgcagaagtgccaatttcctatggttcagcctaataaaaacatgaaagaacatggaatgctgttcccatttcctaggctgaaagagtgaggtgaggccacagccacaaagagggtcactgggtctcagctcccaccgagtcaggacactgcagtccagagatcagaacaccatccaattcagggccttccataaatgacacagggatgggaaggagtgggttcaaggatatttgaaaaccattaagcatgaaggttctttccttattattattaatttttttgttgttgttgttttatgatggagtctcactctgtcacccaggctggagtacagtggagcattcttggctcactgcaaactctgcctcccggcttcaaacgattcttctgcctcagcctcctgagtagctgggactacaggcgtgcaccaccacacccagctaatttttgtatttttggtagagacagggtttcatcatgctggccaggctggtcttgagctcctgacctcaggtgatccacctgccatggcctcccatgagtgctgggattacaggcgtgagccaccacgcccggcctttttccttattttttaatgtaaggatgcaacaccctagactgaaaagaactcagccttctaaactagacagattgactttaagtctgggttctgctgtgagggcaagtcatttagcctgtctgagcctcagtttctgtatctgtaaaatggggataataataactacctccagtggttttaagaataagaggtaatgtaggtagagagagggctgcacagtgcttagcatgctataggtttgcagcaaatggcacctatgttattttcacttcacattttccacacatattcttattcatcttcaaccatctttccactttggcagcgttctcttttgtaatagtgtccacttgtgtgcatctcctgtctcacatgcatgatgcactggcagaagcaaagaatggtggcacacacttcctaatagtccctaagtcccctgcatcttcctgtgtccactaccaagccctgagcccacatctcccccattcctcagctgcggccttctcatcccagttcatctttcccatctcagacactttaaatccaccctgccacttgggcgcggtggctcgcgcctgtaatcccagcactttgggaggccaaggtgagcggaccacttgaggtcagaagtttgagaccagcatggccaacatggggaaaccccgtctcgactaaaaatacaaaaattagccgggcatgatggtgcatgcctgtaatcccagctacttgggaggctgaagcaggagaatcacttgaacctgggaggtggaggttgcagtgagctgagatcacaccactgcaccccagcctgggggacagagtgagactccgtctcaaaaaaaaaaaaaaaaaatccaccctgctgacaaattaattttcttaaatccctgcttccattgcattgctctcctgctcagaactctctgtgagagctccgtttcctgcaggttgggggcaaactcttacccatgcattcaaagccttccacaaatggccagagtcagtcctccctcttcatccccatcaccttccccttgtcaccaccctgccccctgcaccatcctcacccttctcctcccagcaggaagaggctagagctgaagtcccagctccatcacttttacccttacaggagccctcagcctccttctcctctgtcaggtggggtgatgagtttgcccagtacactgtgagttcttgagggcaggggttcagttaggttcttgaatgagtctctacagagactccagagttgcaccccaacctcatcccccagaaaggaagctccagccaacactctgtgcccctagctggctgtccatccggcgagagtagaagaacagctttgcctctctggatctcccacagggcctctggagctctgtgccaggaacacagtgggggtagttagcgagttgtctgatcttgaatccgtggttttcacactttagtgagccttatcattcctattccttggagggcagcggggaagcttgttgggaaaagcagatgccaggtcaccctttagaaattccgtagatctcaggtgggaccccgcatttttaacaaatgccacaggcgatgaggcaggtggtaggaggagacacttgatgttgggtgtacttctttgaatgccacaggccacctactgtgtacaaggcactgtgcaaggggctggagggatgaaggtgaatgagatgccgcctgagacctcacatcggtggcagtggttacgatgaggaggaggaaaacgaggcagggtcagtttcagaaatcagcatgtggactcaggcttcagccttggatctgaagcacaaaggtgtgggtgagagcaaaggccacacctggaaactgtaggagccagcgagttgggcagggaagggccagaaaccaatgagttgcatcctgggacctcacactggtggcggtggttaagatgaagaggaggaaaataaggcagggtcagtttcagaaatcagcacatggactcagttcagagtgggaggcaaaataaaaaacaaggcagcctcaaagagcaggaactgagagaatcgaacgtgaggaatgtgacaatggtcaccagtcttttggtcaatttcccaaatgccctgctttctggtctgggcccgcttttaacaggccatctacacctgggaggcagtgcagaggggcgtggcattggcatctgactctggtgggttcaatgctcacctgtcattgtgaccttggacaagatgcttagttcctgagagttattagtcagggttctctagagagacagaacaagtaggatatatggaaggagattttttttttcttttgagatggagtttcactcttgttgcccaggctggagtgcaatggcacgatcttggctcactgcaacctctgcctcttgggttcaagcgattttcctgcctcagcctcctgagaagctgggattacaggcgcccgccaccacatcctgctaatttttgtattttttagtagagacaggatttcaccatgttggccaggctggtcccaaattcctaacctcaggcgatctgcccgcctcggcctcccaaagtgctgggattacaggcatgagccactgcgccgagccctggaaggggacttatgaggggaagttggctcatgtgatcacagaggtggagaagtcccacgataggttgactgcgagctgcagagctggagaagctagtagctggctcgagcaggcagcatggcacagtccaagtctgaaatctcagaaccagggaagctgacagtgcagcccccagttagtcctgagaggtccccagggggccgctggtgtaagttccaaagttcaaaagctgaagaacctgcagtgtgacgtgtaaaggcaggagaagataaagcgtctcaccctggaaggaggaaaggaagcaaagaggacattccccttcctctgcctgtttgttcctgctaggcccccgaccaattggatggcgcccacctacactgagagcgagtcttcctctctcggtccactggctcacacatcagtcccctctggaaacagtctcacagacacactcagaaacagtgctccaccagccgtctaggaacccctcaatcccatcaagttgacacctaaaattaaccatcacactgaatctctctctgtgtgtgtaagagtgtagtaagccaaacagtggcccctaaagatgtccacatccatatccccaaacctgtgaatatgctacttgatgtagtaaaatgcactttgcagatgtgattaaattaaatggatggggagagcatcctggattacccaagtgggtcctgaatgctatcacaagggtccttactacagggaggcagcgagaagatataaagacagaagcagaggtcagggagaaggtgctacgctgctggcggtgatgatggaggaaggggccacaagccaaggaatgtaggtggcctctagaagctggaaaaggcaaggaagtagattttcccctggagcctccagaaggactcatccctgaggacccattgcagactcttctaacctccagaactataaaagaataaatttgtgtggcttttaaccatgaggtttgggtaacttgttactgacgctgtagggaactatgacagatatagagaatgctaattctctgcacggttgttgtcaggagggctcagagcccatgtaggaaaggggcctaactcggtaaaggtagtgatgttacccataggggctgagtcttagacaaggtgaagaatgtgaccgcacccaccacgttgcttggcaccttgtggatgctcaatagagcttaggctccctgtccctccccttacaggtcagggtgtctaggggaaccccatcagggaggggctctgggacacctgtcctagtctgcgccctctacactgcacagtgtactactactacactgtaggctcttggctcctgtcccttagcgagcagcatgtgtgctgggtggtcatttcctggcccttcccctctcctgaatttacctctgaggttgcttctgtgttaactcagacacatcagcttccacctcagaactctttggctcttggaatctttgccacataaagttgccttttccaactgcctgttgtccttgcaagtggcttcctgattgctccttcccagaagggactgcttgtcctgtgacttccttgtctcccccagaggttccaagactgtatggggcccctggcagccccgtgcaatacctcctccaggtggcccactgaactctgcagtatggagatgagaggtgggccagggtctgggcaggggtgccactcagaggacagggtgccagacatcggtggttcttctctgagttcttggagggtggacagctgggccccaggccagcaatgagcacacagacccctttgtctcccagtgccctcagaaggctgtcccctctggcctctcacagggacattcgtctcggccttcactgtgctgtgcggggcccgcaccgacctcccggacaggcatgtgtgctgcgtcttctggctgaacattgcagcagccctcatccaaatcctcactgccatcgtcatggtgggctggatcatgagcatcttctggggcatggacatggtcatccttgccagtgagtagctgttggtgctgcgcctcctgggggtggggagtggccagggacaggaagggcttgggagaccttcatgtctggccgaggtcctgctcacccgctaagcacgggctctggagagggcttgcccgtgtcctcttcacaactccctgggctgcttggcactggggaccctccccgccaggcctggcccaacacctgcagggaattatgagtggatggcaggagagttccatcatttaatgcaaacttgattcagacacagaatggttttgtgaaagggtttaaagttacaaaatcaagtttaccaaagacaactcagttaccctttctaaaataacctagcaaaatcttaaaacagacaccacccattttaagcagctgtgcatgtctcccataccaccatccacgttccctgtattttcccacgcccatctacatgtgaggccacagttcctcaataattgacctcacctctcaggcactttgccttcactctgtaccccatgcccctcattgtgtcctataccccccaaaaccattcatagctgggatcgtcagtgtcagaggtaagctgagccaggtaagagtggcagaggcagaaggggaaactcagggttcaggggccctagaattatgtagaatgatctatagtcaactcagcctgagttcaggatcctgtgaatattcaagacccagggcacacacaaatggcaggaccagggtcagtgaccagttaggccaccaggccagagaagatgcaggtagatgcagagcctgagggagatgcagtggagcgtggtcagatgggctgcccggaagtggctcctctggcagcagagatcacgggaggaagtgggtcagctgcactgccagggtctcccagaatcagagcaaaccaggcagatgctggctactggggcagccagagcaggggaaccccaggctggaccagaggctgagcagtgagctgccccagggaggaatgagctgggaagcagcagggaagctgctccttcctcctgggaggggtgtgctcagggcaggggctgccctgtcggaggaatattgtgaggtaagcccagcaggcaggcccttgcatctccttcatgggatctcatcctctgggcatgtccaggggcgactttcatttgtctggagaggtgaagagcatgactgataggaaggaagtgctgccagccctcaggtgactcctaaaaattggtcccgacaattccacagaggaaatttgctgcttccccaggggcctgtgctctgcaggctcctgaccctgttcccagctggaagctgggaggtgcttctgccctcagaaggttgaaggctgcccaatttgtgcaagatgagcccctcttactggctcatcttctctcaaactgagcatctggccaggcactggggacctgaggaaggaacctctgcattaaagcggaacatgactgtgtcacagggtaggtctcaataatgtatgttgatgcctcatctgatctctagagctttctggtacacttgtctttgatctccttaatacccaggaacgaagaggttggaaccttagagataaagaactcccttcatcatgcctagatgaggcattgaggccccagaagtgcagatggggatccagtcacttcctcactttccattgccccaggctgttgacttggccagaaactcctctgctgtggctggtgtggggcactaactggtctgcaggataagcaagtgctagaagctgcagcccctacctttgccatgcagccttcactgggggtcagcgtcagccccttggttgtctgcacactgtttccagggatgctgtctttgcatcaaacttttgagaatgcttttggggggtgtattagttcattttcacactgctgataaagacatatccaagactgggaagaaaaagaggcttaatgcacttacagttctacatggctggggatgcctcacaatcatggcgaaaggcaaggaggagcaagtcacttcttttgtggatggcagcaggcaaagagagtttgtgccgggaaactcccatttttaaaaccatcagatctcgtgagactcattcactatcacaagaacactgcaggaaacacccatccccataattcaatcatctcccaccaggttcctcccacaacacataggaattgtgggagttacaattcaagatgagatttgggtggggacacagccaaaccatatcagggggatagacttgagggctgaatacaaaaaccagtcacacctcattcttgcccactgcctgactgccagactctttcacccaactcagcaagggaagcctttgcatttttttcccacaactaatcccacccccaaagggtgaacagttgctactcatgagatggtgctataggtgggattactcccagcaaccatggaacttgtgtgtctgagagtgactcctttgaagggaattatcacaatggacttttctatcctagaagacagttggataagggactcttctttctggtgtcagtccagccccttgctataaaaacagaggaaacttttcagttgtaacagtacactttggcttttcgcatggcattgcctggggtgtcatcagcaaacacactatcatgaaaaactcctaagaggggagtcagagaaatctagatgaaagtgggagttaacatcaggaagttgcaagcatgttgcttgatttatatgaataacaacaaataacaaacaacaacaccctgtcttggtcatgggtcaataaatacttggtagctctatggtgggctctttctactgccatgcccatggcagacattgctaatcaatcatgacactttctggtgaccagtctcacatgttctcagcacagggcttcaggcagtcactactaattgatccaagaggtctgcaagataaaatctgtttgccaccctctggcctgggtcttccccaaagtatttttatatatgtggctcctctccatagaaatggctaagcacatagctcagacagagccagtgtggggccaggatggggcacatcagcatctttagattgctgtagtcaaagctctagctgtccaggagctgccactcctcatgtccatctggaatttatctggaggaaggcatgagctgaggatgaaaaaaaaaaggctaggtgctgtggctcatgcctgtatctcagcatgttgggagactgaggcaggaggatcacttgagaccaggagtttgaggctgcagtgagacatgatcacaccactatactctagctgggcaacagagtgagattctgtgtcaaaagaagacaagaataaagaatgaaggcagcagtgtgggcatggccaggatatggagggctggggaggcagtggaccaagctccctggcagtgtgagagcccctcgctgtgcccctagccacacccacacgcctggtgggcagaccactggccactgtggctgtcaccatgagtactgagcactccctgcctggggatggcgtctgagaagccactggcatggcccctgtcccatctcccaggcctcaccatggatctgctttgtttcctgtgccaagcgttccctgtggctctgttttcaggctgtgttttctcttcttctctctctcctcttcctcctgctgcctcccactctgtgctgctgcagtttcccaaggtgagtctgcggatggacgtgcgggcctcgtgctgctgcttggggccctcccctcccccgagacccccactcctgcacacaaacaccccacccactctcccagtgggtcaatgggcttttatgtttagcttgaacttttggtttggaaaatgcttaaacatagacaaaagtagagcccctagtaaaatgaggccctaatgcccacaccagcctcaactgctatcaattcatggccagcctcctttcctctgtcattcgccacatctcccctaccccagcatgggttattagcacccaaaattgagaaatactctgctaaatgaagagaaaaaagcagctcaatacaccaaagctcctcttcagactaagttcactggctaataggaataaccgctcggcaaattctgctcatgtaatagcagctgggaatatttcagtaggtatcgttttttttttcttcttcttcttttgagacagagtcttgctgtgcctcccaggctggagtgcagtggcgcaatctcggctcactgcaacctccgcctcctgggttcaagcgattctcctgcctcagcctcccgagtagctgggactacaggcacatgcctccacgcccagttaattttttgtatttttagtaagacgggatttcactgtgttagccaggatggtctcaatctcctgacatagtgatctgcccgcctcggcctcccaaagggtatcttcttaagaaaacaaacacaataccctttcacacctaaataaagcagtaacaattccttactatccacagagctcactttttcccaaaggactcatgatcaacaatgttttaaaggtttagccttcaggcgccctttcctgccgtaaccgtccagcaggttggacgcacacagggatggctgctcccctctgtatgccatcttcctcctttcttcctccttctatccacccataccagatgcccaaccttcggggaagcctgcctggcacctgctcccaaggctctgcactgggaaagcacaccagaccagtctgtaagcggcttccagatgtgggttcaggagcatgtcgatagccttttagctcccaccccaaatgcccgcccgtcatacattcccagtagacccagtactccacatttcctgattcattcttttgtttcccattagaaagtcaaagcccttgggaaaagttgtgctctgatggtagcagtcatttacaccttagtataaacaatgcctcctgtgtgcattctgggctaggggcacctcctggagaaatcctgaagtaagcaggtgtctaaccatctctcctttgcttcttcctcacaggctacaaggagcagggcatcccacagcagctgtgagcccacgggagccgctggggagatccaggggggccctgtgagggctgcaccaggcagctttgggcacaaggacctttacatgttcttttctgccattttctggactgggggtggaaagggggtatttttaaaaatattatttattttgaaaacgcatctgcttttctcagcaggttgtgagggctgccagcccctcctgctctggaaagcactgtgggcgcaggcaccagagcatcagagagtggggtggagatgagaacgcccacagagaggctgggatgctccggcaggctccaactggccttgctgtacccactgcccaccgcaaaggcacgccacgtctgctgggccgggccacaccgggccctgtctgggtgagcaggggctcaccaaggggacaggactgtggtagacccgtcctgtgggaccccacctgcctcaaaatctggtgccccgagtgtttactgtgtggtctcctgggggcagcaccagggtgtgggtgaggatggccaggctccaccctagcgtggaaaggcccactgtgcccacagctggcctgaggcctcggggagaagaccagtcccacaggcgtctcctgggcctgcctccctgaccgcaccccccgcctcctcgcagctgaaatctgagggctgggtgtgtcgtgacctgtgttttcctgggaaggagaggagtagctccttccctggggtgaaactgccagatgtttatacacaaagttattagactgaagcaggagtgggcagactagcaggctttcacccaatacttaacagcatttctggcccacattcctttttctgaagtcattggggccagatgtgtctccgaattgagaaattttagatttgagaaagacaatgcgatccatttatcgtacactttctaacttcccggcagagtgtggaacatctcgcctaccatcaggcacgtgaatatttctgcagagaaacatgtgactagtcccattaactgggagctatacaaactgtaaatagcctcacctcagttcagtctaattttgccactaagtaacttagggaaaaacttaccatttgagagcttttagggtttcagaattgcaagaacaattgtatggggttgtggaccttgatctgaaaatcctgcttgcaaacagatgtgttagagggtgaaattgtcggcattacacaaggactccttcagttgccaaaagaccatgggcctctttaaggagcccctctgtaagtgattgggacagggctagatccctaatgggggctaggggtggggagaatctagcagaagttgtccaggatactgtggatcaagtatcaatctgaaattaagagaaattagatactaagaggatggacatttacatgtctgtttcctttcctttcattttcattctaacataggaaatgctaacagatggggctggcccaaagtcaagcttctgactccacttgacacagtgccattgggcatgtccctctctgaagggcttgtttgtctatcagagactgtcagaactccatgagggcaggagaagggattttgcaggatgaaagtgcttgggaagtagtggccaccgttctgggggtttcagcccacctaccccatccaccgggctttctaatcacagtcctgcctgagaagcgggccctgctgcccaccccttatcatggatcccttagctactgtccgtcttccattgctgcctggggctgggctgccgtttttgaacacctggcagtgtctttgtcgcgtcctgtcctctcttcttacagaccccaacccaggcctttgccttcttctctcctgtttggaagcctctgtatcttcaaggtgtgggaacagatttggttttctctaaaaagctagaaccttctgctgtgtgcagcaggcatcctccaggctggtgctggctgctctcgaggaagctgcgtcagagtggagctgcccctctactcagataaaatagcttcagctgcaggaagccgccccctcccatgcccaccagcccacagcccttcaccccacacagcccccagagtttgcccgacaccccctgagtgatgacaggtctcaggagggggccgcccccacaaatgggaggcggaagcttattttccccgcttgggctgggggcggctgctgagggggtgaagaagagatagcaatttatgtcgcatgtttagtgacacaatccagatgcaggtgggactttcttgagtggcaggtgtcaccctgggtcccgtgtgggatggtttaatacaggggtttgtgtgtttgtgtgtgtggagggccactgcgcccccagatcctcctctcccccgagggctgcgtctctaaacctgggaaaacatcagcctcaggaggaggcccctttccgggtaactgatgtgtgggagaagccaagaggcccctgcctgtctcctgaatgaggctgtgagggttgccatgtgggcgggaccggttcaaaatagcgcccccgcccctctaaattagaccgtggtctcagcatgatcatcttcagtagataagggacagtggctgatttactccaaatagttccagctggccactcagaccagggccagagttaacttctcaaacaccagccagctgaaaattagggttctcgtgcaggcaagtgcatggttgacacacagccctttggtgacaaagctgggctttgcctgcatagtgcagacaaggctgttggttcagaggctgcagggcacattccaggttggggccttttgtcggtcggaattcaataggacattccctggctgtgggtgtttagggcaggaattacaggcttgcagagaaagtcagaggcaatgagatgctcccagtaccaaactgtgacactgggatcagggtggtcattcccttgggtcagagtgggaccctagagccagagtgagctgtgggtggcctgggtgtgtcctgtggacggcggagactgttgatttggatgttgagctctgagtcagtttcagaaccaaggatctcaggctgagaaggccaggtccccatgggagcggcaggagtctgatggctctgctgccagagcctaccccagcctgccacgccgctgaccttcccatggtaaggaaggggcaggcagcatggttcccaccctcagctgccccagacccacacatccagccccaagagcagcctcacccaggcacagtgcagggcattttagctcctgggaggggagatgcctttgtgagtttcagatgtcagaggagaagctccgagagagtaagtcatgtgcccccaaacactcagctcctaagtggcaggacaggcaagtggccaggttgggccgcccccacagcctgtgccgtccacacactcactacagcactcccagaagaaggagcagaatcgcatgcagcccagagcaggtcctgtggaggggtcctcacccctcaggagtaatagggtgattatgtcacatgtttagtgatacaatcccacctgtgtctggattgtgtcactaaacatgcaacataaattaccatctcttctccatcccctcagcagccgcccccaccccaagctgggaaaataagcttctccctcccatatgtgggggcggccccctcctgagacctgtcatcacttagggggagttgggcaaaacctcctaggaaggtcctggacgcctccaccctgccccacaaggctccgtactcccacctgcctgggcagccctcacacccatgctccctcctttaggcaggcccagaaaggtgccccttcctgagggtgttgggggatggcggcagagagacagctggtattaggagcttccccatcctaatgtgcaggaccaagttgcccgctctgccagccaggggctccagccatgctggcacaggcatctcagaggtgtgagatgaactccgcctcatgcaggatgcccagggctcggaagcagtaaggaggatgctacagaaaggaactgcagaaagaaaaaaagccacatggttaacttttcccctggagggcaaaggggtccggctctcaaaaagaaaagccaggcacagatcccaacaccaagtgtaaggcagcacaaagtgggtctgaaaccccaggaccgggtcaaaggccttccgaaggcccgaggttcttgaggaggaggggaagctgatagggccctggtctttctgcaccagcgtggctctttaaaatacaaaacacccacaaagccaaaaaccctgaaacatgttctttagctaaccccttccctgcccagatgcctgcaattctgagaattcacttcagttttgccagatccaacccctaggcttgagggtggagagccaggcctcctcagggtcccttctaggctcccaggcccaccttaggctttaattgcattggctgtttcttatggtgttagtgaattttgcaaagaaagccctgagcattgcataaatgcttgggggcgtgtcatttaaatggaagttctccaatagtggctgaaggcagagtttactgttatccctccctcttgctggctttgctggagggcttttatcagagagattggaggtgggagagcacttttaaagcacaccccaccccctgcacccgagcggcacctaagcttcccagagaccatgaccttgtatgtggctggaggcctcaggcttagggagcagcctgaagcctttgctgtcaaccctcccaggaaagaagccgggcctcaggctgaggaaaaacagagtttcctctccagagggctcaatgagcagccaggtagtggcctcgggcagtcctcaccagggggacacctccctgctttgcattaactcatcagcaagctcatcgagagctaacgtgggcccagcagtcctgtgcttggaaatgatgccgtcacctccacactcctgctgttccagcctctgcaggtgaagctgcaaggtgagcagaggcaggcgtggggacacactcttcaaggactgcactgccccttctccctcctgagagctctgtgcactgggtttggggatgaggcgccagcctggtcaggggaggtgactgtggtccttctgaccagcttggatctttaaaataatcacaaaaaagctcagcctgagcaggtgggtgcaaggctcaggggcctgtgtttttcatcaatcagttttcttcctgcaagattcttagagctggatgttcacgggatcatggggcatggaggtggtcacgctcagacagtcatgcaccaccctcaatcccaggccctgcagagataggaagaatcccaaccagagggattcttccccaaacgttcccttgtggcccaagagtgagttccggcctgagtgctgttatgactgccggcgtctctccgactgcctctcgcctcagtttaaccatctataggttaggaacaaagaagggcttaggcagccatcgtttccccatttctgtcagagccaagggcttggaggcccagccccatccgggcaagggctgtccgctcctgcccaggcctcacctcctcgctgcagctggcaagattctttctagcagaacagaaacactggcccccaattccactctcccctcctgatgctaccgcagagggcagaaaggtgccctgtagcgtccaccatgtgtgtgtcctgagtttccagtgcaagtcatctggatttgcatttagctagggaaactcggccctcaaaccctctccctctctgcctgaatttgccaaaatgccaaccatccgggcaggtgtggatgccacagtccatccccattgcatttcacccccacatggacagaggcacacactcgcacacattcccagcacctttgactgctgggggatgcaggccagggtctgcctggagcctcagggttgggacttatctccaaaggagcccacaccccctcttccaggatgggcactggctggcagcacttttttccctcatcacatccctgacccctgcccagcccacatgcacatgctgtttcctgtctccagggccctagcctgtggatctcttcctcccatgcactcctagggtgaatgggctcagcaccaaacctggctgtgcccattccccacaaccccagcttggcctcctgtgggaaggagaaggcagacctgcccagaggagaggggcagtgttcccacccacctgctccagcacaggaaccagggaggaaagaagggagagggaggttccattcaccgttttctgggttagcgcttgattggatgtttcaagcaagggacaaggtgatggtggctgtaataggctcctcgtgggcaccgtcaccccagaaggcctgggcacccatgagaacctgtggccagcccttttcattggctgagttccctgctgttgtgcgtggtgccattttttttttaaacaacatatataaaaacaaaacaactggttctgtgtgtatcaacttaatttgcatatgaatgagtgttgtgttgtgatttgcagtgttttgacaccgtgattggctttgtttgggtctctcttctttctgtgaaattaactgctgtgcgttttcactgttcttagagaagaccctgagctcctggggttttcttgtctcacttctaccctgacctgctgggagcccaccccaccccagtccagccatgagggtatttccagcctattccaatgactgaaacccttcttggaagaaaacgtctaatgtcggggacgtagggacgcttccagacttgccctggccggaaccctgcagcctggggccccagcccgcctgcagctcagctttccccaacaccctcaggacccagccccagccccggcagaccttccctgggagctgcttaggtggtctccacagcgccctctaggggccaagcagggttccagattctccagccttctgccagctttaaaacccttcactcaagcagcattactgtacatgcaatgaaaaatactatatatgacagtcaaaacctgtgtacatatttccatgtacatatttatacatacacacaccttcctattataaatatataaagcatgacatctctttggcattccaagtttgtgtttttttaaatccttggaaatacggctttggaaacctttttcttcctttccctcttttctatgttgtaataaacattcatgtgacctttctggtagtttctcaaatccctgtgtcctcccgtgttcctaatcggacagatctctgggacaacgcgccttcctccccacctctgcagcctttgctattggttggctttccgttatgaaggctgtcctcccccaaggcgggtcttgagttctttcagacctttttcccgaattccccttcttccgaaaggcttgtgcaagttactcttcaaacagcctcatctttgataatctgatccctttgcaaccaggaatttgcgtgctaaatcaagcatcaggccccagattgagtttaccaagaataagtgtacagatgcagctcatttcctgctgttaattgttagactggttgatgagggaaatgtgggcaacatacatatttgacaaagacttctgaataaatgagagtctgggtaagagtggttaggagaatgtataactacctgttcagttacaacgaaggacaggttgcacctgggagagaattgcatccacaacccagccaatgcctttactcataatgggatgaagacctacagaactgaccaaatttgtggataaggagaaataagtatattagacgaacaaatcagaatcccaaaatctcctgacgggcagaggcaatctaactcgatgaaatctaatagcattcaatgaaagagttgtgcttgacatgaagaaagctccgtgctttccttcatccctggggagttactcaacaggcagctcagtgttcttcacggcatgctggggctgactacacaggccatctggtttcagatgcacgaggagctgcaggctggggtccggaatgaaaccgcatctgcagcgttgcattcagtactgggtgccatgggggagcaagtgctctgacaacgagtgtccaggtgtcattcctgtcactcacacccaagggaagggccccgccctgcctcctgccatttcctcaggccagcccagcacccttagggtccacttaccccaggagaggctgcagtcttaatggcctcgatgctgctgttgtccaaaagagtgaatcatcttcaaagcacaacctctggtgagacttgaagctctactgcgatggcccctccaaggccccagaaatggcatctgtgcctgaggatgatttcagttgctgctaagaccaggacctaaagcccaaggcagtacaatgacctaaggcactctcagagtcccccagacactctagggagcattttgtgatcacttgcattgtccaaacactcgatgtgctcagattaaactggaatgccccggctggaggattcttctgcagtcactcagtttcagaggggctcatcagaaggcacaatgggagataaagttagctccccttccagcactgccaagtgaagggaagataccatttgaatgtactaactcacattccttctcttctcccagcaccaagcctcttaacctcaggaagggtcacgtgggttgagccagccactgcctctctgctggggggtgacaactttgacagagttctcctcaaacccagaaggaaagggctgtgacaaacatgtaggcatctgctccccgcaactccctacaccccagaccctaggccctgggagaggctcatgcttgccagtggccagtcacaggaagggacacatgaggatgtgcaggggacgaggggctcgaggagatgggaaggcagtgcttgggtttgaggacggggttggcgatgcattcctcagaggaggagcacagcccaaacctagtgcagtgagagtcccaggtgggggaccctgggaggcacatcagtgcaggctgcatgttgggccaccgaaaccagaggatgggtcttcattcccaagaggaccaagatggacatttctgggctcctaataccaagtcagcctctgagtaaagccttagggaagggtcatgggacccaagattcagtttacataaaacacgtcaggaacaacttggggtgataaagttgcaggacttttccttagttcagccaagaaaattcaggctcacagacaatttgaatggtgagtgagacagggttttattgggtgaaaaggaagaaaagggggaaacagggagtctcgctgggccagagaccctgctagagcgcttcctgcccacagcttgagtcccaggttccacataggaaagggggggcgaggctcctccctgctgcaaacgtcatgaacttcccaaggctccacctcactgtgcaggccggttggagtttctgcagtgaccccctcccacctggctgtcccattcccgcctcgaaagaagtccatctaactgcccttagattaaggataaggatgaagactgatcttaactgcttcctgctgacagggggcactgtttttgggaaatggcagtcagaggtccctcagatgcctgtctaagggtccccagcagaagaggccatcatcagaagctccggttgcatgactgttcagagtttgatggcctgaaggcaagaacagacaaacggggtcattagaaaacatgtagcaaaacaaaacaggccaggcgcagtggctcacgcctgtaatccagcactttgggaggctgaggcgatggatcacctgaggtcaggagtttgagaccagcctgaccaacatggcgaaaccccgtctctactaaaaatgcaaaaattagcctggcatggtggtgcacgcctgtaatcccagctactagggaggctgaggcaggagaatcacttgaacccgggaggcagaggttgcagtgagccaagaccatgccactgcactccagcctgggcaacaaaagcgaaactccgtctcaaaataaaacaacaacaacaaaaacaaaaacccaaaaggaaacacagggagacaaggggaggggtaaggacagctcaaaaattctgaggccttttaccagtttgcacagggagagggaggccaaaagcccagctggcagaaactggacccttttgctggcacgttgggcttctgagttcccttcccctgagcctaatcctaagccaaccagtttaatgtttgggaaattaactctttccagtttggaggatgcatctgagggaatcgtcccatagtacggagacacaattacctatcagtgaagagaggacagaggagaagaaaggaaaaaagaagacaccgtctgaaggagtcccaggggttcagggtgcatttgaaaggggcacagactgcagatgaatggctacccatctggaaagaggggagcaggtgtccctggttcccttctcttcctagcagatacccacggtacatgagggagagaggaaagagtgttctctttccctcttccatccttgcatccccgagtcccggtgaccttggcaggtgccgccatgagtgccaaagtggcttgcacccatgaagcagggagggcctagagaataggaattatccgctctcatctatgcctctatctcctactgtcagtagccttggagttccctagacctcatttatgccatggatatttatgccgtgggtttatccatgaaacaagaagcttgggttggcttaattggcaggaatgagccatgctcacctgcaccgtgccttttaacctctgttgtcatttgtctctggatccctcagatccagttttccttcttaggactttgacccaaagcttgaaattgagtttgggacaaaaatgtgtctcggtggggggtgggggaggtgcatggactccttatcataagccaaatgctaaggtgaaactgtggaattgagtcctcctccaacaagggggagaaaaagatgtcttgtgacacaaccagataactggtggctatagttatgcttgcgagggtttgggtgcatggtccttggctttgattagctttcttggtcttacttttccaaaaaggaaacctccaagtgatgggcatcctatgtattcaaatcacctagcaggacttgcaggataattgcccagagctagaatattgatccagatttctacattacccatcccttttgtcctttctgagctgcagctggagattgctggttggttcacaagagcaagcagggttagtctaaaatgtaggtgaaaacttaaaaacaaccaatgagtttagaatttaatgacaaatgtataataagttttgaaacatgatttctctctctccagtcctcatttttgttaaaaaatcatcataggactgaatggtttgcaaaatagactttagtcttatacttggcctgattaattgcataaagtgcagcaagaataattatttctacataggcctcttggattggctttgatgcaagtttgttccacaaggaatctcagataagaccgtttaatgctgagcccaaccatgggtttgtatcctcaaacaactgtgagtttaccttaaggtcccaagataaacttggagctcccggacctgttagaaagtgacattctttacctgtacagggtaacatatgatgcaaacaaccatattaccgtaagaatactcacagatagtttccaaatcctagaggaaccaggcagagagaaacaaacatgctccaaatttttgttcataggagtaaaccttactcaattattaaaggctgtaaatagttccaagtgagtttccttaactatgaaaaacaaaacaagaatcaacaatattccaatcaaaagtcaaaaagattgcttcagctttctgagttcagttcatttagttaactcttcttttgtttgatatttgtgaacatttcaactcttcacgagtcctgtatattttcctttattctaatgttacaatctccaaagttatcagaagcctgtatatgagagcacctgttaaagttctatagcttattataaaccatcttttgaaaagaatcaaaacgagacaacaattgtctgtgaatagcaaaatgtccaggatagttacagttagaaacacaattgacgaagtttggttatcttcgcggtttacgataacttaacataccaaccttaattatgattgatagcatatactcagacattagaatcttagaaatcccatacaattttggaacatatgtttgtattcacaaaagtacagcctaaagaagactgaagatcattctggcaattccatgtacctaaacatgccaaataatcctgtttacctctttttttgggatgtttcagggaccctctgaaacatctgaaaagccaggtatcagaaaagacaattttgaaacttaagtttgatttccagaagccttttaaatatgtttaaagcacctgatactatgaaatagagttccagattaccacaaactatttattttctcaaaatcatgactcagaaattttgaagaagcaaaagctttttataacccttttgcatttagttaatatgttcacacagagaacctcttctacaaaattaatttccacagcttttccaccacttgtttgaaccttcagctttccctatctaactcaaaataatcctttaaccctaggcaaaagtttacatttccatgccttcttataaccttttacataaaaatcacattttattcttcttacaccccttgcatgtaaatctattttcgctagtttcaattacatgtcataattgtaactcctagcaatttttaacttaaaggtaaaacttggtaagttgaattgtgtgctaactgcagccaatgtttgccttcttacttaagggcctggttagttccacatgtccccaagccctaccaattacgaagccagcaagtcaaatagttctcaaaacccaaaaagcagtttgtaacctgaaaacacttagcaaactttgcatctgacctgcattaataatcttcacggctgtttttatttctcaaagattaaagtcacatgaactgaaaggtaccacggattttatattgcctttaaaaaatatttgatccaggccgggtgcggtggctcatgcccgtaatcccagcactttgggaggctgaggtgggcagatcacctgaggtcaggagttcgagaccagcctggccaacatggtaaaaccccatctctactaaaaatacaaaaaaaagagccaggcgtggtggcgtgcgcctgtaatcccagctactcaggaggctgagacaggagaatcgcttgaacccaggaggcggaggttgcggtgagccgagatcgcgccactgcactccagcctgggcaacaagagcaaaactccatcttaaaaaataaaaatttttttgatccaagcgcttttcttgaggcaaaattaattagagctctttttacagacatcacacacagtacatacacagataggcacaagaaaacccatttgctgggtggggccctttaagggacaggactaggaaagaggaagatatccaaccagagacggtcatcccctaaggcaggattgttaaataaagccttgccaagtggttactggccatgccccaggatgtaaaacaagatggaggcttgcagcacaaaccatatagacctgcaaagcacaccagattggccacagcccaacgctagccccacaaatcctttttcacaattaaagctttacagagaatataaacagggattcttatcattcctagcctagcaaaatgtcttctagaaagaaaaaaaaaaaaaacaaaacttgcttaaacttaactgctgatggggcggagaagaggaaagaaaaaaggtttaaaaatccctggggacgaacctcttattcttatacaagtggttcctccatcagggagaaaagtttactgcctaatgaagctcaaccccttggctggggaaggggacggctgctgtggtggtgcgtggcttgaaacaagccagccagctgtgtgagacccttgggccatgcatcccagcttctgcacagaggggagagggagcaaggagcccccgctggcccgtccttcccccaaaaggaaggacctttcttctgaactccggagcccccggatttggggggcatgtcttgcccaccttcagaagttcgaggattaaaatgcttaggagcaacagtgagaggttttgagtccccatttcactcaccacttctcgagcccccaaatggggcaccaaaacttttgcaggactcttccttagttcagttaaagatggggttctttgtcccatggccaggaaaattcaggctcacagacaatttgaatggtgagtgagacagggttttattgggtgaaaaggaagaaaagggggaaacagggaatcgcgttacgccgaatccctgctagaccgcttgcgtcgcagcttgaatcttaggttccacccaggaagaagaggggccaggctcctctgctgcagacatcctgaactctccgaggccccacttcagtgagcaggctggttggagtttctgcaggaaccccctcccatctggccgtctcaataataataataaccattgccatttgtgtcatgacatatgtttacaaggcactttcctccatcaagaagagattccaattgaacctgcatttattgagtgtctaccacatgccaggaatgttcatctgtgctattttatcttcccaaatagataagatggttgagatgattgtctcattaatatctgaagacacaggctaagagaagttaagcaatttgtccaaagactcacagctgggtaatggtggagccacgactccaaacccacccctgcctcctagcatccagtctcttatgtcccatggggcttctcagtcagggactcctcctcctctcccttcttgaaagacaccttcttgaatccctgaccaaagatgcttccagaaatggtagttgaggtttcttggccccctttgaggagaggattaggcggctctttcacctgctgccttaagtacctgctctgggcatgtggatggacctgcttgaggtaatagggcgacagcaagagtggaaaccacgcacattcactgagccatggggcctggatattccttcatgcccatgatcaagaaccagaaggagggacaagaggagatagactgtctccacgtacgcatagctggggagctaggacagaagtgccacccccagcgcagccctcatgtttcctcactgcctgctagagaaacacagagctgaaagtgtcagttcagccaccgcagtgtcactcaaccaaagcaatggtgagcctttgcccaggaagcagcaggctgggctgctctttgagcagggtaggcgcgttccctgcatggggctcccctccccaggccccagcccccacccccagccagcaggcaaaccctgaggtgctgggatgaaaaactgcccaggagaggtttgctgtcagctgggtcatgcagaccttctcacatagtggctgctaggagctgaattatgccccctcctaattgttgaagtcctaattcccaggacagaatgtggctgtggttagagacaggctctctaaagagataattaagttaaaataaggtcattaggatggccctaatccagcatgactggtccgtataggaagagatgatacttgggaggctgaggtgggaggatcacttgagtccaggagtttgagtcctgcctgggcaacatagtgagaccctgtttctgaaaaaaaaagaaagaaagaagagattcggacacacatacacagcacacagataaaagaccaggccaggtacagtggctcatgcctataattctagcactttgggaggctgaggcaggaagatcacttgaggccaggagtttgagaccagcctgggcagcatagcaagatcccatctctaaaatatatatgtatttttattatccaggcatgatggcacacacctgtaagttctcaactacttaggaggctgaggtgggtggatctcttgagcccaggagttcgaggctgcagtgagccatgatcacaccactgcactccagcctgggtgacagacagagtaagactgtctaaaaaaacaaaaaacaaaaacaaacaaacaaacaaacaaaaaccatatggagacatagagagaaaacacccatctacaagccaaggagagaggcttcagaaggaactgactctgcctacaacttgatctcggacttttgtcctccagagctgtgacaaaataaacttctgttgtttaagccacccaccctgtgattctgtgttgtggcagccctagctaactaacacaatgatgtgacacacggattgctgagatattcacttggcaggcagcaggaggagagggggatccccaaagcaaggtaagacacagcatggcaagtcacctgagtgtggtggcgctttcatggctcagggcgacagcatctcctgtgccctgggttgcctcagatacttctaaggcccacttgcttcctggttgttgggaggcatggctgtgcagctgctcctgggaccctcacccccgccagtatccttgggataacctggagacctgagtggccaggggaggcattgtcctcactggaacgtgactggcttgtgaatagccccttgggctggtgcctcctgtgcctgctggacctggagttcagggcccccaaaagggactcagtctggaagagttctcagaggaggaggaggaggcctatctgtgcccagagcaggagcctacagctgtctcgcagtcagaggggtggatatttatattttcatcaaaaatagctatgctaaaaacaaaaaacaaaaaaactctagaaagcaaagaaacttctcaaactaagaatgccattaatagaggaaataagcactttcaaactcccagaagctaccccatcttctgaggttccaaaccaggaggggagccccggaagtcaggggacagaggatccacctctgctgttggcctctgggaaaacctgaaacccatccagaatcctttgaaaaagccgaggtggtgatgtatggaatttattacaaagaaatccatgttgttgctttgagcacccggtcctccagcatgacggtgtccccacagtctgcatctgctgtcccctgag

SEQ ID NO: 43 - DNA, 7673 bp, Homo sapiens
ccgacagtctcctgctcccgtacgctgggcgccagctccggccgtgctgcccggctgcctgagagcgcgcccggccatggagccctcgcacaaagacgccgagacggcggcggcggcggcggcggtggcggcggcggacccccggggggcgtcctcgtccagcggggtggtggtgcaggtccgcgagaagaagggccccctgcgcgccgccatcccctacatgcccttccccgtggccgtcatctgcctcttcctcaacactttcgtgccgggactggggacattcgtctcggccttcactgtgctgtgcggggcccgcaccgacctcccggacaggcatgtgtgctgcgtcttctggctgaacattgcagcagccctcatccaaatcctcactgccatcgtcatggtgggctggatcatgagcatcttctggggcatggacatggtcatccttgccagctacaaggagcagggcatcccacagcagctgtgagcccacgggagccgctggggagatccaggggggccctgtgagggctgcaccaggcagctttgggcacaaggacctttacatgttcttttctgccattttctggactgggggtggaaagggggtatttttaaaaatattatttattttgaaaacgcatctgcttttctcagcaggttgtgagggctgccagcccctcctgctctggaaagcactgtgggcgcaggcaccagagcatcagagagtggggtggagatgagaacgcccacagagaggctgggatgctccggcaggctccaactggccttgctgtacccactgcccaccgcaaaggcacgccacgtctgctgggccgggccacaccgggccctgtctgggtgagcaggggctcaccaaggggacaggactgtggtagacccgtcctgtgggaccccacctgcctcaaaatctggtgccccgagtgtttactgtgtggtctcctgggggcagcaccagggtgtgggtgaggatggccaggctccaccctagcgtggaaaggcccactgtgcccacagctggcctgaggcctcggggagaagaccagtcccacaggcgtctcctgggcctgcctccctgaccgcaccccccgcctcctcgcagctgaaatctgagggctgggtgtgtcgtgacctgtgttttcctgggaaggagaggagtagctccttccctggggtgaaactgccagatgtttatacacaaagttattagactgaagcaggagtgggcagactagcaggctttcacccaatacttaacagcatttctggcccacattcctttttctgaagtcattggggccagatgtgtctccgaattgagaaattttagatttgagaaagacaatgcgatccatttatcgtacactttctaacttcccggcagagtgtggaacatctcgcctaccatcaggcacgtgaatatttctgcagagaaacatgtgactagtcccattaactgggagctatacaaactgtaaatagcctcacctcagttcagtctaattttgccactaagtaacttagggaaaaacttaccatttgagagcttttagggtttcagaattgcaagaacaattgtatggggttgtggaccttgatctgaaaatcctgcttgcaaacagatgtgttagagggtgaaattgtcggcattacacaaggactccttcagttgccaaaagaccatgggcctctttaaggagcccctctgtaagtgattgggacagggctagatccctaatgggggctaggggtggggagaatctagcagaagttgtccaggatactgtggatcaagtatcaatctgaaattaagagaaattagatactaagaggatggacatttacatgtctgtttcctttcctttcattttcattctaacataggaaatgctaacagatggggctggcccaaagtcaagcttctgactccacttgacacagtgccattgggcatgtccctctctgaagggcttgtttgtctatcagagactgtcagaactccatgagggcaggagaagggattttgcaggatgaaagtgcttgggaagtagtggccaccgttctgggggtttcagcccacctaccccatccaccgggctttctaatcacagtcctgcctgagaagcgggccctgctgcccaccccttatcatggatcccttagctactgtccgtcttccattgctgcctggggctgggctgccgtttttgaacacctggcagtgtctttgtcgcgtcctgtcctctcttcttacagaccccaacccaggcctttgccttcttctctcctgtttggaagcctctgtatcttcaaggtgtgggaacagatttggttttctctaaaaagctagaaccttctgctgtgtgcagcaggcatcctccaggctggtgctggctgctctcgaggaagctgcgtcagagtggagctgcccctctactcagataaaatagcttcagctgcaggaagccgccccctcccatgcccaccagcccacagcccttcaccccacacagcccccagagtttgcccgacaccccctgagtgatgacaggtctcaggagggggccgcccccacaaatgggaggcggaagcttattttccccgcttgggctgggggcggctgctgagggggtgaagaagagatagcaatttatgtcgcatgtttagtgacacaatccagatgcaggtgggactttcttgagtggcaggtgtcaccctgggtcccgtgtgggatggtttaatacaggggtttgtgtgtttgtgtgtgtggagggccactgcgcccccagatcctcctctcccccgagggctgcgtctctaaacctgggaaaacatcagcctcaggaggaggcccctttccgggtaactgatgtgtgggagaagccaagaggcccctgcctgtctcctgaatgaggctgtgagggttgccatgtgggcgggaccggttcaaaatagcgcccccgcccctctaaattagaccgtggtctcagcatgatcatcttcagtagataagggacagtggctgatttactccaaatagttccagctggccactcagaccagggccagagttaacttctcaaacaccagccagctgaaaattagggttctcgtgcaggcaagtgcatggttgacacacagccctttggtgacaaagctgggctttgcctgcatagtgcagacaaggctgttggttcagaggctgcagggcacattccaggttggggccttttgtcggtcggaattcaataggacattccctggctgtgggtgtttagggcaggaattacaggcttgcagagaaagtcagaggcaatgagatgctcccagtaccaaactgtgacactgggatcagggtggtcattcccttgggtcagagtgggaccctagagccagagtgagctgtgggtggcctgggtgtgtcctgtggacggcggagactgttgatttggatgttgagctctgagtcagtttcagaaccaaggatctcaggctgagaaggccaggtccccatgggagcggcaggagtctgatggctctgctgccagagcctaccccagcctgccacgccgctgaccttcccatggtaaggaaggggcaggcagcatggttcccaccctcagctgccccagacccacacatccagccccaagagcagcctcacccaggcacagtgcagggcattttagctcctgggaggggagatgcctttgtgagtttcagatgtcagaggagaagctccgagagagtaagtcatgtgcccccaaacactcagctcctaagtggcaggacaggcaagtggccaggttgggccgcccccacagcctgtgccgtccacacactcactacagcactcccagaagaaggagcagaatcgcatgcagcccagagcaggtcctgtggaggggtcctcacccctcaggagtaatagggtgattatgtcacatgtttagtgatacaatcccacctgtgtctggattgtgtcactaaacatgcaacataaattaccatctcttctccatcccctcagcagccgcccccaccccaagctgggaaaataagcttctccctcccatatgtgggggcggccccctcctgagacctgtcatcacttagggggagttgggcaaaacctcctaggaaggtcctggacgcctccaccctgccccacaaggctccgtactcccacctgcctgggcagccctcacacccatgctccctcctttaggcaggcccagaaaggtgccccttcctgagggtgttgggggatggcggcagagagacagctggtattaggagcttccccatcctaatgtgcaggaccaagttgcccgctctgccagccaggggctccagccatgctggcacaggcatctcagaggtgtgagatgaactccgcctcatgcaggatgcccagggctcggaagcagtaaggaggatgctacagaaaggaactgcagaaagaaaaaaagccacatggttaacttttcccctggagggcaaaggggtccggctctcaaaaagaaaagccaggcacagatcccaacaccaagtgtaaggcagcacaaagtgggtctgaaaccccaggaccgggtcaaaggccttccgaaggcccgaggttcttgaggaggaggggaagctgatagggccctggtctttctgcaccagcgtggctctttaaaatacaaaacacccacaaagccaaaaaccctgaaacatgttctttagctaaccccttccctgcccagatgcctgcaattctgagaattcacttcagttttgccagatccaacccctaggcttgagggtggagagccaggcctcctcagggtcccttctaggctcccaggcccaccttaggctttaattgcattggctgtttcttatggtgttagtgaattttgcaaagaaagccctgagcattgcataaatgcttgggggcgtgtcatttaaatggaagttctccaatagtggctgaaggcagagtttactgttatccctccctcttgctggctttgctggagggcttttatcagagagattggaggtgggagagcacttttaaagcacaccccaccccctgcacccgagcggcacctaagcttcccagagaccatgaccttgtatgtggctggaggcctcaggcttagggagcagcctgaagcctttgctgtcaaccctcccaggaaagaagccgggcctcaggctgaggaaaaacagagtttcctctccagagggctcaatgagcagccaggtagtggcctcgggcagtcctcaccagggggacacctccctgctttgcattaactcatcagcaagctcatcgagagctaacgtgggcccagcagtcctgtgcttggaaatgatgccgtcacctccacactcctgctgttccagcctctgcaggtgaagctgcaaggtgagcagaggcaggcgtggggacacactcttcaaggactgcactgccccttctccctcctgagagctctgtgcactgggtttggggatgaggcgccagcctggtcaggggaggtgactgtggtccttctgaccagcttggatctttaaaataatcacaaaaaagctcagcctgagcaggtgggtgcaaggctcaggggcctgtgtttttcatcaatcagttttcttcctgcaagattcttagagctggatgttcacgggatcatggggcatggaggtggtcacgctcagacagtcatgcaccaccctcaatcccaggccctgcagagataggaagaatcccaaccagagggattcttccccaaacgttcccttgtggcccaagagtgagttccggcctgagtgctgttatgactgccggcgtctctccgactgcctctcgcctcagtttaaccatctataggttaggaacaaagaagggcttaggcagccatcgtttccccatttctgtcagagccaagggcttggaggcccagccccatccgggcaagggctgtccgctcctgcccaggcctcacctcctcgctgcagctggcaagattctttctagcagaacagaaacactggcccccaattccactctcccctcctgatgctaccgcagagggcagaaaggtgccctgtagcgtccaccatgtgtgtgtcctgagtttccagtgcaagtcatctggatttgcatttagctagggaaactcggccctcaaaccctctccctctctgcctgaatttgccaaaatgccaaccatccgggcaggtgtggatgccacagtccatccccattgcatttcacccccacatggacagaggcacacactcgcacacattcccagcacctttgactgctgggggatgcaggccagggtctgcctggagcctcagggttgggacttatctccaaaggagcccacaccccctcttccaggatgggcactggctggcagcacttttttccctcatcacatccctgacccctgcccagcccacatgcacatgctgtttcctgtctccagggccctagcctgtggatctcttcctcccatgcactcctagggtgaatgggctcagcaccaaacctggctgtgcccattccccacaaccccagcttggcctcctgtgggaaggagaaggcagacctgcccagaggagaggggcagtgttcccacccacctgctccagcacaggaaccagggaggaaagaagggagagggaggttccattcaccgttttctgggttagcgcttgattggatgtttcaagcaagggacaaggtgatggtggctgtaataggctcctcgtgggcaccgtcaccccagaaggcctgggcacccatgagaacctgtggccagcccttttcattggctgagttccctgctgttgtgcgtggtgccattttttttttaaacaacatatataaaaacaaaacaactggttctgtgtgtatcaacttaatttgcatatgaatgagtgttgtgttgtgatttgcagtgttttgacaccgtgattggctttgtttgggtctctcttctttctgtgaaattaactgctgtgcgttttcactgttcttagagaagaccctgagctcctggggttttcttgtctcacttctaccctgacctgctgggagcccaccccaccccagtccagccatgagggtatttccagcctattccaatgactgaaacccttcttggaagaaaacgtctaatgtcggggacgtagggacgcttccagacttgccctggccggaaccctgcagcctggggccccagcccgcctgcagctcagctttccccaacaccctcaggacccagccccagccccggcagaccttccctgggagctgcttaggtggtctccacagcgccctctaggggccaagcagggttccagattctccagccttctgccagctttaaaacccttcactcaagcagcattactgtacatgcaatgaaaaatactatatatgacagtcaaaacctgtgtacatatttccatgtacatatttatacatacacacaccttcctattataaatatataaagcatgacatctctttggcattccaagtttgtgtttttttaaatccttggaaatacggctttggaaacctttttcttcctttccctcttttctatgttgtaataaacattcatgtgacctttctg

SEQ ID NO: 44 - protein, 138 aa, Homo sapiens
MEPSHKDAETAAAAAAVAAADPRGASSSSGVVVQVREKKGPLRAAIPYMPFPVAVICLFLNTFVPGLGTFVSAFTVLCGARTDLPDRHVCCVFWLNIAAALIQILTAIVMVGWIMSIFWGMDMVILASYKEQGIPQQL

SEQ ID NO: 45 - DNA, 219352 bp, Mus musculus
  misc_feature (1)...(219352): n = A,T,C or G
ccagacctagaggccacggccgtggtgtgcatagtcaaagcggaacactcgtgcttcttggctttggccagtggctctatctgtttatctgtgcaaatggtaatggacattcctttgtgcaatgttggcttccctgtgactgatttaatcagtagaacaagtgggttttgctgggaggagctactgccccctcagagcagaacaggagagtgttcagttctgtcagacgtgggtgaggacttcagcatgctcctttgccgaatgtaaaaatcagattttttttctctgtagaatgtgtgcacattctgtagttgaggacctgataaagtccatcctgagatgggaatggagggttgtcatgggtgccagccagtcacagggttcccctcgtggggattttccacagaagtctagtttctatgaatctgacgcattttgtgtggttcttgcctgctgactactggattcatctctgaagtgggaagctcccagtgtattctgatggaaatggaggcacagaatcagttgggccatgactcctgactccagaactgaactggatgctatggaaatgagaagtgcctttaggctggtagcctctaaggccggacactgaggagttccctacactgtcacagccaaacttctgctcaaggagcactgcagaggtagagagccccgtaactaggtagcgctttctccttgcccatagatcacacagcttggtggcacctcctctcctttgtccgtatccagaatggaacacatgtctacctccctcatctatgaatcacctccccagtgaagggacatgtggttcaccaccagtggaatacttacaagggatttctgttttcagacagtggctgaaggacaccataggcatgtgagtgctgggatgagggctgtgggggcatctgtgggagccccgaggaagtggctggctctactggcggttcttcaggaaggcttcagttcaagcgcgccgtactccgtccctggcgtatatctgtcctcttcctccataggaaaacagcaaataaataaagaaacggcaacaacacatttgctactgaagaccttgtgtgtttgactacaagaaagtagtcttaactttggagttaaattctagggaaccattttatttttgaggggccagacccacgtgactgtttaagaccggtttttattttctgatgttgagaactgtgccggagccttaactcttgctaccaatcccattgagttgggggccatttagcagcagcataacagatgctcagcactccgggtgtctaactcatgcttagcatttacctggatggtcctagacttagcatttattatcgaagcccgttaaactgctccctgcttttctttatgacagccatcctagtccatgtgccttctgcaggggagtgagcatagtttacctttcatgctcatcccgtgtagggccagtgtactttgaaacctaaggtaagctcgtttacattctttctagctggattccatactcaggttactgctatctcactcaaaatcagaacctggggctaccttttgtttttctgtggcactaattagatggtttttgatgagttccatacaagggccacctttcatggtcaggtgtgtgacctctaaatgctttgctggcttgttcaggaaggtcagaggtgaaacttaaggacattttttcagtttctctgtcgctgtgtctgtctgtctctctgtctctgtttctttctctctctctctgttcctctctcctaaactcaacccctttcattaacctgacaaaggcaaaggggcatatatcaatgactcaactatggcatatacaaggtcattcatgtttctggctgtattgaaaattatggctttgctatgccagactcctcttggcctcctggtatggtacgttcatgcggacagagcactgatagaatctattttgtacattaatgcctatagcagctggcatgtgataattctctcgcagttgtcctttatgagtgacttgagatgtcactgtgtattcctgtcacagaggatgaagcaggtggcagaagcgtagctctgtgaggtttcctctctgtttgcagacaatccactgaggcagaggtcaacatacagtaaagcagtttgggacacttccctgaaacatgatcgcttcacactgaaccatttgtagtgtggtaatttttattggcatgtgtcacagtgggttttaaagagaattctcatgtgagactatagtatgtttggagcgtcttctgttttatgaatctctccatcctctgtctctccgaccctcctcccatcagcccttatcatctccctagtcagttttgctcctatgtccatgtcatatacatatatgtcattctacatatgtagcatgtcacatagctttcatatatgagatgcatgactttcatgtcacttgtatgattcttatgtctctctataaaattcaggatccacgaattgtgaaaatatgcacacagagtttgttgttctgacatggtctcagttgccctggtctcagggtctccttctgcagcgatgttggcatggtgtgacgttgttatccacgactcagctttgagtccgggatggcctcgtttatcttcattccggttggatcccgtgccgccgctcctcacccccccccccccacccccgctcctgatgcctcatctaaaatcacatcctggggatccttttttttttttttaagttctgtgctgttaactagatggtttttggtgagtttagctgttgttaacagtgcttcaataaacattgatgtgcaagtatcttctgtgataggctgactcagagttcttgggcagattcccaggagtggtagagatgggtgttatggtaggtctatttttagttttttgtttgttttttattgagaaacctccatgctgattcccatagtgcttggactcgttcacactcccaccagggcttgggacgagtcctttttgccgtcatcctcgccatcacttgatgttatttgctttctctgttgagtgccattcagaccagggggagatgctctctcagtatagtagtcatttgcatttctccagtacctagtactggttgcacttttttttttcccacatgttgactggccagtttgtctgtgtttgtgtgtgcgtgaagttaaggccggagaatatcaggtgccttttacaatttctgtatctttgtgtttgagacagtgtctcacaaatgcagagtttattgatttggatagatttgctagccagccagaacaagggatcttcttgtgtcctccttccttgggctggctttacaggcacacacacttggctttcttacattagtgctgggggtccaaactcagcgctgcattcttgtgcagcaaacactttacccaccaaacctcctccccaccctgtgtttcagcattagcctggatgttggttggttttctgggtttgggttatttcggttctggagtactctatgcattctagctatttgtcctcagtcacacctgtgtttagcatggcttctcacccaactgttccttcaccggactgtctccttctgctgtgcagaagtgttttaatttcatgaaagcctagcttgttgctgttgtttcctgagcaagtagagatcttttcgtaaagcctggcctagggttgcacctcgaggtgttttctctccctctttctctaagagtttgagcatttcaggtcttacattaaggtccctgctccatctgaagttggtactggtatagggcgagagataaggatctcatttgactctcttacatgtgaatacttaatttccctggcaccaccaaatcatttctgagatcatttttcagccagtaagatgacagctttatacgcctggcctaacagatattttaaattttggacgatcaggtaagaatgggtacaactcagaaaccaattgttagtttttatgtttaggagaaatgtggcccttggaaagcggcttcttggctgagtgattttatattaaaaacaacaacatcacactaatcaccagccttaaaagttcgggagagcttacacaaatctggctttatagcttttctgcaagcctaggcagtctttccaggttaaatcgctgtacctctgtgaagctcacgtgtatccattcaccagagtctcccctggtcggtttctggtgctcatgtgactggttggctttgtggactgtgaggttggatataaatagagcagagtgaactggggagagagggctggaagaaagcacttgagccaaagccatttgttttgtgtactgtatactccacatgccaacacttctataacgaaaacctgagatggctccggactgtactcactggcagagtgagtatatggctgtggaacataaagagtctttctatgtgctaggaaaggtcctagcccttatcaaggttttgacttggtgttccttatgtaagtaggattcgatgatagacttcttcccagtggctgtcatgagagccagaggttaatgcaatgcccagcccctgtcttgcaatttaggggacatgttacttgggtaatcaactacatcttgactttaacttaaataaatgtaaataaactttgttatggagagagataggggagggagggagaaaggaagagaggaaagaggagacacactagatgttgctgcttattagaaggaaatatactggttattggaataagagaatactcttagcacaagggctgataaattatggctcaccaatgccacggaatattatacagtattaaaatgacaagttgacaataccatctgatctcaaatgctagctagaatttttaattaggtcttattgtatactggataccattccaagggtttccatgtattaatttactagattctgtcaaccaccctttaaactgggtattattattgccatctaccctgtaagaaactgaggcacacaaaaattcaattatccattcaagaataaatagctaatacattgtagcactgggctgtgaatctatgtaattaatggtcaaatagggtgtaaaggtgtgtcttaggatacatactaacgttgatcacatcaagtttagctatggaatattaattctcactgctgcttgattgtcggagtggtcttttccatcttaggttctactgtttatcatgttgcatcagaccttgagaagtgctgagcattttgcttccagcttcaatgctttttccttcccatcaaacctacagggccttcatgatgctaaacagaatgaaacctatgctaagcagaagcactttggcctgagtcctttaggttgcatacacgtacagcctgtaggccaagttggctgccttcgtggttcgctgggagcagtgaggcccatcaggagtaccgtatatttactccattggctgggtttttatttctttagggatgtgaaacatattattgctgttgagacatacaagtagattttattagtttattaaggaagctggagtttagatattaggtccaaagtcacggaggaaatccatacctttaatgagtagactcttatttggggtggtctgaatgagaatggtctcagaggctcatatgtttgcatgtttggtctccagttagtggaactgtttgggaaggattaggaggtgtggccttgttggagtaggtatggcgtgttggaggaggtgtgtcactgtggagagcattaaggtttcaaaagcataggccagcctgaatgccgctatctgtctctgtctctctgtctatctctgtctgtctgcctgccccctaaccccccacccccacccccaattcacctctgcttgctgcttgcagatcaggatgtaaagctctcagctaatgctcgctgtcatggttctcagtttcttaatcataagcaatcccccaattaaatgctttctttttaagcattgccttggtcatgtgttcctcccttcacagtaatagaacagtgactaagacattcgtctaacctcattttaaaagatcttgctaagctatgatatggaaactgtagtgatttaccaaaggcacttcaggtgattcttgcctctggttatagacttaactaggtcagaacttgtaattagcatggcgttcaccataggtgtcagtggcagagtggcttagaatagacattgaatggctttgtgtcagtgttctggggctgctgtaacaagcacaaactaaaatttacttccatagttcaggaggctagacagcacagttccaggtactgtccaccgggatttccgggattctgtctccctcgtttgcagaccttttctctgagtaaggagagaggagagtgaattcttcctcggcaattccagtgatgctaattgtcatccctgatgcacctctgatttctatgctcctaagaggccctttctctaaatttatcgtgctttgggaccttaccatatgtgttttaatctgtagtaaaagttcaggcttctgtagctaccgatctcgtcttttattctgcataggaaatgatcaaaatgaaagatttatccagcttgtatcaggagcagccacctttggacttctatcacctagtgaattgcttgccactcaacagaactttagttactgttcagttttgccgatgaattcatgtaagtgaagaattaatatcagtgttttcctgtggctgttaagcctattccttgaaatgaggttgccagggagtggtgttttagggggttgttacggtattaggctctgtgaatgttggttcatgtaatggatacctctgaggtaagtacgaaggaacaaggtgctgatggctgactgaggagtcacaggagacccacactaaaacggttgctagtgttgaaggtgaaatttgcatcccagtctctgatttcctttcttcttttaacagaagaagcactggattctgtgttagtttcttaaatacttgtcgaaatccaaagttatgacactagaattacatatccaggatgtattcctttgggtaacttgacgtgtgaatgcagctatggagttttctggtgattgcttcagttcaagcaacagtaggaatgaggaaatgagaacacatgcccacaaagacagacctgtaccttggtaatgaattcaaggaaaccctgcctctggctgcaatcaccataatttctatctaaaacttagaagtggttctttgcctggaattaccagaaagttaccagaaaaaaaatctacattgacttaaaacatcctgacaagatgggaatacataactttcttagtctggcacatgggccaccatcctagagaacattttaactcatgatggatgggtgtctggaataaaatgaaaaatgttcaaggctctctaatccccaggatgctagttcttagaaacacaccgtcaaatgttagtgagtcatagttcagcattaaggaaaggctctgtttaacccttcacttgcttccactacacattctaacgcttgcttatttactggatctccaagcctaccttttcaggcttccctttaatctgttcagcaaagtacataaagctccttaaagcaaaactgtcttctcattcattctaaatggcccttggaaaaattgtcaggtcacttctgcctccccgtcaaagcataggcttcctttagccctgggactcttcagtctcttacagcagcttccaagtttagatcacgactcacagtagaacatgcttcaaaccaaagccgcacaaagctgttctcagctctctctggcaagttatattctgaagagaagcttcagaaggaaggcctccacccaccgaaaaactgaatccacgacccactagtgtatcctggctggcaatctggaacaagccaaccaaccaaccaaccaaccaaccaaacaaacaaacaaacaaacacattctctctctctctctctctctctctctctctctctctctctctctctctctctctctctctctctctctcatacacacacactaaccggcatgccttgctctggggtcttaggcctacgttcttctattatggagggaggactattccttatggcagtgggcttctgccatagagcttcatatttcctgtctgagataaaagtcattattctttagctggctgtctttctaaccagtaagatgctcactataaagcaggagacttcccacttcttcctcattggagaatccttatttgtgaccgcattcgtgaatgtattagtgggaatctcagcctgaagttgtaagccaagggctgttgggagggaacctgatgttatattcacctgttcaggccttgatgggagctggcctgcttttccttcttcaattgctctgatttgaaaatactggagactgtattaagggtgggagagaggaaaatggaaattgacgtcagagtgatcgggcccatgccagcagctagttaaactgtggatgtctctgctgggtttcaggctcactgctaaccagttactttgcgctttcttcaaggctcccttcactgacagtctcttattctgggaaaagccctgtcacacaacggtactatccctgctcctgaaagggaggctcacttgcacctttcctgcagggtagttctctttggttgagctatttagtattgaagaaatattttcctggcaaggccgacacaagcaaggaagggcaggctgtgctctggcttgtgggaagtagacaaagaacacagacgtgggcgtctggcatactgactcagatcccagcccatacttacatattagctatgtgacctggggcagctttgccaggttccccgttttctcacatataaaatgaggctgataataaagatgcacacgcttttcgttttatggctaaagtgctactgtgctgtgggtgctcagcacatggggttgacacaggttgggctcctatgtgtgggagccttgaaggcagagaacatggagggtactaggctgatcttccaggttcctaggtcccaactgacggggctgtggagggcacattgttcctaaatcagctctcccagatgaaggttagagagtcacatatgtacccttttgtgtagtcctacgtttaggctgtgtttcttttattggatatgtggggttgggaaataatttatgtgattggagtgccatttttggtattatctgcagagttaagatgccttgcttgagggatcttttggcttggtgggatataaatctgattagaagctctcagtggtgtgctacaaatcattacccctctacgttccgttcttataaaatttggataacagcatggctccgccttttaggaattttaagtgcattagctaatgatgatcaagagaccttaaaaaatatgaaattcccaggaatgccaagagcttttgttagcagattggcattatttcgcttggcatccttaagagctgtgttttaaacaagagcatcctagggcggatttctgtttgtttttttttctttttgttttgttttgttttgtttttcctagttgtagagcaagagctgacccccacccccacccccacccccaccaggagtgttcaggatgctaagactcaggacccgatggaagtcctgaagtagcccaggcaggactggctggcttgggttgcattgaagtagaggaagagtctgggatataagtgtagttgaagtgagtctggacccaagggctatcaccatttcaagcagagttgtactcatcctgctggtccccatgtcctaagagaaacacctggaaacacccaaatccccccatttctcctctggatacttattgtaggacttcagggactctttgaagatgccactggtaacattttgaacacctccagtgaaagacttaaattacaggcacttaagaaagagatgcataggcagcagtatatcagtgcggtgtatgagagccgatttcctctttattttgtttcaggcagcggagcaactgcggtggttcaggcagccctatgcaaacccaggcaagaacgcgtagccataaagcggatcaacttggaaaaatgccagacgagtatggatgaactcctggtgagtataaggggaggagactcctagcgcttgctctccctgacctggggcttgtgggatggggatgggtgggtatgagccgcacccctttcttctcccctgggtatgatctatgattaatagtgttgattgcagtgttgggtctgcgcagttccagtggtctcagtgtgacactccatgcacattgtatgctccgccctgaggtcatgtggtttctaactccagagtctgatgtctggtttcttctggcccttctctaagagttcatgacatagctgtgaattcttccaaatgtaccttttgctcatttgtgcttttataagttacaaaaccacatatgaattgagttttcttttgtaatgtatggtagactccatttcagttgttgacacgtttgatactctcaaatgcttaccttctatttcctctctgaaatgaagcacttacagaaatagttggagcttgtttgctctatagtagatctgactatagaagcattggcgggttgagggaacatttgcttttggcttaactgactcattattaaatgaacagcttagcaaatggttattagttacccagcaaactgtgaagggttttggagtttaatctcataaatatagttgtcgttctgcctgccaggttttttttttttcttcctttttttttttttttttttttttttttttttaccttttggccatttatttcaggacaaaagaaaactgcagtggagaagttagctcacttgttatcccgaccataatcccagcacaaatattagtccagtagtaccgtacaagcgacaacgtatgatgacagttggctacacatgaagaggccttttgttttattctacgttgggaatggaatgccatcaacaagagctttttgtctgtcctcagaatatagcttttatttcaggcttaattacagtacactatagtataaattaagttcaaggataaagctgtacttttccagatctgtttggccttccattttaaatcaggttacacaatgcatagatctcaatgggactgaagcagtggattgccagtcaaagctcagattagagcaagggctcctgcaattacatgttaaacattattggttaaacaataatcattcacttatggaggttttttttttttctctcaaaatttcagccgtgcattgcttgcatgggtgttgtactgtgtaggacttacctgtttctgactgtgtagtcaccagtacaattgtgtctttgtcctcctccagtccccaaggtcatcttctctgggtggaaagggcattgactaaccagtggggagagctgggtcctgcttcagccactgacttgatttttagctgtagttgcattgcctaatagctttgggtcgtttttaagagagcgccgaagcggaaggttcgtgttgggagtcttcgttttctgtggctctgcatgagggtgcatggctttctaaatcaagaaccgtgcattaacactcatgccttgtttgaaatctcccgttaagagctcgcctgtgccgcttgcgtttcgctgtggcctctgccggatcctcagccaccaagtgtttatacagtgtgtacagcttgagatatgcctgctccccggcagtcttggaagcagttttcaagctgtgccccccatgctgtggtctggtctctgtcaagctctgagtcgcccagggccgatggtagcttttatttatttatttattttatcacacttggcaaacaggcatgatggtccagttagggctagaccggagatcagcagatacatccttactccagggtccctttgctgggaccagcacgtgtaccatcacagcttagcaagctgtctgtttaaaggctgtgtttttcattcctctgtgcgtggctccatcagtctctctgagtttgtccattggcagtagttaatttttctgaaccctttcatcttgctgcagtactacccaagctctagagaacacatgcatactcatttattcaataaaataaaacaatgttgttctcaatttaaagaatgttaaattaataaatgaattgctttggcctttacttaactttgaaccttgggcctttcggtgtgttgatgtatttagagatggtgggagggaaggctctggtacttcagaatatacttctgttattagcctgtccgaggtcatcaggcctttgtggtccagatgacggacataggagctttgtgtggagtagagtgcctgtgccctttcgacctctgccactgctgttgcttgcactttcattattcctgtggtttcacattttggcagtgtttgggcatccggtatcctagtaatcctttaattccatgagtgtgtattatctccaggttggggcactgcctcttctcatagagggtgccatgtgttaactggaaaccattgttcttagaagaaacaatggcccactgggggctttatcttgtgagagcattatgtcatagaagtcacaattatcaactatttaccagttcctggaacatctgcctcccccaaaggatctttcacccccagactgatactccctgctctgttccctaccctcagttctttccccgagttcatggtccttgtcccatgataggagggatctatacgcagagcctgatgtgacctcacatagccgtttcggacagttgtccacacagagccacagtacctttcctgtaatcatggccttgactccaggttttgctgagtaaggagacaagttgtttaaaagtgttaaccatggtgccagcttctccaagaataaagggaggaaaactaaatgtcagacgaactcacgggcactgagtaatcgctgattttaatttccctgctgaaatgagttcgcctccagttcttcaaggttaagctggtggaggatacaaaagcacatttatctgtttatctgatagatacttaaatatcatttctatagcgtgcttcatctgttagaaggttaagccacagggctgtatattgaatttcaaggctggctgttcgtgcaaaaccttgtttgatgtagtttaacagtaactcgaggagagcgtgcacagtgaatagtcgcattcaagtcgactggctggcgtttaagttctctaaacttgggctttctctctgtatggctttgcgtttttttcttgtctgttgcggagtgtgcctgtgactggctgtagcctgtcaggatgaagtgaccattgtgttttatgtcctcctctttcagcatgtgctctggccagtctaagatttgttggcccccatacttcagtgtcagcccgcattccgaggaggtcctgttataaatggaaatttaaagcagcttatcgcctctggaatgtatcttttcattgtgaagcagggatctgtgaatttcccatttcccaaatgctgtagatgcttgaaggctcttgttccttggtctagcagtaagccagcctcttcatctgggatgaggaggagtgggatttttgagcagtggacacctttctgtcccctgtgttggttgggagctacttcagcaggctgctaaacagatcgcctgctctgcagtgggaattttcagacttgctaagtgaggttgacccttctcgtgcagactggtgagctccttttggagggagctctgagcctcttggaagggtttgcttccctggtttggggtcagcttcaacggttagaaacactaccctagggcaccattgaatcttcttaaaatccattatataagcagaggattaagcatctttttttttttttaaggcatctgtcttttcagaccatcatcagataataaaataaattccataaacataccattcatttctatttaccttgtaattgaacttttcttccaggatgttttctttatccggaggctactgaacatttttgactcatgagctaatttggctggttttttttttttttttttttttttttaaggatcccatcatgcagccattatttgctgtaaacatcccttctcctgcctcagtctcccatgtgctgggattatagatgtgtgacactgtgcccagcattttcttgagccctagtttttaaccatttgtctcttctctttagctctgacttgggtccctgggttttaggtctgtctttggtttagctatggacaactcaagtccatctcccctgtgctactgaactatcaattcattattgttagcaattgtaatcattaggccatacattgtaggaggaaccttaattcagcagccaaagctcccatttctttaagagagcaaggcagggggagcagaagagaaaagaaaagaaaaagaaaggaaaaaaaaatcgttcagggatgacattatgaaattatgttgtgatttcagtttgtgatggatgacagatgtggacaaagtcatttcaaaggaaacaatgacactataaagtgctgactgctgagtgccgtgggaggggaggggaaaggaaaggtcccagagccagaggctgtgcctgcttcctacttaacccagcacagctgcccagggtagggagaacttaccctggggctccctctccttcgttcaaagagagtcacctccttagatggcagaggttaacctccctgagagttctaggattgtggctgtttgaagctaagatctttaaaaacatacgctttccgattcacttaaagaagaacacagattactagcaagttgtgccgtgcgtgcgtgcgtgcgtgcgtgcgtgcgtttactgcagtgttgtgctgtggagagaaaacactcgtgtgaagttctggatctgggcatgcatgccatgtgctcccttctccacttaaacgccgatcccagtctcacaagttgccttcagttgtcgaagttccggcttctgctcttggcttcctccatcatccttgtaaaggcaatttgctctgtcacagacaagagtcatccataaatcaagactttttttttctttcctcctcagcaaaaaggcattgcttgctgctgccggggctattatttttctattcttttcatctcctgttccctctctcccttccatgctcttttctctcctccccctcattagaagcataaattagctttgatttatagagtgttgcggagaaaccaaagctttggatagttccctagtttaatgatcatattgagagcaatagttaacctctaaccgtaattagatgcaggatttccagtctcttcattgcaggcctcctgagaacaagtccccgctttatttgaggcttaaaggaaacaaacaagcaacctccccccacccccaaataaaaccaaaccttgtctgtgctgtgttagcaacgctgctcccttttcaagtcctatttattgtttattgcaggaagattactctgctctagagagcttccagctttgcaagttggcctccaaacagcagtttatgattgtcctggagtagtttctaattctcttgaacgtattaatcttctaattagtgaattgcctacccatcgtcccgctcattcctcctctgacgtgggacccattgcattcggctcttcagtgcagtcttttacctcacgccttcagtgatggaatgcaagcccgcttcactgtgtgcagcgccacttgaacagtttaggtttcaaccgtgtattttctacttctcaccacacagctccggaatcggtttcatctctttcagtgttttgagtgtttttttgttttgttttgttttgttttgtttttttgttttttaattaagcattgcccagttggaggcagggttcagaagggaatttggggaagggctagtttgaagacctggactcatgttaaataaaggagagaataattacttatgtccaaagcgaattctcttctgtcgttctgaacttacattggtctataaatatgtataatttggttggaaaaatatttttcgcttttagaatgtcacatttaaaagttatgtcacagtttcttcacatactaatgaaataataccaattgaatttatatttaaatgcacttgttagaaaattttgctgaaatggctgaatatgatttttcaaacagtggttaaaaatgagcactgcaaaagagacttctttgggtttctattttgccaacaacagagacctatctactatacactcatacataggaggaactacctggtgtaaactcatgtgcacaagaggagcagacctacctagtgtacagtcatatgcacaggaagaagacacctacctagtatacacccatatagacaggcaaaacagagacatacgtagtatacacttatatacacaggaggaacagacatatctagtgtatactcatatacccaggaagaatagacctacttagtgtacacacatatacagagaagaaacatagacatacctagtctattctcatatatacagaaggaacagcagacatacccagtgtacactcacatacgcaggagaaacagagacctgcctagtatatgcttataaacatagcaggaacagaatgctacctagtatacattcatacagaagagaaacagagagatacccagccctagtatacactcatatacacgggaggaagtgtggacagcacttcagattggatgcgtctttggtcatgtgtgtccttttgttgtgatgctgaagactgaccctggggccgcatgctgaacaagcactttacccagccccttaaggtctcatggctctgcacccaacccttgccatctctctagagctccagacaatgtttgggttgagacaaatacctttgctcttgcccactgccttcttcgctattttggtttgtgttttccacaaggaataagtccatggctgcaaaatgagctctgtgcagtgtgcaggagacgcttgcagaaggctgggggcagttctcccttgggcaggggcttcctccctggcagaactccagtgctgtgggacaggtttacctcacttttctgctcactgagtgctggcaagacagtctgtagcattgttggcgtctggcttcttggttcccaggggtttgacataccagtggccaaagaagttctctgtggttgtcattcattcattcattcattcattcattgctttctgagacaagatttctctgtgtagccctgcctgtcttggaactcactttgtagaccaggctggcctcgaactcacagagaccctcatcatcatcatcatctacctggcttttttgaatgttctcagtcacagtcgtggatagctgagccttattctggttctgtggagctaaccttagagctatgtgtgagtgagtgtgtgtgtgtgtgtgtgtgtgtgtgtgtgtgtgtgtgtgtgtgtgtgttacacacatattcatggctgctactgtttattaaagaactgtttaaggcaacttaatttttaaaaaaagcctcttaatgcctttttgtttgtttttatacacagtttcatgtctccacaaccaatctcataaaacctgggatgtccattctgctctctcagtgagcagatatttccccagtttcattccccactacacccgagggattttctgaaaggtggaccaagcagcctgacgctttgcactgtgacgccagctctctttttttaaagcgttccaacaccgattcaaaccggtgcagaatctgtgcttctctaataaagatttttttctttctgatttaaaatgtctagaactttctcacttatattcttgctgtcaattataatatactcccataaactcagcagaccacaggaaaatagttgcagaggtaaatgttagagcacattttttgttgttgttgttgttgttgttgctcatttgtcacagtataagatagagtatttggctcactccttgaattgggttttctctgttgatatttgtccctgaaaagatgcaagggattgcctcctaatagcatatcactttcataattaaaaatttggtgtgacattttcataattgaaagtgacagccaggagaacactttgcccttgtaaaagctttgctaatagtcttctaatttttggcaaacattaagaatggcttaatttatattacgtacttgatagaaaattaattaatataatttgttttggagatagagcgtcgtgttgccaggctgtcctatgtgttctatgtgtagcgctgagtgaccttaaactgcagactcttctcccttcactcggcggagggagcgtgcaaccatcaggctctgttatatatggtgctggggatggagcccaaggcttcctgcctagagggatccccacaccttattctttcttattttaaaccctgctttttaatggtatatggttagtaggcattggtcatccttccagacgatgctgttactgtggaagtacatactggagaattactttctgaagtctttttattagtttgctgatgtccatatcacttaaggaattgtttaaatacttggaggatgtcccatacattgtaaaggtgtcttttgctatctggtgcattcgaatggtaagattcataactgtcgcgggctttacctttcccctaattcttctgtcctcagacgctttgctcctcgtccttttcacttcttttgcctgagtatgtaattagattgttccctaagacacttggaggcagcttccctggatccgcagagcataacaaggggttacaaatgaatccgacacagagagacaaggaagcacagatggtgaaggtccagcagcagcagttgtgacgctggcttccgactccagtgtgcccatctgtgtgcaatacaggaaactccttgagctggcagggccagtggtgccgcatgaaccttctccaggaacaggttgaacaaggtgccagggtcaaccctggacctttgtggctgaccaggcacttgtaacctgtgcgttgagtgaccgagcagtagcccaggctatctttgagtgcagtgttacatgctagacctgtgaggaaaggtgtgccaacttccctttgctttccccacactgggcctaagaggcaggtggtatcagtcccattttacaggaacggaaagtgaggcgccacaaggatgaataccctgccaggatagtcagggtggtaaaagacagagttagggggctgagtgtgtaggcaggttctatgtatgtagcccaggctgacttcaaagctgggatcctccagcctcaacctttccaatcagctgccatcttacttttgcctgttccagtgacatccaacagttggcatattactgtgggtctcctgttcttctgtctctgcttcctgagcttcccctcagtttgagctcagctaggcagcacacgggagggcctgtcttcctacctggccctcaggcagcatttgggtttctttcccaaccttccctctgccaccttgctgacctccaggctcagtctgaagttctgctccttaaagtggttctaggtctcacaacataagcattgtgggaaagccagctacaaggtaccctagatgtgacccagacctgtcctgtgaaacctgaatatttctattctcctcatgtgaccccaggtacacattccagtttcagaagtcttgccccaaattatacttctgcataggctatgacccagttaagggaatcagaattggatctttctgtaggaagaactggatacaaagttttcatcccatccctggacaatacagtagtatttatttatttatttatttatttatttatttatttgtcaaggcaagacaattttcttacatataaacactggttattggttgtccttcttgattaatagtctgaaagagtggcagttaggaagccaagaggcattcattgacaggagtctatggtaaaaattcagaatatgtctgcagtcagcgtactccatctgctcccatgctgtagagctggaccccaccccatgcttcaggccgagtcggggaggtgtccgcttctcatcggatgacggtgactgggaaaagcggtggtctggaaagtgcttcatttctcccccagaagcacgtcgtggcaaaagagcacggtcccgggaacaaatgacgccagaccttagctttactcagattccctagagaaggagctcgctggccgaggggagtgaggaaggagagcatctgcagaggacagaaagaaactacagacgtcaggcagtttcatagagccgtgggaggagctttaaagatatgtagatattaaggtgtgtgcctgggttcatgtattgccatcctttagccgagttatctgacgtgcatatcttctcggtaacctgaggattaggtaatactagataatgcatgatagcagcccaaattggggtgtgctggtttggcagcctagttaactctacgttaaccaggagcgtggaatagcatttacgcgtggttgaatgccaagaccctcctctctttcccagcgagtgtgtatggcttgtgtaaagctgctttggtgaccgggggtgtcttttgctggtggacagcaccgtgaagggatggttcttgaactatgggagattggtttatagtcacatgactttaaacaccagcccaaaaacagcatggcctcgagcactgggggaatgagctttatccaagtttgtccatgtgcttgatttaacagctttgtcattttatgtaatcccacaaatccagtgtttgcaaactgaactgcaaagcatggttcttttgctatcttagtgagggaagagggcaggtaatgtacagaagctcagacctttcggcagggttccagtcgctagtctctctctcagagtgagctctgtgtctgatggttctcaagtttgctttacctggtccacacctgccccctcacccctcttttttttcccaggaggagtaccgaccgaggcatagtttgtggaatggtaggctggcgtttcctcatttagcatactgcagaaacagaggcagttctgtctccttttggatgagggttaagatatcacccctaagagctgaagctgctcactgatacccagttctccttggagnnnnnnnnnnnnnnnnnnnnttgtttaaaagtgttaaccatggtgccagcttctccaagaataaagggaggaaaactaaatgtcatccctccctccctccctccctccctccctccctctcttaggatgatgatgatgacgatgacaacgacgacttcagttgaggcaagcaacatacagttctgtgttgcagagcctttggctagtggcatgagggtcatctgggtaacacactgggctgaagttcttttgtcctgtgtctggcaagacaaatgcatactgaggcagcctgaccaaaatgttgtcccctgcctaccagttctctcagctccactgtctgctgtgaagtcttctgaaaagtttcaaattattctcttggagacaaattcttccttgaatgggtttccacaggcctcctcttccttctctgaggaggcgatttaattacagtactgtatcatgtttttctttcttcttttttttttcccttacagaaagaaattcaagccatgagccaatgcagccatcccaacgtagtgacttattacacctcctttgtggtcaaagatgagctgtggctggtcatgaaattactaagtggaggtaagtgagttgcattgttttgtgggagccatcatactgagtaagattttagacttgatgcccttcagtcttggtttgaaaggcctgactttaatttttcattaatttatgtattcactttacatcccgatcacagccccccaccctgcactccctccttcacactgccccttctcccctcctccttcttctctgagaatggggaggtcccccctgggtaccagcacaccctagcccttcaagtctctttcaggactaggcatatcctctccctctgaggccagatgaggtagcctagttaggggcacaggatccatagacagacaacagagttagggataaccttcactacaatggttgggggatccacatgaagaccaagctatacttttgttacatatgtgcgggggtcgagggaactaggtccagcccatgcttgctccttggttggtggttcagtctctgggagcccccaagggtccaggttagttgacttttggtatttttgtggagtccctgttccatcagtgtccctcagtccttccctccactcttccacaagactccccgagctccatctaatgtttgactgtgggtggagcctttcagaggacagttatgctaggcgcttatctgcgagtataacagagtttcatgaacagtgttaggggttactgcttgcacatgggatgggtctcaattagggccagtcattggttggccagtccctctgtctctgctccatctttgtccctgtatatcttgtaggcaggacatattttgggtgtaaggatttttggtgtgttggcgtccttatccttccactggaagtcctgcctggctataggaggtggctgctaaggttctatgtcccccactgctaggagtctcagctagtgctacctccatagatcccctggagcctctcccatcccaggtctctcgaatatctagagatgcccctactccccagcccctgtgctgatttctatccactctccagggcctttgttgccagctccccctacacctaatgctcccaccacaccccagtccacctccctacctccccatctcctctcctatccagttccctccctccagctacctccaatgactattttattttcccttctgagtaagactcaaacatcattctttgggctctacttgttacgtagcttctttgggtctgtggattgtagcatgggtatcctgtattttatggctaataatccagttataagtgatatgtaccatgcatgtcctgttagaactgggttacctcactcaggatgacattttatagttccgtccatttgtctgcaaatatcatgatgttttaaatagccgagtaatattccattgtataaatgaaccacattttctttatccattcttcagttgagggacatctaggttgttttcagtttctggctattaagaataaagctgctatgaacataggtgagcaagtgtccctgtggcctatagtagagcatcttttgggtatatgtccaggagtggggtctctgggtcttgaggcagaactattcccaattttctgagaaactattaaattgatttccagagtgtctgtacaagtttgtacttccaccagcaatggaggaatattccccttgctccacagtctagtcagcatgagctgtttgagcctttgaccttagtcattctgatgggtgtaaggtggaatctcagggttgtcttgatttgcgtttccctaatgactaaggatgccgaacatttctctaagtgcttcttggccattcgagattcctatgttgagaattctcttgttagctctgtaccccatttttaaattacgttgtttggtttgttggtgtctgccttcttgctttggatggtatccttctgtcccaggtagcgttggtgagaatcttttcccattctataggctgccattttgtcctagtgtcagtgtccttgaaaggccagagttttaaatatttaccaaagcctttcgtaattaggtttcatgtcctcaagtctgtgtccccttcgccatgtgttaagtatcctacccacttccctgctaggttaggtgatgctcatccccctaactaccatgtgttctcagaggactttatctcttccatgccacccctcttctgccttagatgtctctctctcctttacccgtataatcatgtcctttctggagccaccacttattcctttcagaatcattggtcagtctttgtgcatgtgcttgtgtgtgcgtgcatgtgtgtatgcgtgtatgtgtgtgtgtgtgtgtgtgtgtgtgtgtgtgtgtgtgtgtgtttgtattgctgatgatcaaacccagggccttatacgtgtctagcaccagactgcacctcagcccaggctttcctcttcaaagtcctttcaagacaattcatgcaattagcatgttgcattctgtgataaagggagagctctgtagactcgggcacttgaatggtgggctagcatggtggagtcttaagttcctattctgtgttttgtcacacatttttcacattatctgtggtggctggaggctatcatcctggtcagtgcagaaacttcagactctcttcagactctcacatccatgggctttacttgcaaacaaagcaacaccttaacctcaccatcaaagagggaatataaatggtagctgccgccattcttgcacacttcctctgtcgacctgtgccctgtgtcgaccctggtccctaactctcacacactcttaacgatcagtactagaggaacatgtccgcttaaaactctcttcatgtcagttttgaacatggaaccttagaatatctgcatggtttcctcagcaggtctacattttctctgtactgtgtctctctcgtggtgctccctgtataaagctctggacgtgaaaaggctatcttgggaccaggaaacaattttgtggtgacccggtagagccaaaattagtatagttcgatctttagacccataactaattagttattagttatgtattttaatttattgtgttttttttaagatttatttatgtagtttatgtgtatgagtgctctattttcatgtgtgcctgcatgccagaagagggcatcagaccccattatagatggttgtgagctaccatgtggatgctgggaattgaactcaggacttctgggaaggcagacagtgctcttaaccacttattcatctctatagctcccagttaattagtttttagtaaaaaaaagcaaccctcttgtatcatatcaagcagaggcccaggtatgaattggaatctctgtagttagtgtgagtttacaggggtgggcctccatgggattctagaaaacatgcctccaagctcttggctctgcctccagcctgttttcatgaatatctactttagtttgtcattaaaaaggaaaaagaaaaggctggagacgccatagagcggaactgtagccctgcgcttcagcgtgctcacttcctctcggtacctctggtgctttggcacaaggcgatcttacccagttgaggcagagtcttccgggattccactgtctcggagaaaatggcaagttctggtgacctggacctctaaaagtctccaaatctgtcccgcctgaagagctcacctcggctagccttttactttcataaacttgagcataacaaccctggtttctgttttgaggaccagatagaaaatgcactgtcgggctggtgagatggctcatcgggtaagaacactgactgctcttccaaaggtcctgagttcaaatcctagcaaccacatggtggctcaaaaccatccgtaaagagatctgactccctcttctggagtgtctgaagacagctacagtgtacttacatataataaataaataaataaataaataaataaataaatctttaaaaaaaaaagaaaaaaaaaaaaaaaaagaaaatgcactgtctgcccgagagtccagtttggtctccaaacagggctttcaaaggtaagatacaaagtttgcaggaggcctccccaggaaaggggcgtgtccgcagataagggcttgtgttcattcctttcagatcgctagaaatgcgaggctaccagttaggttataggctatatactaaaagagataagagttcagagtcactatttttctaagccacctaaaactctgagagcagatacgtaaacaaatgctttctcctctctgaggagggaaattcacatttgttttctgctgtgatatttgaccacctggaatctcctgacgaggggcaggcagctataatagtacctgagagggagaggcagtcctcttcgttcatcataaagagcctagagcagactcatttgctaactcttcagaaacgccgaatctccaggtaattagagctttaaaaatgacccagcagtgtagaatatttattactatgtgttgaaacatgaattcatagtgcctaggataccgatctgtatatagaaacaaagcactaggtatttattcattggaaaagcctatgcataaagcattaaatgaaaatcaagattgcttagagtctcacaaaagaatcctgaggtcacaggcagtgatgtggaggccccaggcctgccccgccttccacctctgaggtaggtggtgttaggaagggctgttatggcttcctcatgattctctgctgtctttttctcccctcaaacggttttggttcttgacttcacttgttttcttcttttaaaaaaatctcttaaaagttttttttatatccttctagtagctaaattcatattatgactatttttaaaactgtgttgtccaagctgtttctgaactcctgtactcccgatgcccttccatttcagcctgccgtgctcctggagaccacagtcagcttttaagctttatgtattattattactgtgtgtgggtgaggggtatgatacccaaggcacaggcgtgcatgtggaggtcaggagagcttgcagtgacacttccttctttctaccacgtgagtccctaggaacaaactcaggttgtcactcttggtagcaagtgcccttacctgttgagacatctcactgtaacttgaatttttttaaaagtgtgctggggaccggctcattctaggccatttctagtagtcagtattttctaggggaacataactgttgtgggggtatatgttttgttcacacacaagtaatcagggaagtaaaattggtttaggggcttgaaggttgaacagtccaccgaccgctgtctgtacagtggagaggcagaaaacctggcaactctgcaatccgtgaagctgaaagctggatgccttagacgcaggggccagtggtgcagcctccatctgaggctggagccctagaggctcgctggcgcgtcattggtgccagtttgcaatgaacagctggtgtttgtggggccctagcctgttcagtgcttccacctgtcttcagggcaggatggtctttccccctacgttactgtgccacgtgccagttatctctagaaacaccttcacagatgtacaagtatacttttggcttacttttagggatttctcaggacagtgagtttgataatgaagattaatcatcacagccttgtgcacacgtcagcatccgatcacattatcagtggcctctaacgcgtttctagttcttccccctcctctcagccttataattatttctcatgtatatgtgtttatctgtgtatgctgtggtttatgctgtgtgtgtgtgtgtgtgtgtgtgtgcaagcacgcagaaggcagaagggagcactggatcccatggagttggagttagaggtagctggttgtcagccaaccagtgttggttagatatgggatttgaatcacagtcatctgggaaagcaggcatcagtcttgatagccaagctatctcagtagaactctagttcctgactcttagagaacccttttcgacttcacactgaaagtattgttgccagcttattaatagatgcaatgcttctggcctgttgttattattccttgggagtattgaagttaagtaaatggattatatttttaatggtcatatctaggttgcaatagtagtgggttcttaatctaaaacagactggatatgcttatgaaaatcatctttgcaattattctgtctgtccactcaggttccatgttggatatcatcaaatacatcgttaatcgaggagaacataaaaatggtgtcctagaagaggcgataattgcaacaattcttaaggaggttttggaaggtttagactatctgcacagaaacggtcagatccataggtatggtatcttcacagtctgttctatataatgtatagctctagtttataaagaatttcaaggaagtaagtctggcaagtgggcttgcgtattattcaaaagtagtatttaaaagcaaaacaaacctccaaagaataagcttggatgtatctccttggtatccttggggctggtttatatggttaaactgaaatagagcaaaatgtgttaagagctgtgtggactcattaagaaatcagttaaccccattactcttaaagtgaatttgcttgaactggatcacatatccctcttcttaggaaggtaagacttacattttatgttaccagttttgtacctggcttgagacagaaggaagcactctgatttcttcttctgtgacacagaatgctaagttctaaagtggaggaaccaacagactatgagcatgggctatttcaggagcagcagtcactccagctcttcagagtgttataagaggacaacacttaccctcgtcctaataacattgttccaccctgaagcatgagagagctgtgtatttaatggtctataccataggattttaatacttgtttcttattatcactttttaaaaaaatattaaaattgctccacagagcttccatatagtgaagaaataccacatagaatatcattattaacatttagccttggtatcacccataggagaaattgataatgaattaaattcattttacgtgggctgtgggactatttggaaatgtgccacaggcaactcaaagtggaagcagaatagttctacttagactgcgatttaattcttcataaatatggcagtcatgtggcttttaggataatccttaatcccgaaacataaaatagtctactcagtagtgatctaattaaatgcagataatggcttcacataaaatatttgttattaaaatcttaactgtgcctcgggagcaaaatgtaagatgacagtgtgcacttacaactttaaaaatctgcagcgtggctttaatattcattttacaatgactgagtcaggcagttggcttgtgtgctgtgtgttacaatcatcctgagtgtgtcagcgtcatagctaacctgtgctttataatttgttctctgcttttttttttttccttaacagggatttgaaagctggaaatattcttctgggtgaggatggctcagtacaaatagcaggtaatattgttgaagggaaacgttcccttgtgtacaggactctgatgttgtaaggggtggcgggtagctgtcgtgaagtagataaatcatgtactatcttttgagagtgtatctgggctgcccttctctagtggacacgtccttacggaatgcctgggactgaagcctgggtgaatcttggctcgatctgcagataaataatgctattttagcacagaaccttttgatgatgatctgattttcaattttcttacatctacccgaatagcttttcttttatatacctgcaagaaaagacatttggaaaattgtttttgattgagtttgaaattttaaaaccttatataagtttctagctttatattactactgtatgctattgagtgaccacatcaggtgagcatgtccgtcccatgcctggctcctgtcatgttgttgttttgagttataagaatatcttgagagtcttggcattgaaggtaggcacatccatcttttctctcgttttgcctcagtcccttgctggtctgccccagccacgctttcggccatcgctgtccctttgtggtggtggttttggcgggacagtccttccctgtagtggactgttgctgccatttctcagagtacagcctctgtctcccaggaattaaatattagctgccatggctagcactgtccttggtgagaatcatcgatgcagcctctgtcagtaagtgtgttgaagcttgtctcatgctggggagtcagcttaattggcataattttgagttgtaggaagaatcctatgtcctaggatagatctttgaacattcctcattatttgacaaaaatcaaccgtagcacctaattctagacaaaagtctgtttcaacataacctgaagatctagagttattggaaagcagagagtctagggtctgtagagatggctcagagtttaagaggtctggctgttcttgcataggttgcaggtttcctttccagcatccacattgactgtcgttctggggactccagcgccgtcttctgtcctctggtgcacagacatacacgctggcaaaacactcatccacataaactcaataaacacttttaaaagaattaaaagaaaagaacataggagtccagcaaagaacaaactctaccagagatgctaaactttaaaattttggggtactggggtcagatgcaagcctggtcagtgctaagcaggtgctttgctacgaagcttcatcttctgcgtcagcgcttgcgccgtggctgcggctgactctgcctgcccctcctgctctccgtgacgcctcagctgagactggacagtgggcaagcaggatgctgaccttggcctctgtaattttatacgtaaagagcaacttttgatttctcttttagagaagactttttttttttttttttttttttttttaaagacaggatttctcagtataatagtcccggctgtccagaacttgctttgtagatcaggctggcttcgaactcagaaagagttcccaggtgttgggattaaaggcttgtgccaccacaccctgctgagagaagacatttttttagcgatgcaaaagaagtttttgtttttcatatcaaacacattttcccttagagaacatataatagagattctcacagagagggtaggtttggccaagtatagtagttggtttaagaaatctggaagcaactttgtgcatcagttaagctcacggggcgggctttaaaatactgatttacacccactctgtgtgttacttaggtcatatctgtgtgtcctttagcctcactttccccatctgcgaaatggggtgacagtgtttgttgtctcggcacgcactggtttccttggtagctactgaacccaaatgtgtgggactcagatgattggcactggagagatgggtcggtggctaagagcactggatcctagcgtctgtgtggtggctcccagatgtggggtctaatgccctcttttgatgcccatgggtcatcaagtacacagtaaacacacacacatgcaagcatctcgcccatacagatccaatgacataagcataaaagagactctgggagctgcaaagtgctctaggtggacaaagggccattttgtagccccgcccctgcccccctcccccatgtaaacacttctgttaaaccatctaaaggattctagaaaatagcagctaagatctttacgacttcaaagatttagttaattttaagttttgtttgtgagtgtcttcatggcactgtgcgtgggtgaaagtcagcataatttttacggttctgtctttccaccttcatgtgatttctggagaccacatttgggttggcaggttggcagggcatggacctttagtcaccaaaccatcttactggtcctgagatatattttctttaatttttaaggagacgtatgtgtacaggaactttgcactcataatttcccattgcctgtggacagtgttcaggtgctgctgcttgtctcatgagccctggacctcccctgcatggagggtggttgtaattaataagtaaaggaaacacttacagcagccaggaaagtggacagtgggcaagaacagccgggtgagcacacagtggaagtgcagttttgggcagaggaaaaaactctcagtgtcacaagtagagaaattcagcatcaacgtgtattggggtacctccaccacagagcaaaggttagtacgatgctgggagcagtcccaagagttcagtccgtagcggagatgaatctggtcctatctctcgcacctaggggtgcagtttgccttgtcttgcactcccatgtgtcccactccacagccaatggcaccgtgttaacggcttctggtcagccacggtgggagccgtgagcgtctctggagtcggcagcatgtctctctgggagggcgctgttaatcatttattagcacacaattatggctctgctaggaatctgccctcaagctattcccatgtatgtttagagtgttagaggcctaagtttatttgttggagatcttttttggaagggggtgtagcctagacttgaactcatgacagtcatgctgcccctgcctcccagctactggggttctaggcacgcaccaccatgcccagataatttgctggaggatttgtttgtgaacgcaaaagaggaggtgcaaccctagtgtctcaagtgtagcagacacaggggatgtatattgtgggagacccatcctccctgaaggttaagtgaatgagacaaggtgagaggcaggattgccttttgtgaaagaagtggggaaaactgagaggatggcactgactgagtgcatggatccagggagccgagtcacacagggcttagacaaagcacatcacctttttaacactttgagttttaaaccatacatgtggctgacattataaaacagatgcagcagcttaggaaagtcagtaatgcactgccaacaaatgtgtgtgtctgtgtgaaagtgtgtgtgcatgtgtgtgcatgtgtgcccatgtgtgagagtctgtgtgtatgtacatgttgtacacgtgtgtgtaagtacatgtgtgtacgcgtctctgtgtgtgtctctctgtgtatatacatgttgtagaccagaggtttagcttgggtttagttcctcgggtattgtccactttggtttttatttttttaaaaaaaatttaaagataggattctcattggcctgggacattaggctgattggccagtaagccctaagaatcttcccgtctctgccttctcagagctggggttacaagcagcgagccccaatacatttgcctttttaaggtcttaggatcaaactgaggtcctcctgcttaggtagtaggcatttttacccctaagttatctccccagatgcccttatcagagcgtttgagtgtctgccgtagtaggaaggagccttcacacacacctgacttggccccagtccttttcattcttccactgctccttctcgctctgtcctttcccccttggttctcctggcttttattgttcgtatgggacagtctgtttttgcttttctgtcatggaagctggcatcttgtgcctatgaacagtctctcagtccttggggagtgtgtcattctttatccgaaaggctagagttctaaaggctagtttggaaaactacttcagttcaggaagtgacaggcaaaatacatgtgagcaaaacccggaaagtgtccagtcacagcaggttcctcgatgagagagagcggactagcagctgcttgaaatccccaggccagcgttcaccgactccgcggctttggatgagttaccgagctgagcctctttaggactcatttcctttagaggagattaaagaaaatactgccttttactattgctggcacacagtaggtacactatagccaccaactcaagctgttgctatggttactagtgttaccgtcattcctaactttactgcagccagcaggaccacacttgcactgcctggaggttatgtgtacctcagatttgtcttacaagagcttcaaccatgaaagcctttctgagtcacaaaaaaaggtaagcttaccaatatagaatttggaaggaaagtcgccattaatcttgagttaagctgtttgagaagtaaactgactttccttgtttgggaatgagacaacctctcattggagagggtcagaatagcagtcagttgcctttgaaatgcaaagacaggtcaaggcctgctttgttctggctcttggcactctgccagtcacctcatcccattacccctgtcagcttgatgatctgagctctttcctgggtgtctggaactccctgtccttctctttctcccaactgggatcctctgaggcgaggttccctacttctctttctgtctcagaccttaaggttctttctttaccatgagtggctcagggagctctgtggctcccgggagggagaatggggtgtggaaggggacgaggtgaggggcggggctgggttcaggaggacacctgtagaaagaacctgtgtttggtggctctgaggatcagctgggttggggcaggaagggccaagctctgtgtgtgcctggcacacagtgagggcttgttccagcccttccgtgtttcctgctaggcgtttttcatagtacctccatgaacagatcggccctatcctgcatgtctggtgtggtccaacaggtatttaatcagcagtttgcacacctttggagcgatagctttctggaattatccctacacttcctccttgttctctgaactgagcacagtgttgtatttgtgcagaatacagtgtcaatttaaaaactggaggtaaaacacgaatataaggttattgttttacagtgctgccaggatgcaaggaggtgctgctcttcctgacacaccagaagagggcattggttcccattacaggtggttgtgagccaccatgtggttgctgggaattgaactcagcacctctgaaagagtggtcattgctattaatctctgagccatctcttcagtccttggttttatttatttttattttatgtatattggtgttttgcctgccatgtgtgttggttctctggagttaccaacagttgtgagctgccgcatgggtgctgggaactaaacctaggagcttaactggctcctctgctcttaaatgctgaaccattctccaaccccaacaccacacaacgctcttaagattgataaaagttgcctcctggtggtggcacacacctagggtggcagaggaagccagaattctgtgagttcaaggccaatctggtctacagagcaagttccaggacagctagggctacatagacacctgacccccatgtatgtaaaagtcagcttttgtgtcatgattaaaaaaccagagtgggtaatctcctcaggattaaataaaacgccttccactctggatgctgcccttggaacgcctgagtgtcactctgtcacagtaaaggtagactggatgtcttaggaagtgaaacaaataggtcttaccacagtaggtgatgaaagggggtgtgattgtttgagaattgtgctcttcccacgacttgccatttatttactaatttgatgctctgtcgtattgtcacggaaagtgcagtgctttgtctggcaagtgactaagcctgttcgtccagaattcatgagagagagagagcactcacacgtgcattcgagagagtatttcaagcaagcacaaatgaatagtgaacaggtcactttggggtgatcaactacaaatctatttactgtaggatactgtggcctattatccttactgtcgtgtaaaaatgtggatttaaaaatctgatagttttgtgtgtgtgtgtgtgtgtgtgtgtcttgctgttgagccatggtagagtctgtgcgacccaggctggaccggaactcccagctctcttgctgcctcagcctctcatgctgggattccaggcatgtgatgtgtcactatcaccagccttaaaacatgatttccaaagcccttcctagatgcatagtggtgtatcgtatttgacagatgttatgctcatacacacacatgctttgccattttggggttatgtacactgtggcctggatgtctctggatcccctgtaaactcacagtgggacctcattaccactgggactcctgaagtgcaacaggtcttgtggtggggatgagtggctgtctaaaggaggctacaaagagatgctctttcaaagaggtgcgtccagcagtgtgaagacacatcctttacttgctgcggaactaccagagggcagggcaacaccagaccggacgcactggtgtctcatgtcggattcctagccctctgaaacattgtgaaacagatttctgcttcctttaagctccctggtggaaagtttgttgtagacttatagacaccaaccaatgtctgtgaaggtttatttccggtctctagactttctgtaacagagaagttgagtcctactgggctgagcagcacaggacactggaaagttccctccacagcagcctgaacctaacagagtgcatcctatttagccggtttgacttccttatgctctgcttgctgggaggcagatggtgctcttttcagcctcagacccagggtcagcttctgcctgggttttgaagactgaaatctctcaaacaaaaatggccagagaagcttgctaggaaacgtcttctcagtgcatggcctgctggttctggttctgccctctgggtattcagagccagcgcacaccaggccagaagtaagggaagcttgttcgggtggggtgggtacgcaggtcttgtccaggtggggtgggtacgcaggtcttgcgtgctgggggaggaaggagccttctctggagtagttttccatattatagctttctttattcaaggggttataatggctatttgtaaattttggagagtggacagggtttttcggtgtgaatgtccattattgcctgggctgagctgctgggaatgcttcattgacgtgaagaagagttccaggtgcctgcctggcatgtccttacaggaagagaggaaacttaacctgtaatttggccatcaggctacatgactccctaggtggtggtggtggtaggggccacttgccccagagcatgcaggcactgagcagggagggagcgatccttactcctgctagtttcaagataagattttcaggggtttggataggtctccacctcactcttgtccaaggcccccctcacccgcacagtgctccacagtgcattggtattattctcagggaaagtacagggactgtgtgtgactgatgttttaaacctactcgggctggggtatttgtgttccttctgacttccttggactttgagggaggtcgctgaaggttcatgagatgtttcttgtgttgtggggaggagagaggctggtgcttgcagcaaggtaatatggaaactctatctgtcccggaagcagcctttggtgagtatgggcattctctgaaaggaagtgagtctcagtgagtagttgctggcagtgtatgctttgtattgattgacgccatggcccagagtgtgggctctgacactcactgggaagcctacttggaagatgtggttgctcgttctgggcctgtaaccatgtagtctgtacgtatctgtgataatgaaacaccagagcacggttaaacatcccattttgcagtcagctaactgttgccagcttgcaggagggggcggggctttacctttttgcagtgttgcaagatgacaaggaagtggttaaagggcagggctccgtgctctgcccgacctcctacccccattcctttgctgttcccctttgtttgcccctatcatttcccattctgaaagagggaagagtccactgtgtactgccccggtcacttcctggcctgcaatttaaaacagattgctacagcaaataaagacacccccccacacacacacacacccatgactgtgcagaggagcggggacctacctgtggctgtgtctcctctacacatgctcctggtcttcaggaccctctctgctttgctaacaccatctaccctacacctctagttctggcagccactccttgagaaacccttttcaccttctccttcacttaccctgcctcacttggctgagcccctaagaactttgaacatggtctctgcacaccctcacttgatctagcctgtggtaccctgtggagactgggttcctccttttctttcttccttccaaaccaggtagctcccacaggtagaaactctgttgtttacggctactttaccagagagtgcctgacaggaggcaggggtttaggaaggtttggtgactgtgatctgacagggacacatgatggaggccccgcctccttgcaagtcaaggagcctgtgggtggtataaggcacagttgatatattaactgaataagcttgtatagcaacgggccagagataggcttgctcatttgttgcccacctgttcttggacccagaatctcgtttccacctcctaaatgcagggattgtagcaggtaggccagtgcacctcaccaaagatagtttcttaatgaaaaaaacaaaaaatcttttgctgttgctttgccctgggtaactatgggttaaatagtgaatgaaatcagagggcgtgaagcagagaaaacatggacattgggtgtgcctagaaaatagagtccacagatgggttagaagctgtggtggctatgagtggctttgtagtcaacccaaatacttgctttgagattcagggatagttcattatcatgtaaattatggtatgaataattataagaaaaatctcagagactagttttttttaaattacttttattagtaaggagggtaagttgatgtgacttcttggcttgggggattttgatagatgatgatatttggtgaaacctctcgcctgagcccagggtgcgatcagctctggaaatgtggtttttcttccgttctagctgtacgccatcagcaagaggcacctgggacagaccgtgagctgcttccccccttggcagctgctaggattagcttgggcaataactcaagaaagcttacagggtgaatccagcaaggaagaagcactctgccctgcttcctgctggagtccttcctcagctgtgcgcactcaactgcatggggtgggggtggagtgggatgggagtggggtggggtgggggtggggccaaacatcagggaagtagatgggatgcagtctcttcccctctctccctttctgccttccttcttttctctgttctttccttccttcttttcagggctttaattatcaccagtaactttcatatattataaaaaccgtagagatctgagcaaaactagagtcttagaccaaaagaataagtttgagtctatcagtacatgatttttttcatttatcttcctcatttttttatttgttaaggtctgttctgcccttggcagaaggtgaacgttagatgctcagggctcagtgtatcttaaaggactagttgacatatatcaatcaaacgtttgcacacggtcctctaagttgacagagtcacaaacagtgggaatattcttgccatcaaggacagagtgaaagtgaaacaggcactacatgtttaactgtaagatagtacatgtacctatgtttacacgtgtggggtgtgcatttgttcttgttaccggcaggagggtattcatggatgtgcacgtgagtggggggtcatagctcagcttccagtgtcttccccatacgtcctcttccttattagtcttctcagtgtggtgtgtgcatgtgtgtgcacatgggcttgtatggttgtgcttgccctcacctgcccctttggaggcaaacgaggttagtgtttggtgtctccatccatcccttcccaccttacctttttgagacatggtctgcactgaatctcgactttggctaggctagctgcctcggggtgccaagtgagaacctgataaattgcaaggagagcttaaaaatactgagtaaccaagtctcatgaatactattaataattagttgttttacgtgtgcgagttttccttattgcagatttgaaatcctgcagattctttgaatattttgttatcctccattaatccttcttagaactttgcaaaaaaaaaaaaatgatgtcagttgtttccttgagtgcttgtggcaactggggctattctcaccacctcgcagagggtctgactctttcaagtgtacagatgggtggttgtggtttcatagaagcttctggtaatggagccggttcagcagagattcccctgaaaaaggccacctgcgggtgtgtaaatgttgcattggaaacttataagcattaatatttgatctaaaatgcatgtgcctgtctttttggatatggccggctgcagacccccgtgacttcagaagggtgactctggctttggaaatgatccctgtgtagtgtgtttctctcagagcagtgctggccgctccacagagcaggcctcagtgctgagggatcccagcactgccgagccgagccgttacagacttgtgtgtggaagttcagtccgtcagaaggtcatgcaagcagatcgctctcacgtctgtctcctcacactgcttttgtagtgcctgtggtggagcccccaccacctcaacctcccataggaattttaactctatactttctgacagttcagctgctccggggatcagttccttcagctggaaaatgaggagagttgacaacacgctctccaagggcctatctcgtatcaaaacgtttgcgggatcctcattaactgtaagcactaaagacctttccagtcctgttttaaatcgtacaaaccagcagatcattttgggcgtggaggaggatgtgattaatcctggttttgtgtctgtggctaccactgtcagaatgtctttaaattagcctttctgtgcactgggaaacgtggttttcctctattcacagtaagagtcatattcaacaggaacttgaccgttgattggtctatcattgtacgggagaaaaactggcttttgcctgaaccttcaacattgctggactaagactccagtttcctagccacattggaaggaaactggttggtggagaatctgcctagatgataccccgagtctgggtatgcttgccttctgtttactttatttttacatttaaaagtcttcctttccagattgtaaaagcatggcatctagtttctctcttattttgctgtcagaaaaagtgaaatggtcattgtctgctgtttccaagaccaccaggagtgcccttctctctcactcattgatggggaacgtgcatttgtccagaacagctgacaagtgaccctccagggcccagactcaggaaattccacaggatcatggttttggactgtgaatacctcagccactatcctatggatggcggcctcagcgagtaatgtcagaccagatcagtgagcgccatttgcttgtaagagggagaaatgcaaaatgaaaggcaggggcctggtggcaggcaaatggtgggggcagcagtgatgtgtttagatgattccgctattcctccacactccccagactatgattctctatggagcagggcaggtggcaagcaagcaattgataactaattgtagctcagttgccaacacgattatcaggtcccttaaaagacgagtgggttcatggttattggtgtgatgagatgacattttacccttagttcggcagtgtcctcacgagtgggagagatcggggctgtaacggtttgcgtggaaaacagtggccacagctcctctccctgtactgagcctctccgctgagcagctgttagtgatgggcagttgacaggaatgtggttagacatgatttccaagcttctgaatccctgtagagatgagaggctgtgcttggctacttggcctgctggacgcaatgggcatagttgacagtcactggattaggcagttgactgtcacatgtcacttacacttgtgttgcccttggatatacttcatcacaaactatgtgaccttatgggcacatatacttttccctacattctcttttcacggctaatagttctagtcttctaagaggtgaatgggggaagctggagagttgcggtgcactgcggtcttccaggtacagtgattggctaggaaacctcaactttggtgcccaatgagtcatctgagcatcttgccctcatgcagattctgatccagtgactccggattgggacctgagaccctgcatttctgaaatgctcccaggtgacgctgttcattccagtctctggactacatatactctgagagtctagtctgtagagttttagagatagctctcttttctatttcctagaagtgtgctgttccggtcaaggttgtagaattattgctacaaatagcaagcaaaagttagacttcgctttcagtgtgtgcttcatccccttgagacaattctgcaattattcatcttgagttatgcccctggcattaagagctgtgctaatgctggagctgttttataataaaaaattgcaatgcgtagtcaactgttttcttgctgattttttttttttttcttaaaaccaaatccttttggggattgcagcaactctggtctttggtgtatttgttaactcttggcggcaaggcagtgtggcagttcactcggttgggttggagggagacaggggactgtaagtgttaagcctttgggtacaagtcctagagttgttgtctaacaggagattaagcatcaaggacattggaatagctcccgtatccaggaatcttggccacatggtttcgcagttgctgcagggcatcttgaaggtcacggtctctttcctgtttccttgctaggtctgctgtgtctgggtgagcactatacctctgtgtttctgaccctgctctgcagaacccaggcactgctctccgggccaggagcacctgccttctttggttgctgttgcatctgacacaggaagaagagtttgggaggcaaaggagcccattcaggcgcagaccttcccacaagagctctcagtctgctccccttgcagtctgctcccctcggatctcacttggtatcttcttacctccccagtcactgtgcatgtggccctgtggcaggcagttaggctcattttagtgacgctgctgaaaagccactgtcaggatagagggaaaagttttctagaaggaaaggagccctgttaagtgcaggtggctgctgtcccaggacttgactgcatctgggctctatcccctttgctatgaattccgagagtggtgtttgagttcttctgagcagggttctgaaacccagagatttggtgctcccgtggacacttaaagtgtcccctccgcctccttcgaggaagtactgccccaaacgctcctctgttcttcagctgcagctttcccagccgataggaaggaggttgtggcctccgggctttccacttagacttggctctcagtgcccggaggcccgaagacattttgaggatggcacggctccaaggaagctagaggtcgctgtgatctaattcataagcacagataaaccggtggacagagaccagatttaatcactcatcagcaaagcgaaacagctggctggttacttggtcagttctagaagctgatggcacctggctggctcttgtgacagttggggaaccttaccttgggaagaggcagtgcaggaagctgggtggctcctcaggctgacttctggccttggaggagtttcctcattccccagtgccaaccttgaggggattggagagttgatcggagttccaaggtcaaaactctactttaggaagaatgactttaggaagaatttgttcagtggaccacacttgaaagaggcacacctgactctgtagttgtggaaaccacgcctcttcctggtcctgcttttcttctgtctctaagaaatgggggcaaaggggcagctgagtgtgttctgttgttgttattattattattcatgcctattgccccatgcaaaggtcactcatgcatttcctcacatctggtcgccctggaaaagcagttgtgtctgaagcacaactttgtaagctcatggtgtctatctaggtccaggccttgcaccctactgaggactgaacaagatccaccaatgctggcaaatatctcagtacacattgacactgcccctcaccccagtatacacagcacaagaaacatgcgatacattgtttaaaaccacatgctgtagttggttgagatgagttcgaatctgtttttttatatctgtttctatataggttgcacagtagtgattcaagccacaatgtcctttctgtgcttgttgggggtctttcagtttaaggaacctgtggggctcagagaagccaagactctggcgggactgaggatgttaacacggtattcagaagtgcatttcagtcgacagccactcatataggggttggagaaattagaaaacaaagcaaaataaaagcaaccaaccaaacaaaaaaccccatcactaaaaactaacaaccaaaaaaacccgtcttcaggttcacttactaagagattgtttttgatgacatgaagagaacatttgactggagaacctggaactcctctttctgagatgtgtaatcacaatttggcctttacgctgggcaagcttggacattaacattaatccccctatgcttaattttgatcttcgctttcttttaggactgtgattttattttctgccctctgtcactgtgttctttggcaagtcttgagtcttcttgttccttcctcctttcggattccagtatccactaagtcacgggtcctactctgttaagtgcaccgtgagttacagctgcgggtgtccgatagtgtcgtcccccccccccgcccccccgccggctcctttcctttcctaagcaattttgcattgggcttttccaatatttcttctctggagacagccactttggtccctgttgctggttggaccaggtgcaagttgccttcttcgtgagcagaccctgagcttgggccactcaagcttcgcactcagctgcttgactttataaaactttggcctctggtaacagggacggctggtagctaaacctctccaggactcctgcctgcaaggatgtgagggcaccttctctcttcagctagccactgcggagtaccgaaagcttgctatttgtcctatacgttgtaaattacctttagaaagttctgaactatcaaacataattctgtttttctctaccagatgttgaactgacccagtgtccatgtgttccctacaaaggttcatacacatacacacacacacacacacacacacacacacacacacacacgtgtgtgtgtgtgtgtatgaaaatctttataatttataatatatttatattatataccaatgtaatatattaataatatatagattaaaatactacattttattggctgatgatagcgagtactgctgcctagtggtaggcaagggctggtgacttcacaggtccccccttcctaactcgtaatgatgttgatttttagactaattttgccattcattagcaaatgagcccctagaagactctccaagtttgtcctataagctcagggcagtcattgtctccttccctgtaggtgaataagaagtgccctcgtggcaggcacaccaagaattcgcatgcaggtctcttttgtccttgtgtttggcatcagtaaaccaaatctacacaggaacaccagggagtgactctatatttgggtccgactggtattttttttttattattttcatgtaaggtgaagaaaaagctctcaaatgctttacaacttttctgtgctgagagtctccattgtcaaaagtaaaggctgtttcccagcatccattaggctccggagaggtcactgttttccgctgtcatacatccctggtatttgaccttgctcttacttgtctatagttagataccaagaataagaatgtccttagcggtttctggtaaccaggggtttccaggacccctccaaggccagctgagcctctcggttatatgtggtattacaagtagaatatcacactgtatgcgctgattttagacattttaacaacataaccggcagactaattttgtagactaaatcaggcaggaggaattgccttttcccattgtttttgctttcttttttaaaaatatggatttgttgccaacagtaaaagaaacaaagaagcttttccgtaaagacactggtgtttgttttctctgggaatctgggaaggcagcagccgaagttctgtgtttcctctctggctactcccttgactggctgagtggcagacgcttgcctgagacctgagtgggaggttgctaagggagaaccaggactccctgtagagcccagtcttcccagcactgaagctgagcatcaagtgtctgtagtcacagggaccatggtcctcaggacctggcctccgttatggtttctcacagcccctgtagaaactctcacccttgaagctgtccgagtttttcttcttggttccaagcttgggctttgcccacacagtgcctttgtctggaattggttacctgtcagcttacttgtgcatctccttagttcattttcaaggcctggtccaaggtccattttggatagtatctatggtaacggtcactgcttgtgtgacctcttacacagacaccataacatttggttgtccatgttgtgctgttgtgtgttcattcatgtcttatcctcctgagatggtaacatcttaagattggatgctcacagtcagctattggatggatcacagggcccccaatagaggagctagagaaagtatccaaggagctaaagagatctgcaaccctgtaggtgcaacaacattatgaactaaccagtaccccgaagctcttgactctagctgcatatgtatcaaaagatggcctagccggccatcactggaaagagaggcccattggacacgcaaactttatatgccccagtacaggggaatgccagggccaaaaagggggagtgggtgggtagcagagtgtaggggggaggggatgggggacttttgggatagcattggaaatgtaattgaggaaaatacctaataaaaaaaaaaagatcagagagccaatctttctcactcgcatttcatgtccactactgaagaatgctgctgcctcacaccctgtggcctacttaggacatttgttaaaaggtgagagcaatatgctccccatcaccagaaggaaaattttaggcttctgaaatggaaggaaaagaaaactagacctaattgataaatctggtaagaactaacaagcaatccgaggtccagaaaggttatgagtaacagtagaggcgtgggctggtgtcagtcttgtacaccatgaaccctgccttctgtcttttagtgtgcgtctgtctcaaaatcagatagctacagctctacagatcttcttcagggctttccatttgtacatccctgaggaagatgaccaaagtatctcaagtgatacttgacagaataggcaggcgtggtaaacgtagatcaaaggaattgccaatggtcaagatgccagggatgcctgtgtccctaaggactcagaatagctctgcctgcactcaagtgctggagggaaccctgtatgctaagcacaggcgtcatatgtagactaggcacataaggagctactgacatcaatggaaaacattttggtggggcaggaggtcctagttggatctgggagcagggacagatgtgcaagtgaggaaggggtcgatatttatgtgttagacttaggggctttgattttactctaaggggcaagagtgtcttactaggtttttaaggaggccttgggtctgtgacataaagaggtctttctttgcttgggcctgggtctgagaagagcaggagatagggatccaggaggctgccacagcacttttggcaaaaagtaagttggcttaaaggaggacctgactggggaaaggaaaggatccttgtgaaaggattcaggagagtttggagcccttccctgctaaggtgacacagctcttcctggctgtttccctacagcacttttttcctgacatcctgcaaaggcttggaggggcctggctgggctcatttgaatctctgttgccagaaaaacatgtgcgcgatttctgacccaaggatgtctggtcacaatcagctgtatgctggcatccctaggagagcccagtttctctccactgttctgccgccacttgttctcgctgtcacatgtatactgtctgaacagaacagaatataccggttttcctgtttgtataagtacactgtgttctgtcagagatctgtttctcagtagaatacattgttctatgtacgtattagccacacatagttacaaattgtatctatcctgcagttgtagtgctgagtggatgttagagttgatgttttatgctctggatttttttcctttttttttttttttttttttttgagctctaaaagacatttaaccatctgtttttggctttaaagtagatgttcacagctgaggctgtgaacaagtatgtgacacatatgagtcatggaagatacatcgaagaggcattatcaatagttaattgctactgtgtatcttcctctgcttttcttcttcttcttcttcttcttcttcttcttcttcttcttcttcttcttcttcttcttcttcttcttcttcttcttctcctcctcctcctcctcctcctcctccttttctcccttctccttctccttctccttctccttctcctcctcctcctnnnnnnnnnnnnnnnnnnnnaagatctgtagagctgtagctatctgattttgagacagacgcacactaaaagacagaaggcagggttcatggtgtacaagactgacaccagcccacgcctctactgttactcataacctttctggacctcggattgcttgttagttcttaccagatttatcaactaggtctagttttcttttccttccatttcagaagcctaaaattttcctccccctcctcctcctcctccttcttcttctctttttttgcttttcaaatgtataaggtaagcaggtagaattttaaggaattgaagattaataactatagtttagttggctcacatctttaaatattgcctttagtgtaagaatctaatatttcctcaaagcggccttttatctgcattatttataaataatatatttattcaatattatcatataagattatttcaataaaaataaagtgctgaattctctgttgaatttcatgtgggaaatagaagttaaattaaaatttatatttttaaaagccttagaatagtcagtcatgggtaacaggtacttacaaatgacagttcacttgattcctctgtgagccactgtggtatagtcatccaaagaatttcagagtaggctctgtatatgtaaattaaattgtatggcattttttcgaaatataacttacattcattattaacatgcaagtagcagtgtatcaaatatgccatttcctaattttcagttcatttgcttgtaactgatgtcctgctgggagatgaatatgtttaactgtaactaaagccaacatatttgtacttatggggctagttacagtcttactaaattatgctgctgtgcaacagtgccggaggtctaaagcaaacccccatatgcccttggtgtgggtttgtacttgaggtagttctttgtaagtcctgacagtcaacaaagggaaccagcagaagagaatccggtcagagcagcgttgccatgatcatactgcagagtatcctgcgatgtgtgttggcttgcacccttttttggcagacagagtcttactatgtagccctggctggcctgtgcctccaagtgttggggttaaaggcatgtattgctacactctgacctttctatctaccacttcactctctggggattcttgatgtgactgttacgcaagaagtaagtattctagtcctgagtagttggcaccttaatttataacttgcttttactcaatatgcaaaaatgtaaatgaggatgcatgcattaataagcagcagctgttcactgctgtcagctatagaagttacttttgcagattggtctatatgcatatctagtataccaaagtaatctcacacaccaaatttctaatacgcaatgggttttgggaagagtttgatgtttttggccagtgtgacagctccctgggtaaaagtgattgtctcctaagcctgaaggatatgagtctgatcgctggaagtcacggttgagagccccataggaagatcccagtgaggaaagcttgcaagtctgcggcttgccagggagctgtagtctctagcactgcagaagcagccttgatactgtggaagatgagaagcaactctgacaagtgacctctgacctccacaagtacagcatgtgcatacactcctacactggataaacttaagtgcacaacacaagcaggcacacacacagacacacgtcctcacacacacatgtacctaatcaatgaagtagagtaagagatacatttaattctacatatcattccatccacacttaatgaaaattatccaggaaacactaagggaacaaagggggagcggggagggaaccagtctttgctgactcagcccttcctttgagcagccacttgcttaaggacaaacttaagcttgttgtgagcgttgggcacctgatatgttggcgtgcttgtatgattttggccaaggtattaatatatactatttagtctaggacatgatggtatgggatgaattcttttttttttctttgtaaaattaacatttggacattggtaacttagaattaaatgggctaaaaaaccacaataaaatataaagataactctattacatactgctcttacttcaaaagagtttagataaaacccaagacattttctattctgggattttgaaatgtgtttatgttttcagtgcaattaaaggaaacggcgactttttgtacctgtttagtagaaaacatcctatggtttggtgagcttgcctggcccatggcctctgatagcatgctctgcagggtagagaatggcaggtggcagacagcagggcaagcctggcatatttctgagacgctccacgagtgtgtttacagcccatccatcactacctagggctcagcagggagagatgggaattgatatcagaattgatgagccacgtggaacataaaataaggtggattttttgttgttgttgttgttttcagattttggagtaagcgcattcttagccacagggggtgatgttacacggaataaagtcagaaaaacatttgttggtaccccatgttggatggcccctgaagtcatggaacaggtaaaaaaaatattaccttggttgttatagtacaggaatacatatcactaatatagcttttttttttttttttttttttcgagacagggtttctctgtgtagccctggctgtcctggaactcactttgtagaccaggctggcctcgaactcagaaatccgcctgcctctgcctcccaagtgctgggattaaaggcgtgtgccacaacgcctggctaatatagctatattgaatgtgtctaattaatctaacataacacagatctgatgcactgcatgcaggtgttaatatttcatttcaatcaattattatcgtagaacatgtcatacatacagtgtagatttaaattcctgattgctagctagcccttagcaagccacactgacattttataaacagctttggctatctgacacagtagtagatgtactgatgtgtaacaggcctgctacatgattgtgagtgatttgttttcttcatcttctttttcctttttaggtgagaggctatgacttcaaggctgatatgtggagttttggaataactgccattgaattagcaaccggagcagcgccttaccacaaataccctccaatgaaagtaatgacgctggggagactcgtagggttgggactgtgatgggttggtggagggtggggatgggggggcatagcttcttcagatctcctgaacatgcttattttttgcttagacttgtgagggttttcgggggaattcggccaagttgaaggctgactcacgttctctagtgctgagttgacagaactggtgcatgccaggcgctctgcctcagtgcagtgtcgagcagctagctgcctgcctctgccttaccgactcctgaaagagcaggatgatcttaggtctcccagcacggtctaagagtgtattagagtgagggctgttccatttgcagatgggtcccaggctgcttccttttttctttcgaaaataaagatcgtctattccattttgagcccgcgcccagagcgtggtgttgtggctcatctgatggagtgagtcacggtgttttgaggcaccatatactttgggtactattttcaggtttttgttattctcctatctgctctacctctgagatagcggcagcgtttctaatttcccccaagtagactttgtcttgaggctgccgttgttcagggcaaatgatgaagatgtttcatcaaaactctggtctatgctggttttatttttcaacttttcgtctttagaaattttaaaaggacagaaatctgttcataaatagatccactaactctagcggtgtttataaaatgtgcagtgggggtggagcctagggatagagccagtgcttagggaatgtgaggtttgggattgaaccctgtttgttttccaaactcccccgccccccacccccacccgcacctccatgtactttcttattgtaggaaacttcatagtgccaatagaaagagcaaagaacaaatgatctctgttaatgttttagtggtgttactttcctacttcaaaacaaaacaaaacaaaacaaaaaataaaccctattttttttaatggttttcccaggacttcctcaggcagagcagatagtattgctgagtgtacgccccacaccctgttttatgcctatttctgtctaagattttaatatagttaaaatgtcaatgatatactcaatgcatgtatgtgcacctcttgatgatcttttttaagcagaaaatttgacgttgacatgtaaaacatagaagagattttttttttttaatggaacatataccagaggaactcgagaacctcatcctttatccatcatttatgttctctgtttctttgtctcccggtctcccctgtttttcccacatgagtctggagaggcacttgttaatcccagcttgtcgctcaccgggaacttctttcaggagctcacaggaagccacattctccttctggctgttgtcttcacagacaacagtcacttttaacatccatctattcacacgcctcaaagtcttccaaaggagtcttgacacatagagcatttgcataaattaggcctgatttatgcattaaggaggttcattcattttgtaggtcaatagcatgctatacagtctactcgcttttaaataaatgctccgcttagtgtgaaagttgaattatttcctttttgacttgaaactgtactttgtttagttttttttgtaacttatgattatgatcccgaccatcagtatcttattcattttttttaaccagtcccctatagcagttttctcatgttgtgttccctttacctcctgggaagccctggctttatttttagggctgctgctgatatgttgcgggggcgggggggtgaggggtgggggtggggagtatatcaggttctttgcttatgaatggccttcacacttgaatgtccctttgtctcctgaccaccactctttcccaatcagcctgtgctgcagctacgtgttccctgaggtcccgggagagccagcgacttcccaggaaagattttttcctgtggctttgagagaccattcttaacgcacagaacaaattttataagttctgtcattgagaataacccaaaggataaggagggcgtgggcagatatgctaggaaaagtgtgtccctttcagcacgcgaccttaggaccattaaagtcatgggggaagcacgtctgcagtgctttgtgtggaaacgctgaaacttccaccgtcattcaacagagggcggctcctcctttgttttggctgcaggtgctaatgctgactttgcaaaatgacccgcccactttagaaactggtgtagaggataaagaaatgatgaaaaaatacggcaagtccttcagaaagttactgtcactgtgtcttcagaaagatccttccaaaaggtatgccacttttggagtgggagcgagtgccggcctttgagtttccgcaaagctgtgtttgtggatgagaagaacctacattaagtctggcctctgtgcaccatcctgttagtgggaggaagcctgnnnnnnnnnnnnnnnnnnnnnnnnnnnnnnnnnnnnnnnnnnnnnnnnnnnnnnnnnnnnnnnnnnnnnnnnnnnnnnnnnnnnnnnnnnnnnnnnnnnnnnnnnnnnnnnnnnnnnnnnnnnnnnnnnnnnnnnnnnnnnnnnnnnnnnnnnnnnnnnnnnnnnnnnnnnnnnnnnnnnnnnnnnnnnnnnnnnnnnnnnnnnnnnngcaggactggaggagggtgaggggggaagaagaagccatggaggtggaggaagaattgatcctgcttgcttggggtaggcaagtaggtactgtcaccaagagaaagtgacaaagcagatgtcagaagacgctggcaggggcgagggcagccgagcttgcaacctgcactaggtaggctgagctgacctcccaggacatccggctagctccagtctaaaccaggccaagttactgaattttgcatgcgcttccttttagttgcagaacaagttgtctgtgccattaacagattagcagcagatgaaagtttacctagaaagattaatcctgtgagcggaagcaaatggctttaaatgaacttagtgtttactctgtagtcttaatgttactgccctgcacgggaacaactgtcattttgaatctgtttcttcctttttaatcccgggactttgaaatacccctggcatagacagtggaacccagaaccctttatcatctacaggagagttttagtgctgcgcatcagcggcaagcctatgccttgtatagatttggcatctctctaacagtcctggatagtctatcatacgttccccaaggtgctgatgttttgcttagatataataataataataataataataataataaataataatattctgaaagttccccattcagggatgggaccctgttgttataaggcactgctttattccagtcataaattcttcaatggattaagcttttaaacttttttttctttaagcagcattacggtcagttaggcgagactttaacttacaagcaacctctgtggtattttgggactatttgctattgtgagtttttaattatttcccaccaataatccgcacaggctgtttgtgcccagtgtttctcctgtccttccttccctttggtgttttggggttagtcttcctccagtgatcttgccctggccttacttgccactctccttttggtgacaatgctcttagattttaactttgttctccgggttctgcttatcctttccttgttggaggggcgtcattgccacaagggaaaaaaatgacgtgacagagaagtggttgagcctccctcctcacctggttcgagataaccttgcatttctgcttagttctctgtctttactgacagcctctggcattctggaataagttgaggttccacctagtggctgtgacaagtaatgccacccagctctgaaagtggttccccagggtcgacttgctagtgtgatgaagtgacaggtttgtgatttaatccaaagaagttagatttcagtgcagtgtatttaacagacatttaaacggtttggtttcttgagaaacgtagagacttttccaggtgttccacactgtgtgagttctgaatcctgatcccctgtgtgtgagacagcttgtccctcagtgagacagtgagccagagagaagagaggcggagcttttgtgaggcagcctcgagttagggttgatgtgtgcaggaagcctctccctccccagctgtttagcctgtgtgagcaggtgaggcctccttgcacgcaaggtatatgcagctgttctcagctggaggagtgacagagcattagtgctgcaccccctccccagaggctctgcctgttcatgaaaagggaaagacgttgaagatggatgtgaggacgagcacagacaaacacacaaacagtcatcaggattgcgagtgtagaaaaagaattattgttgatataacgtataacttaaaacacagccagcatgaaataaacaaataagcatttatgcacatgacaaaattttgacattttggtgatgtttccagagaacttttagtccgtcttttctgttcatgctgtttaaggctttctgctttctctctctcttacttttttctttccattctctttctgtagtgattcaatacctagcgggattccgagctctatttttttttctcattctcatgacttaatttctttgtctatctaatgggtgtagtaattgtcgatcaaaggatcgttctgaggatgtggtggagtgacacccgagagttgcccgcagagccaggggtgagccccagaactcaggatatagagactgccttcatcatttgtaagaagaatcgctgcccttttgttactaatcacaggacgctaatgctgtatcttttaaaaccactgttacacgataggcttttgttgatttatacaacaaattcaggcttttagaaggacacacgttcttctttatatgaggagactcatgggagtttgctgtctagaggtgatttaaatcctctgaagagagtttcaggaacagcaaccaggttcaagagggtttaggagttgcaagaaaactggcaattcttgcgagatttgtgttgcctgcattagctctccctgcagtcttatgcagttgacaggcagcaaagccctacctagtgctgaggcatgacaaccagtgacagccacggtgcagggataaccaagacatatctcctcctgcactcccatgctggactctgcaccctcctcttgacacagagttgaggtgtaggagccctgtgccccatagaggtttgtgctttgcatagcagactatcattgttatttcctaataaaatgaaccttgaccgtatagtttaacatactcgtaaatgatggcagcctataggaagagtgaacaattactttgagcactgggggctgggagggagcagtggttactgttacatagatagatctgtcagaaatgagatagactggaatattactttgcctagggagggcgggagagccatgcatagcagttctgcctgaggtaagtaaggtgctggagtttattaaagcatgttgttagaactgttttgactttataacactcaatcctgagtcctttgagattcatttgagtctctgtggactttggcccatccatttgtattggaggaatctgttgagggattttcttcaatgatgtaggtacttgagtgctgcattgtttttacagacttcagactcagtcatcactcatagcctggactatttcaggggctggtagcatttttagcatttcttgtaaaacagggttccctgttacattacctatgcactgctatgtggtggttagcagccacgtgagaggtgggcatgaagatcccttgctccagtagaactcagaaggcaggcagggttacaagctgcacagagcgttttgtggttgtttctgtgaagctgagttcagcaggcaacaggcacctcagcctgcctcacacattccttccttccttccttcccctcatttctcctgctttcccattcccctactttctcatggagggagcttgacagatgtgtggttttactctaaagctatgaacacttggagctgacttcagtacaaaccagtgacctgctgttgaattgttctctgtatttggagtagagtgacctgcaacttaacaattgtgcctatttaaaaaaaaaagaaagaaagaaagaaaaaagaattttttaagccatccctcccttaccttatggtgtcattgtaatgaagggtaagggtggagtggagggggcagaaaaagattttctctgcaatatgctttccccctttatatttttggttgccatagaaatgacctttctcaagaaaggaaagaattttcctagttccatttctcaaggttagtccagtattctgcagccttctctctaccttagtttaacatttgacctttggcgtgtactaggggaacgaggggttactggggaaagggaaaatcattttgggtccccagataggcacctcccctcttcccgttctttgttttgctagccagagccttaattttagtgcctcccctcccacccccctctgctcttcctcactgtgactagcagatgcttaggcctcagtgctggctaaacttagccgcaggagttacagtcctgcgctcaaatgtctaccagcattgccttcacttcacgctggggtgtgaaattaagctacagtagcccactgttctgtgtcaggcactgggaatataaaaatgaattctacaggctcctttgccttggaagggcttgtgacatgactaagtggagctatcatggacagggatcatagactgagatgaattgagaagaggagtgggaaaagcccagctcccaagcgagcagcagcagttcccagcaaagagacctactcaggcaaggtgggggagagtgcccaaagaagttgtcttctgaattgtttcttgactaatgagcaaggtgtactagttggttatgtgaaaagttttgagtcaagaaaagcactgcctgcgttgtcacaatctaacaagggacaggtaagaaccccaacgtagttgaaggcagaattgcacgaggttgacggagatagactttgggatcattgagcttggtttggttgctacctctgagggtaggcagcacagactgatgagcaagacgaataaatatacagcagaatggtaatcgatgcattatgtaaaatgactaagtcctttctcatctccaagttctttgtttttaaacaagatgtagactcatgcatttaatgagtttgccaagggatatggccctcctgttgcttagacctttatttaatcaaagcagatatcaattagcaactgttttagtggatgcatgacttgggcttgtttgagaaggattttataactagcattcttgaaattgaaaggaaaaagtggtaacactaaaaatctgccttgcacagaaatacagattttgactgtcagactaaggcaggtgctggcacattttagcagtagctgcctatcattctaggcacaaggacactttctacccttgtactctcaccccagtatcattctctttgtactttagctagcctgtgaaaatattaatatcccatgatgctttcgtctcccttcccatttgccattatgaaaattttacaacacacagaaaacgtgggcagtagctcagtgtttgctccagtcccccgccccccattccatcacggtgagcgtccccatcctctgggtgttctgtttatttactgaattatttgaaagtaagagaccatgcttcactacgtgtttcttccaaacaaggtcatgtgcccacgtgatcatgatgtttttccttgtgatcacgtgatcacttcagaaaatgagcagtatatatatacatacataaatatatatatatatgtgtgtgtgtgtgtgtatgtatatatatatatatatatttatatatatatatatatattttttacaggcttcttctctgtggtcaacttatgtatttctaaatgtcttttgtaatttttgctgcttcctttccaaacccagtgtttgatcaaggataatgagctgtgtttggctttgaattttatgtctattttgatctagaatgcttccctcatctcttctcccttttcctctatcatcctgaagattctcctgcaacctacccttcaccccatactcctacttccttcctcttccttccccccctttccttctcttatggtagcagtaggacataacctgctggatgttaggtgagtgctgctccattgaccaacatgtctagccttatctggatgagcataattagggcagcttttttccccctttgtacagacacaaatagagaaagctgataggaaatggattcctaattaagggagtattgacaaaggaagctattctttatggacgattgtcagttgaacatagaaggaatgctaaaagtaggaaatcaatgtccggctacctcctgtgaaatatttaaggcaaaaatggtaaaccacaggggaagggtttcagcaacaagatatccatacagcacgccaagacgccactcagcacgacactggctaattgctgtggagaaggcaggccttccagtgttgagctttggagcctggggaccaagcagttacacttagcatcagtgttaatgttctggcccatcggtcgcctccgtgaaagcggagcttgagaaggacagatccaaactgtgaactttggagtatttacaaactcaaccagttatgcatctcctatccaaactccgcaattgggaatgtttctaaatgtgtaattttatgggcagtttagacaccgttcatttgcatgatgagatgtctttgagccttctggacctgactttaagtttaaggcacatagagcatagagaagcaggtcacatgataccataaggaagtagacatatccagaaatgcttgtaagggaatttgtgttttattgattaccatactattttaaatttccttgaaaaaaagtggtccatatacagtcgaagcagttgctttaatactccgcagactgagccagcacacaacatctgtctgtgagcccttctcagtagatgctgctccttggaaatcacagaacaaagttcactccgtcattcctttgacaaggtcacattgcagtttgtatggcttcttaataacataggaatttagctcccagcagttgctctgccaacttccagaaacgccaaagttgacatactgaagtatacgaatggaggctgggaaattgattgtgcccaaaccttaactcacatgagtttatgtgtttggcagtagaggaatttggaaagaactagaaaaccgacattgctttattcggtgccagcttgtgactagcttgcttgttggctttgcttgccctaagagcagtcatccaaaaatgctctaaggttaagctgtagtgtcaaggaagtctatttattatgtagcaattgtttcaactctgatttcttattcatctttcaggcccacagcagcagaacttttaaaatgcaagttcttccagaaagccaaggtaacatgctgaacacccccaagtcaatccgctgttttgaaacggccgagaattcgcttccatctgatttgatgttaaaccgttgttgggataatctgttttgcagaacagagagtacctgatcgagaagctgctgacaagaaccccagacatagcccaaagagccaagaaggtaagcgcgacctgccgccatcatcctcaagggtcctctccccagcctgaagtgaaaaccctgaagcaacaggtagatggttcctacatactctggcttgccgtgcagagatgacctgatcccatgactctgataaggcgttttccttctggttatctcagggcatggagagagcacgaagcttgcagggtttggatgatgaaaggaacgcgagtttcctacgtgcgatgtgtagaataatagtcacgagtgtttgttcacatgtgcacatgtgcctgtggaggccggggatccgtggcaagcatcttccctcaggttctcttcactcgttgtctgagtacagtatttctcactgaaccggaagctcactcccttgtctagcctgggtggccagctcccgctgagccagctccagggatggaattgtctacattcttagctccactgcaagccatcttcagggttacagttgtgcctggattgcctggatgtcagtcctgacagtgcggactcagctccccaaattttactgaccaaaccactttccgaccccaaatttgattgtaaaggttagttgaatatcctcacaaaagactcatgatactcttatagcctgctttatgttcgctaagtttagattacctacagtctttcgggttttctagtctcaaaatagcatgtgattatatccgtatttacctattacggattgttaggggtttcattatgattagtatgaaatctagtgagctgtagccatcagtgtggttacttggttttaaatttagtgtcatatattaattaattatatattgtattatatattatatttaattaataataaaaaatgtgtgccctgggggctggagagatggcagagatggaggtcttctaatggttgacagagaggggaacctgagtgggttccttgggtggtattggagtctagtctgggctcttttgatcacaggtccaaaatgtcatccagaggtctcacctcctgccccagtctctgtacactgaagttacgtgtggcgcccacccccctccttcccagtctgctctgtctcaagagcttctcctagctctctaacaacccgacagcccttccaccttcctttcttttctcctaattttcactcttcctttcttgtctcactgtgtagccgagactggccacaaatccatgattatcccgccttgccacaagagcttggacaccaggcatgcagcggtcgtcactgtacacagctcctcctctgttttaaaattgtttaggaaatgattattttatgtgtattgctgttttacctgcacgtgtgtttgtgcaccatgtgtgcatgcttggtgcccgtgaaggccagtggagggaagctgatgacctgaaactagagttataggtgacagggaaccaccatgtgggggctcggaatggaacctgggtcctctggaagagtagccagtgttcttaactgctgagcacctctctggtccagcctcctctgtttttttccccctttaaaaaagttatttgttttacctcttgagactataatttaatataatataattttcccttttttctttcttcttaaccctcccatgtacccctccatgttttcttgcaatttcatgaccttttttttcattaattgttgttctatacatatatgtacatgtatgtacatatattcctaagtatcatctgttcagtctatatgatgttacttgtgtgtgtgtgtgtgtatgttttcaagactgaccgtttggtattggaccaccaaccggtctgttcgtccttggggaagactacttctccagctcccagctctcctcagttgcccacaggtagcgttgaggcccgtgggcattcccacccactttggcaggtctgttgctgctgtccttcctcaggttgtgtttcagaggttggcgagactttgtgggtgtagcctctgacattgctagggacagggtctcacagcagactcccagatcacaggctttcacaatctttccaccccttcttcctcagtgtttccagtaagggagtgttttgtagatgtgtccattgggactgggctccacaactctgcctttgatctggtgtggttttccgtagtggtgtctgttgcaagaactttccttgctgaggggtggagactacacctgccatgagcataaggacaggtgttaaagtccgacgcccgggtttttaactgaacatttgtggtagatttctagcttccccttaatttcctcttctagtgtttcttagaccctgcttcaagattaactgtctgactatgcacaggaatgcctttcaaaattaaacaaagacaaacacgagggtcgataatgaaaaaaaaaaaaagaaaagaaataaaatgactttctgcctaataaaggccgaggttcttaatattgaatttctaaccttacagtcttatctccagaaaaatgaaccatgcttggctccttaacacagtgcaaactttccctgtggactttgatcaatttgagaaaatgaagactctgttcgggctatgactttattttctttccttaaaaatatcttattacacatagtgtgctgtctatcccaaatcccattttgcctttgtgttgggacagtgaggaatagaacttggagagatgtgaatatccaacggtatcttctcacgtaccttaggtctttctgcattgtcgtcgtcatcatcatcatcatcgttgttgttcttgtttattggattttattttattttattttgttttattttgccttttgcttttctgcctctgcttcccaagccttagaagtaagtgccggtatgtaccattgtacttacgtgctgaggtcttcattttaggcattaatgtgctgtctgtctctcccacaaaaagtggctttctatctcagaagtctgtaaaggattattaagtagtgtgtcacagcgaggcttcctcacccacccagtttcccactcaatagaccgcagttgtttgctgtgtgcatgcatgatacagaagagcagcctccctgcctctcctcctgcctggctggtggtgagcaaacatgactatgttcaccactgggcatctctcttgctgccaaggccatgggaagcagatgctacttgaatcaccacgtgtagtgaaaacctttcctgtaggatatttccatgtttcctggcttttcacagcactttggtaacttttgtttaaagctggtttagggtttttaatgcttaggcttccttacacagaggtggatctcctcgcttcttgctgtcctgtttcttgtggggtttcctcaattttacgcttgttccaatgatgtggacttgctcctcagacatcactccttgatgctaggttactggtgatctcctcctcctcctccccttcctcctcctcttcctcccccctcctcctccccctcctcctctttctcctccctttccatgtcctcctcctcctcttcctcctctttttttttttttggtccactccactttgttgtattctaaataaagctatgaccatttataactagtacgtaaataacaaatttgtctgttgcaaaagcttatgatcattttgcaactctgttgattttaagtttgtcataaatagtatttaatatgattccttcttgttaacccaaattaacatgtatattaatatggatgattttcatatttaaaggatacacaggctcatatgcgattgttctctgaaaatcccttgtagccatcactactattcttttgtaaggaactcttgtgcatgcatgtgcacacacacatacacacacacacacgcacatgcaagtacacacatattcacacagttttccttataaaactgtttttactcttctgccaactttagggaatattctcacatttagggatcatcttgattttctttggttctaattttttgtctttgatgtggaatttctgtgcgatccctggtatacagtgaaaagtagtgagggacttgatgctcctggaccctgagctgcttcctgtattcttaagctaacaacaatctccaagagctgcattaagcacagctaaggacgttcttttctacttcttcacatttgttcttgttcatgagcaggaagggtttcctgccatctctgcctttcacatagctttcgtgtgtgtgtgtgtgtgtgtgtgtgtgtgtgtgtgtgtgtgtgtgaatgggttatttcccatctcccctttggatgcatgaattgccaatggcttacactgttggagtgagaaggctgggagcacactgttgagttaaaactgaacccagatgccaacggttgtacacatcccatgtcagaaatggctatcgcctaagctgtgtgccggaggtgtgaaacttgaatgacctcatttgcagccaatactcacttgctttctgatacccacacagggcaaggcaggggaacagcggtcttagccacacagatggctaaatgtcactggtcagctggagatcttaactgagagggtctgggtttagatgtactgttcacagctcttcttactgtggttgctgagttctggtgggaggcaggatgttagagggtctgtgttagcgtgtactaacctcacagatgacaagttagaagcggctagtagttagctagtcagtatcaggagaaagggagctaggcatggtggtgtgcctcttaatcctagtacttgggcggcaaagacagaggtaggcagacctctgaatttgagaccagactggtctacagtgtgagttcaaggccagccaggtgaccctgtctccaaaacaaaacaacataaaacaaaactaaataacaaagaaggagaatgggaagtcagcactgccaaggtgggcacaaacattacgaatttcttttatcaatctgctaagattgtttttgtagtttaaagacttaaaacttttagccctatttgcttctagtttgtgtttcgaaatcactaggtagaaataactacagtttggggctggagagatggttcagtgtttaagcgctggctgctcttccagagttcaattcccagaaaccgcatggtggctcacaaccatccgtaatgggatctgatgtcctcttcaggtgtgtctgaagagagtgacggtatactcacatacataaaataaatacatctttttttgaaaagaaaaaccaagttcacatttttaaattctgtggtgccttatatattctttcactttctgttttgaaataatttcaaacttgcaagaaacttagaagaagatctcacaactttctgcaaatattttctttttctgctctttccctggaacagttcggaatacatagcacacaaggacacaaggcgtcctttgcccacagctgcacctttgtgtatctcccacacaaggacagtctcctatgccacagcagcacagtgaccaaaggcaagatgctaacactaatctctatgttctgttatgcacttctccgctcttcatcaaagttgttgattttccagtgttgtcagttcccctacaggttctcatctgcaattcctttagctgcttggtttcctttcatatggagcagcgcgtctcttgtagttgctgcacttttgaagaatccaggtcggttattccgtagactgtctccataaagacttagctgatatttcttcgtgagtgcactgaccagcgtgttttgacaggcttcttaggagtgaggctgtattctgggtgtattatattacgaggcacaccttgttgcctccctcccatcctgctgaggtttaatggtgactacctgctttaggcggcacctgtcagcttcttcattaaaaacgnnnnnnnnnnnnnnnnnnnnnnnnnnnnnnnnnnnnnnnnnnnnnnnnnnnnnnnnnnnnnnnnnnnnnnnnnnnnnnnnnnnnnnnnnnnnnnnnnnnnnnnnnnnnnnnnnnnnnnnnnnnnnnnnnnnnnnnnnnnnnnnnnnnnnnnnnnnnnnnnnnnnnnnnnnnnnnnnnnnnnnnnnnnnnnnnnnnnnnnnnnnnnnnnnnnnnnnnnnnnnnnnnnnnnnnnnnnnnnnnnnnnnnnnnnnnnnnnnnnnnnnnnnnnnnnnnnnnnnnnnnnnnnnnnnnnnnnnnnnnnnnnnnnnnnnnnnnnnnnnnnnnnnnnnnnnnnnnnnnnnnnnnnnnnnnnnnnnnnnnnnnnnnnnnnnnnnnnnnnnnnnnnnnnnnnnnnnnnnnnnnnnnnnnnnnnnnnnnnnnnnnnnnnnnnnnnnnnnnnnnnnnnnnnnnnnnnnnnnnnnnnnnnnnnnnnntctgcgtcattatggctgcacgttcataggatgtcaggggtaggaattccttgggatttgtagtggacagggtacatttgcatcagactcaggcagcaagtgaggctggtgctattctctctccatctgtgctgggcacagctgtggccagagtgagcagcctgacctctttgtgccagcatctctgactctgtgctgcccggggctgagccatggaagcacaaggatgtctggcctcgtgctttacagcagcagatgctgagtccacaacgatgtcctgggcattatgtgaataacggggtcacccatggctgtggacagctgggtgttctacaagcacataggcacacagctggggtgggtgacagggatggcttctctagcactgcgtccctggatgggatggacagagagctcttggcgaagctcacagaggaggaaggcggtcccagcctttattctttggaactgtgatttcactgctgttgactgttcagcagtctttatattctctttttctgccccataagagccagagctaacctctgctatcttgaggtaacctctacttcccatgcactagtggagagcatgagagtggggagctgcagtgtgcacggtcctcctcaggagcctccacaccacttttagtcgcttgtttccttctttgtttcaaacagaaaggaagggagagcaggcgttgttgttacatcttgccggatggtagcatgacagggacttcccaaaatgtaatgtgaggtaggcaggggctccatcctcaaccctggtctatggtcgatgctgcttctgccacctcccgaggaagggaaaagggactggaaatgaattccataaggggcggggctgctactcgtgggcatgccgagttgtctactttcaacacaggtggggtgggggagtatccatgccatttgtggccaccggggcctgctgggagaggtcctgacagtgggaagctaggagagtttggtagctctctggtgggtttgggcgaatctcaggtggtagaagggcttgaaaaatctgaaaggggagacatggctagtgagaatttgttaacaccactcgttaatcaccttttgttaaacaagtgattaaatcatgagcttagcttctcattcataaatgatagaggcaatatcctcttgtgcttgtgtatatagaattgggcagtgcatatagcataacagttgggacatattttgcaataaatagatgttaccatataatgcgttttatcaccttataatcattcatgttgcctctaccttcaccactttgctcttacaatgccattatgtctgttttgtgctggctgtcatgggttgggggtgcatagcgtctctttctggcactgcccccagtagtggactctgagatgaagatagatacaggacagcccagacggtggaactcacttttcattagggagcacagagcacacatccctgtagctccaagggtagcagagagtcaaaccatcagatcacgtgccctggcgtatatactgctggtgtgagaacggtcatggagctggtagataagcccaggggagaggagagagaagcagtgtgtaccgttcacttgcttgtgctgggctaggtagttggttcatattttctgtctcagtttttgcatcattagaacagtcagtgacattctgaatgtgttatctcttgaatagtagtaagtgggagatatgttgagtatggccccaaagaccataactatgtttaaatagctgtggaaaagtaaaaacctggtgtatactgctaagccaatattcaagaccatcaatattcgcctcagttttcagactctaagttgagatccagaactctgggccttgactgcagccagcatcctgactaggtggctccaaagccaacttctcagcctcttaccgtttaggttctgtagttgagaaaagcaggaaacgacttttaagcttctgcaaagctgtcttcctccctcgtgccatctcagttcagtcaggtgttgaaaccagaagaaatgaggtggtttttagctttgttccatgttttcccagtagagggcagcagttgcctttagaggaccccaagggaaggttaggcgtgtggaagccgcagccctggagcagaagctgactgaggtaatccggttagtcaggtggctgctcttttataggacaggtaattgaagggtgatgatctaagtacttgccacttttattttgaattaaagattttaaatctgtgttacattttctttaacaaatcaaagaaatgtaatagacgcaattcatgtgaaaaccaagagtcttaagtttgggagatagattggagtgcttccaggatttcgtgattcaattaatacagtttagtagtatcaggctattttcaggcagttctttggtttccgagacaccttagtgctgggtgaacagaggcagaagggactccaagtgtgtgctaactaactccgaaggaggaggagaagtgagccagactcgattccagctgccacgtgcgctaagcattgtgacaggaagcaaccttggaagagagggtttatttcagcttatacgtccgggtaacggtctatctctgagggaagtcagggcaggaattgaaatagaaaccgtaaggaaacactgcttactgggttacctggatcatgttcagccagcttgtttcttacacagtccaggtccactgccttcatccatgtgcccagggatggtgctgcccagagtgggcgggcctccccatgtcaatcatcagtgacgaccgtttcgctcagacatggccacaggtgagtctgaaggcaatgatttagttgaggcttcctcttttcaggtgattctaggttgtgtaacgttgacaacagaggtatctgggatacgcaggtgcatcagataggctcggggctgcagtcctcttaactcgtgtgtttcttaactctcctcctacagaagcaactgcgtgtgttggtgtaccattgagggaccacatgctcctagagaggatggtggaggtgttacctctcataaatgttagggctactgttcggcaggtacagtgtctggggcaggtcttccggggacagcgaagacgcagagactctcattccttcttaagtgtaaggtcagtttaaaagacttcctttggtgggagcagtgccttctcccactagggggcgctgtcagaatagttcatttcagtcctgaccctcggaatcgctgactgttgtataaaaacaatctcgctgctgtcgattgtgtccttttgctcagtatttgtgctgcgtgtgaatttgacagaggtgagggcagaggcagcagcagggcaaaagcatcacagaatattactttccgtgcagacgaccaagcaagagaaaacaaaacaacccccaaacattttattgttaaatttttcccctctccctgggtttgctatgctgtgtgttttttgtttggttggtttttttgtttgtttttctctgatcctcacttggagggaaagcctgtgccttttagattgaggtgacttttcaagacactgagctttgttaggtatgggaggtttggggatccattttggagatttggaaacagcgataagaattctgaagtaagagacgctggttttaaactgccaagaactgtcagcattctgtcctggaaacacttgggcggaatcattggctgtgttgcacggcagccacgtgcttgagggcggtatgttcgtgtgcagtcagcgcttcccgtttgcctttgacagacttgctcagctttcccaaggatttgtatgtacatggctgtgttttccaggataggctgcgtatgtttgctgatggagagcctttatccctgcttgcatcccacctcccgcccacagttcgccagcctctgtacctgactcccagttcacagcttcctacttggaatcttcgtgctgcttccaggatgagacctgcagcacagggagggcagggccgcgaatggttccttcatccctctgggctctgtttccaccgtgcccacctcagccactggtgggtttattgccttacagagtttggcaccgggaaatagaacctgggaaattcgcacgtgtttcccacgagggctctctgctggtcctctccctggttcagaaagctgcccctcaaccaagctgcactttaacgcgcagtgtcttcacgcggtcatgttttgtttggacatttgcatggcagcaggaggtcgtagttggaaggtctggagaaaaggactagctggggggagaagctgaatgttggctgggttttgggggtaggaacccatcccctttccagcctgagctttttgcttcccaacctctagaactgtaacaggcttctggctttagcttctgcacagccatgccttccccaccacgaatgaaggaccgtgtccccgttaactgtgatccaaaaatcgatccctctctccacagttgtttctgtcaggtgttttgttaacgaagacaaaagccactcactattgctgtagctccagggtggctgggtgaggctttctcatgtctcccgaagccccagctgctccatggtcttagtctgtaccaccctggccctgtgactgcagctccatggccctgtgaccccgagaccccggttctgtcatactctgtgtcaagctgagttcccgcccttcgactttgccgcggtgcagcctctgagtcccgtgggcttaggagcagtgagtgatctgttagttcctgtgtagactgtgctcagcactgtccctgcaggtattttttaaggaaacttcggggagtaagatggtggtgcagtggcctctggcataatcccgagagcaggaggagacagctaaacctttgctccagggggatctctgaggttgctctccgctctctgggattcccctggtccacagctaagatttggatgcagctgattcaaggtttaaaatctttcactactgggctttctgggagtccttagcctaaagtcgatggttgagccactcaacaaggtggctggtgcagggggttgacatttagtcccgcccagcatgtcctctagccagcagggagcatgtgctcccctgccaccgttcagttcacttactaaggtgctccaatacctggctaagttaattctccctaatcgtgtgttcctaaaatcttctcctctcctccactgaggggaaatcgtgttaaactttcctcatctcaatcttgaaaatcttgaaaatgagtttggcattttggaggtgggaagctcaaagtcactgatagtcaggaagtgtggggcattgtgggggcaggaaggagtgctgcggagagaagcctaccttgtgccttcctaccccctttccggtcctgttccctgagtctcagagaccatggtaggggagctgaggtgcagaacaagtttagaaacagagaaaagggggcaaggatgggggctgtccttgtttggagctaatcaaatgtgattggtttattagagattccggactaactttttgaaaggcagaattattttgtatttttagaaaagatctttaaaactcagtcattttgaaaacaaattaaaattgaaggaatctagttaaggttgctttgataacagattttttttttgaagcttgctctttaattactgctgacacattcaaatgctgatttagaagcatctgagaagttctatttactttcccagactcaaacacaaagggaaggagccctgtgcagcctgctaggcagccactgggctgaggcatgcggagggagcgctcacacttgaaaggctgcatggagctgcttggctcctcagccagcttgttggcctatgtgagggaactggccaggcccgaagggcatgcagggttgggggaaagtgcagacctctcacaaagcctcaagcagcggccaggggaaaggctctggggagctaagcggggaaaagtggccaggggaaaggctctgaggagctaagggagagaaagcctgggccacctaaatgggcttgaaggtcaagctcttcagagctggtcctggcactgccacctgctcacgagggagccttcactgtgagccccttgtggacatagccaactgttgcctctcactgatttgtaggcttaacgaccagaatcctcaactctgtgtctttcaaccagtcagctgcagttctccagctctgttgacctttgagtctcacctattctgctacaccctcggactggaggtattcctccctctgtctgcacccccaaggagtcaaagagcgaagctggggtctatcagacactatcatattttcagatgtcggtgcatatctttatgtgtcaggtgatgtctatcatctttttgatggctacatgacattctgctgcaagaatgattaattaattagttcttttaattacagaggggtgaacatcactgggtgtgcactactgctaaaatgttatctatttgttaggatatattccaaggaatgaaattgtttcattaaaaaaatgacctataattgttaatgagtagtgtgccttaccaattcttaaaatgtaagacgttttatttaactctacatcttagtctggggttctagtcaagtaatgctttacacacacacacacacacacacacacacacacactacttacatagacagcaagccagatacacattacttgcacagacaggcagatagacacagtatgataccttattacttacacagacaggcagacagacacacattgcttacacagacaggaagacagatattacttacataaacagatagacaggcacagggtgccttgtttacacagacaggcagatagatacacctctacttacatagtcaggcaggtagacatccattgcttacacagacaagcagacaggcagacgttgtttacacagacaggcgcgcacacttttaagtactacctcatttccacaggcaggcagacacagtatgtgctatctatctcacgggtactcgtcagtatttggcattgcagtcagcgatacagctttggtttgttttgactttctcctagagctgtacttagctattttgtagcgagatttcggagcttgaaactgtcggtggtaagtcaaggaaagattccagtgggccctatcctaacgcagaaggacctgctcttgggagattggtagtgagggactctgggccatcctgttctttttgtataaggaattaggccaagtgtggtacccgctgaacgtgcagtgctgtggggtacttttcctcattgctctgtcgctataatcgcctctgtccagagcaaacaaatgatacagcagctgcaagctggagagcgccggactggcccttccatcatgccctggctcacgcctttgcagggctcaccacagagacccctgtcagctgtctgtgctggccctggtgtctggcatggtccacacccacggagaacttcccgatgatgttatctgctgtggaccttggctggcaacccttggggcaaaccagcaggcttgccttctcaacctcctgggtttttctttttctttgtgaagccaagaccatttaaacccagcacagccttgatctcactgtgaacgtgcgagtgcagaggaggggaggggttgcccgttgtacacgtgagcatacggaagcatttaaatgtcacaccacgcttaccttttggtttttgaggatattgacgagaaaggttattgcgcaccccctggtttctatgtgtgcggagtgcagacacccagcaatggtgggtgatcttgttttgatgtaaaactcttcatttgcaggaccctgagtcgctgactgacgtctatttagagtcactattatttgcttctgtttctgattcaattgtgaaattctgatttcttcatggctggtgaatttttttaagttctcaccatcccctattcatccaatacatgccaacccctagcagaatctatctcttttcagtaataaatacctcccaagcagccttttctttacagcagtgcctctcaaccttctaacacagcaaccctttaatatatttcctcatgctctgttgcccccccccaccatacaactattttgttgctacttcataactgtaattttgctactcatatgaatcataatgtagatatctgatatgcagaatatttgatattcggcccctgtgaaagggccgttcaacctccaaaggggttgcgacctccaggttgagaattaaagtcatctgtgatgctgtttctatgacaccctaccgtttctccttactacctctcctgtagatgtttgcctttccccttcctgtcgcttcctcatagaacgtggttttgagatgaacagggcctgtagccatgccctgtacatggggagtcacgataggcagatcctggagcgtggcccattaaagttgggatctggaatgtgatgtccagagtgattcaaaggcttcctctcgcttgagtgacactgattggagggtgtggtacatttaaaatgtggggcttacacagagttgaggctggtaggtgtgggaccttaaagaggttttttatttgtttgtttgtttttttcagaggggtcctgatggttgggtgtgcctgtgagaggcaattctttacggcattgtttcaaagggattggtgtgtgtgtgtccttaagatggaggccgggtgagtttctttgatagggtgcgtggttggtgtgctgttgaggtggtagttagatattagcggctttctgtctctgtctttgcttctctttctggtttcctggacaccatgaggtgatcaggtttcctccagggtgtgcttcataccatggcttgctgtgatgccacaggcctgaaggtgacccaaccaagtgaccctgaacaaaagttttggaagccaatagctgaaaccatccctttcctcttaagaagctgaacttcttagttatctgtcacggcaacaaagtgtgactcacatagctccttcggtaagcaggccaggtggtgacgatgcatgttccagggatagccccactgtgtcctgcttcctgggctggaaaagccacattgttaaactgacaccaaagggtgagatcttgctgactgatgatctagccctaactgaaatgcccaccttgtatctgctgcttatctttctctgaccccttcatcactcagtgttcccttagaactctgcatgttgctggagcatctgagcctcttgctcgacttcacatccgtctgcccggtagcattgtgttagagatgtggagtctcccaaagtgtggcttcttatggcatttacaacgctctcattgtcatggttaaagttgcctccagtgtctctggtgttagcagcacaggccatcaccttcaccatctccagaaggcccagaagatgttgaggagactaatgaatgggcagtgaggttttgtcttaacaagtgcggagtaggaggcagtgacgtggagaggtttcattgggccatcaagagatgctttggaaatggtctgaccttgttgtatgggtgagtttttaatgtgtgcagggattaagtacctgaaaactgaaaccataatgacctgggaattgaagacctgaaagaaatcttagatagtgtccttggtgctagagctgccccatcatggccaaggcagtcgaagaggctgtaaacacatgaagtagggtgttgatcctttatctttcaggacacctggcaaggctgcagtgctgggccagttggtaggtatcacttcctccatgtatctccgcagctgtataaatgcacatgatcattttctgtttgccaataagtagacaggatggagacagtaatccaaaccacttaagaacaaagtctgtgaaccacctggatatccaaaaatttgaagtgtggtgtgtgtgtgtgtgtgtgtgtgtgtgtgtgtgacacacagagagacagacagagagacagagagaaagaagcatcagcacccagttggtnnnnnnnnnnnnnnnnnnnnnnnnnnnnnnnnnnnnnnnnnnnnnnnncctcctcttcctcctcctcctccttctcctccttctcctccttctcctccttctcctccttctcttccttctcctcctcctcctcctctctcttcttctcctcctccttcttctttttttattccagtctagcttccagaccatgggtaccatcactactttcagtgtgactcttcccctcatagttaattctttcaggaaacatcctcacagccaaccccaagccccagtgacgtgcctcacccgctccagagcgattctaaatccagtcaagttgatgagcaaggttaatgatcacaagaggagatacctagtagcatgaaggctgagtgggttttaaatcagtggctaagacttggactcgtgcttttgaaagaaaacattgcttaagctgcagtcaaatgacagaagtaatgaatgactgagttggttaagactcgggaccgccctatttggctttctggtcttggtgcttggcatgcagtgtgataaaactggggcttaatagaggttgaccagaagaatgaatgtgaatgtgttgagcctgatttttgtcttactgggaggttgggccgatgcctgtcaaacctactccaggaaagatccagtagtgttcttgttttctttcttgtttgtgtttagatgactggaaggcagagcctacccaccctcaatggaattgagaagtgttgtacacagtgccttatcccactcacttccaagggccttagaaacttcaggcgcattacacagtgcaacttagagagatactggagagccagggcatgtggctcagtgctagagtatttgcctagtgtgttcaaggttttgacttcagcaacactcctcaccaccaccaagggggcaaagggagagagagatatccaaataggtatttttaaactcttctttgaatttatgaaaaaaataatcattttatgaaattaattttgctttagattattttccttatggtctctacatgtgagcatgaaatgagtttggttatttgattgacagtggtggtggtgcctcctcttctttaggatccattatgtggttacagacaaggaccctgcctttgccattgtggaaggtgggatactctgcgggacaggctctgctttaagcatggtttatatttaatgtttcccttctggtctcagctgaaatggaggcatatggaaggaaggggaagttttgggaaagcaaagcgtatgcatgcagtgggaccatgtgtttgtgaccctgttcagcagtgtaaggaagggctgtgtagcccatgagatgcttcaaagaattaatttggaagattgatatataaaaagacatgtctaatgtgttcataggtagatggtatcaccttctggcagaagttaagtctttgaaggaacattttgttctgctgaaaaaagaagaaatatttagttctgtaggcacctcatttgccttgttctatatcttgtgtaaacagccacatgtgaaatgcttaaagaaattaaaaaaaaaaaaaagacccataaaagcgaacccggtacagaataccctagggagaaagcagctttgagaaataaatactcatttttagaaatgaaacacctgttagaattagaaacacagtacaacatgaggacatacagacacacacacacagacacacacacacacacacacacacacacacacacacacacacgaaatatacccaaggaagggcttagaaagaagaaagattttgtggctggacagattaaacataattgaagagtcaattggtgaaatggagaatttttcaagagcgtagcagtgcatagggacaggaaattaaaaactaaagagagagactgaaggtccggaggacagaacaagaaacgactgtacaatctcactgtgctcctaaagggagcacaacttaggaaagggaacattggttaactttctagaggttgcccgaactcccagattgcagaaacagaaaagtagtgtgatcggaagaaaaggaaacattagctacatagaaaggacagtggttcatgcctagaagcccaggatttagaaaattgaggtaggagaaacagaagttcaaggctagtggctaagtagtgagttcaagaccaatgtgggctcctagagaccttgtctcaaaaacaaagcaaaacaaaataaaagataaataagaagacaatctgccctttgaaactttaggcaaaactatggaaacccaaaggtttaaaggtctagaacccagctggactgggaggatgagttggggagaccgttaggagaagaatggaggatcacctgtatgtaagtaataacgtgacaactgcagccagctcagcagccacaaagagaagcctgggaatgaaggaataactcaataccttcagagcattgggggaaaattcaaaggtgagaacgaaatgcattttttaaacattaatccgagaaaaattatacttaatagaccggcattaaaggaaccgtaggaggaagaaacatgaaaattaaccagctaggcatctaatttgacacggaaaatgagcagtgttaactgcagaaaataaagaagagaacttgataaaagtatgagcccaaattagtggcattggaagcaacagcagcagcaaagatgttgctaataagttatagtttctgcagatattttgaaaacctgtaatatactgtgaagtgccgtatgacagatatctaggtgagataaattgtaagaagaaatgtaacttactaaacttgagtcaagaaggaaagtaggctgaatagtttcataagtgaaaggtagggtaagatattacttactagtggtgcaacgttttttgtttttattttttcgagacagggtttctctgtgtagctctggctgtcctggaactcactctgtagaccaggctggcctcgaactcagaaatctgcctgcctctgcccgacaagtgctaggattaaaggcgtgctccaccactgcccagcaggggtgcaacttttacagactaaatttaacaaattatataaaagacttttggatagccaaaagaataaacttactagaagacactgaagaacacctagcaaatggacagagaagccagacccacacagcaaggagtcagacatttacccccaagtgattgacagggtcagaactgttccaaggccaggttttccacagacaacctaagccactcaacaagaacacatagtgtgcctctgtaagatactgtgatagggataggtcagcgatgtgtagagatcgaccctgggcttgcaataaaacttgaatgtgatatgttgtaggtctacatagaaaagagggaggattctgttaaataataattctgagacaagatgaacagccataataataataataatcgtcatcaccatcaccaccaccaccaccaccaccaccatcatcatctccaaagcatacacactcttaacttctttccctaatgattaaaaggatttcggtaaaaggcaaaacatttaagacaggggttgagagttgttagctcagttggtaaaaggcttaccctacaaacaagagaatctgagttcacaccaaatgtcaggtggcacaggctcgcaattccagcttggggctggggtcgggggtagagctctaggttaggttcctggggcttgttagcacgacagtgaacctcagtcagaaaccctgtcttaacaaaaaaatgggcagctcccgaggaatggtacccacaagtcccctctggtctccatatggatactcgcaggaatgagcatcacacacatgcatgcggacatacacatacacacacagagagagagaaaaaacaagagagcttttagaaagagaaggtgtattactttggatcggagaagtttctctgaaataaagttgagtctgtttgtacaaaaaagaacattgtcgaagttaactgcattaaagtggaggacaagtgtttatcacaggacatcagcaatagaatctgcaaaactcaaacatatgtacatacacatgtacgtacatatgttcgtatatccacccatccagacatataaattttattattcttttgttttttattttcagcacatcccaacaccaagttccccatccaccctctccccaccctcctccctaccctcctccccactctcctccccagtacctgcagatgtgcttgtcttctgttctcttaggcaaataactgaattgactggcagtttgagtatatgaagcacgtcttcaactcagtagagagagtatataacatacgatgcacatggcattccagatgaaggaatctgagtggcttagaatcccatcaaaggccctgcagccctgtcggtcatcagtgaagtgcaggtcaggaaggttgtgagaggggatggccttttccttctgcgatcaaacctgagcagcccagcagtagcatgcctgcccagcttgtcctgtcacacttctgatgagagtgaaatgtgaccccttccacgttctaaagctcgggaacttcccgcctgcacactgtgctagaagatgcttacaagcacgatcaagccagcaatgcttaaaatcacagataaaaggaaacaacccaattatagaaacttaaacaggagaatagcaatgacgtatatcacacacctcgtcgggatagcatattgatgtggaaatgaacagcatatgtgagtctaagaagtgcaccattgagtggaaacgagcacgtaacaagtgagtatggtcagaatgatattaattttataaagcttaaaagcagtcaaaactaaatggtagcatttaggtacatctttcccaacaatactctttaacaaagcaaacaacacagtcaacagagttcatggtgatgtccagggatcagccaggaaggcatgcgtttcaggctgaggtctattacttagatatatgaaatctatggtggtcactgtatatgaacatgtaactgcagcatggagagccaggcgctccaggacccaggtttggttcctctgttctgtccaggttgaactctggctaagttatggaacttctccaagtttggcttcctcaggtagtaactgtactcaatagagtcttgattgctaaacaggattctaacagagtaagtatgcaaaaaaaaaaaaaattagtgtttgtgaatgctgtatgatcctgtgtatcttatgtagaataaagtagtcttctacacaagtggacatgcaaatagtgatgacagagtgaggtgctcacagtgtggatttaaaaacgcagaagcaacgtgtattaatatactactcagaaggattaaaatgtttggtgggaatttccagtccttgaaagaccaaaggagagccttctggagagaggagccatgcttttggctcccaaatcttttaacttttggaacattagcagaatcctccttcgcttctggaatactgtgagagaacgttctagaggaaagtggttttggaaaagtgaggtcaagatatcgtttcagttggattcttaacttagcagtctttgcatttaactgaagcagttacgagattccaggcagcgtgttagaaagggtttgtgtccagtgggtgtttaaaagaacatgtcatctgcagtagataggattttgctggagttgatgagtcagttgtgacaaacatttaagatttggttgactgggaaatactctgacagcacacatttacagttcctaagtcagattcacccaccatagtcctgttggcacaaaagccagagtcgtagaaaagtgagtgactcagggaccctctactcaggcggtagggaagtgtgaacagtttgtggatctaggacatagtctctgtgaacagtgctaatagtagctattcttatttggtagaataacaaagaaataagattgggagtggcattttcagcagtgtgtgagaggtggggtgattttcataagagttattatcttatgaccaattcagtgtacctgcgaggcatggcaaaggccagctgtttcacagctagttttgtgtgttacaaagttcaacacaaatatataggtgtgaaatggcattttgggggcaggtttaacgcagtgtgtgtgtgtgtgtgtgtgtgtgtgtgtgtgtgtgtgtgtgcgcatgcacaagcaccacagtttgtatgtggaggccatgaaatggtagatttaaggtcacgtagtgagttggtgtgttcaaactttcttggtttgcatgttttggcttattctgcaatttaatgctttataaacctggcaagaaaaatggccttttccaggcactgactataattagccgtaatgtcttcaggactgatgtcgtcctccttcaagtaggcacatggtaagtgacattagtcatctttccaggaagccctagattccccaaaccttttaagtcattttcctgtagcaaaccttgatgtgaagggctttcagatgcaagagtggaggcttttcatgagtgccagacactctgctgtgccgttttcatatggggattcgaatcagaataaagcaaaatttagagaatttgagaataaaagttgaggataaaaattatagtcatcctctgtcttacagcttaataactacaaaattaactagtgttaaaagcattaacttgtggaattagtggaattaactagtggaaaagcacaacatattttgtaagcattatatttatatatatataaatttatatttatatttatagtttatatttatatatatataaatgtaaaacaacaaataatgaacatttttttcaatgtaaagtgaggtgttagggggttagtattctcaggtagctgatttgttatagaaagatcagattccgtgagctttagctttcaccacatgtgtgactctgggttgtatgctaagctttggcgaagtgtaacataaccttggatatgttctctattctttgcattggatcggtaagacgtgtgtgtgtgtgtgtgtgtgtgtgtgtgtgtgcacatgcgtgtgtgtgtgtgtgtgtgtgtgtgtgtgtgtgtgcatgtgttactgttctcacagcaggcatagccggctctacagagtaggatgcctcacgtgatgcctcctttgctcttttgagggaaacagtatttttactttgaatttcagtgtaagaaaggttctgggatgaatatggcccttcaacaggacacaaccagtttcatttttttttctcatgaagatccatgtcctttagttattaacccttaaacctcctgattaaatgaatgccatccttcacacaattggtattagaatactgagattctctaagcaatagcaaatgcttatttaaaaatttcgctttaagtagccaaggtttcttgctgtacactgtcagcctgaatttgcttttgaagtttgcttgtaagttcagacttcgctttggcagcctatttatgccaattagataacatgttcacaggggaattttctgaagtaggcccactggaaaacaaggcggtgcgctttcagactgtctgagctgttaactttttttttttttgtcttgactttttgtttccttcacagtccaaggctggttttccattggctgaattgttctcctattgtgtcccacaggcagttctggccttatactgctgctagtgaatgttaggttgtaggactctggcggagctctgatcttcattagaatattagaatgtgtgcactcaactgagctctctcttacttttacacagatgaaattttaggccagtgccggaggatttaatgcagcaagttcaacccagtgacctgacaggtggcctgctggaaactgatcttcagatgttagtttgatcaaacttatacagtaaagcataaaatatattaatatattaaaaggtcatacctaatgcagtttctgccttgttcccctcccccctaccgacacacacacactcacactgaattattttccacactctttatacaacttgttattgttattgctgtgtaataacttattgtagtttttgcagtccatcatctgttgcttcatagttttctgtgaagttttctatgagtttttacagtcacagacagtgcttccggtagtcatttttacacatgagcctttttgtacatgctaagttttcctgccaggcacatattgaggtcggagacatatggtaaagggcatccccagcagtcatggaagcaggtgtggcctaagtgcctgtcacagaaatgcattgtatgggaagtgccgctcctggcattcctcagggaggatgctaaactggagccctaagcagtggccctgagaagtagaatagaaaaaggtttccactactctatcctgttctggagagattgcttcctttaatctggttctgcgccttcccaaaaccatccatccctcagcatgggcacgaaaacacacgcagtgcgtgtgtaactccttctatgcttagagccccacagttcttgccacgctcctgaattacgatgtcatagatctgacacactcttaccctcagtcttttcttaaaaaatttcttggttattttatttttttacatttcaaatgttatccccctttccaaaccactctatcccacctcctccaccctcctccattggggaccctgtgctcagtcttatgtttggctgcaagcatttgcatctgtatttgtcaggctctggcagagcctctcaggagacagctataccaggctcctgtcagcaagcacttatgggaatccacaatagtgactgggtttggtggctgcttatgggatggatggactgatccgctctttgtccctgcatttcctttagacaggggcaattctcagttaaaattttgagaagggcaggtgaccccatccttcaactgggggctgtgcctaactgctgggtatgctgatacccaatcttacaccatgatgtcataggctacccacgctgaccccagtttcacaccaactgcagccatcatatcttttatcatgtctttcctcattttcagattccccccaatgagtccaggactatgtgggcactgaatttattgttttgttaaaaaaaaattagtgcgtgcctattatgagaaaattgataaagcacctgattgcgtagacttggcccaagagtactagcactgagggctaactacttactagcattgtcctaggcctgtcttatggtgaatgtgtgtttagaaatccagatggatgcatacaatttaacacataccatcatgctattctgagtgttaggaacttttattttcctttaataaaagacttaagcttgttccatgccagtcagcatgcttctatacagaccttaatgtttctgtaatagttgcttgtgtgtttatgtcacaggtgtttgtttgtttgtttgtttgtttgtatgttttgttttgttttgtttaaccaatttgatctgattgacatttgtgggttatggttttctatctggatgagtaaatcctttctcgttgtcatcgcaccctttagtatggtagagtcgtactaagtcatgctatgaaattacagctgttatgaccctgagtagcatcaggtgtcctaggaggagtgacctctgcatgcatccatgagggtgcagagagaggggccacctcttcctttatcctgctggacccatctttccctttccgcaggttattttggagcatgagtccaatttagaatgtcttaaaagcattttccctcttgccaaggtacagagagggcaatgctttctgattcttagataatactttgcctagggatgtgcatggccagtgaagggcctgcagctgcaggctattttgatgctttcttggcaacgctttggtgtgtttttttctttactacttcatattatttcagaaaggactgggaatagattagaaagatataagccatcactgcattgagtttacttgatgatcaaagggaaagggggcacaagaataggaaagtgagcagaaagccgggactgggcactgtccatacagtgcagcgcacaggaaaagtgcagtcgccaccgttggcaggacaaaactgttaacatggatggtttgtctggttaaaccaccgtgttgggtgatggcgttgctcaaggtggtgcgtctcaagcttggccctgagctcccttgatggggatgaggttacatctttgttttgttcagaaccccagcctcctacttggaagaagcccagctatttttgatgttgaggccaaagagaaaattgatttagggaagagagttttaagcagtctaaatttatgatggaagacagtcgcagctggcaggattggaaagggctggcctccgtagtattttaggatccagtgaggcctagtagttgggtcatgtgttagagtgttttctggagggtacagattcttctggtggctttgtcactttgccagttcaaaggtggcttatgaagagcaagggcttgcgatcagggtatccttgatcaaatacaaaggacagtgcaagggagagaaagaaaaaccgaactcagaaagaaatactgtcctataatcactaaaaaaaaaaaaaaccacagacagtagtcagtgtgcagagatgtgtgggggaattggagtaacccccatataatgagtgctaattgggaaataaaagggtgtggctgtttttgaaaaaaacatttcttcagtagattagcacatggccctgacatcccattgctagacacacactgatgagaaataagaagtatgaccagctatgctatgaatgctcataaccacattatttgttatagaccaaaggtccactgtcatcagctagtgactggagagaggtccatactctgtacgattcctggttttgtgcaccatctggagtgaacaaatccatagaggcaggaagctgatgagtggttgccttgtaggaggcccagggggtaatgggaaatgtctgctgatgggcacacaactttcctttggcagtaactccaaatgttctaaacttgatggtgatgatggctggacactcaggtgaatgtacaaatgacagtcgttggcttgcacatgtaaaattgtgacactgatgaaacaatagacagaatacttagagctgtatgataaaatgtctattaaataaatgttgtaaatacaaagaaacacattcgggagctgacctctgactttatgactctctttacctaagttagaaaccagcttcttgcaggagagcctgggcagggctggcctggccctggctatcctttctaacacagcccttgctgatctcactctgtctagttttgaccggccttgaactatactttgacattctttctgaagcttttaagttttagagacaacataaaccttgagagagcaatatttccaattagctttcttaaactgtttgaaaaattgattggtggtggccttgtctctgcttttagggaactggtgagcctgtccaagcatcaccaggcggcttgctcttgctcttctctccctgtcctttatcctcaaacctttctacttctctgctggagaagacaatgaacgtactgcgttgtgggttctctctctctctcacttgttctcgctctctctcactctctcttgctctcttgctctcgtgtttacaatggcaagtcttgtatagcttttgaaattatatgggtataaggtcaaatttggatttcctgtgatagatttttagtatgtttcattagtgttttaaaaatgttttctttggccaactcattgtcacctaaaacataataaaggtcattattcagtgaagtgcaccgattttatgtagtttatgttagcttgttgtagttttgtgtaagcaaccgattgtgaggctgacgatgtaattcagtgaaggcttgtctagtatttgcgggttcagtctgcagactcataaaaagaggggaaggaagggggatagtagaaggtagatagggagacagaagttatcaacaggcacaaacccacgttgttaatttaaattaaataaaatttagtgcctgataaggcattaaaattgagtcatcctgttatattagcaaaaagtataatgagctggaagctttctgaaaattaggtttcagtgctaactaggcttataaggatgctcttcatttgaggatgccttccagcactgcaccgtgtctaccagcactgcaccgtgtccagtgtgtgcacagaaatcacctccaagtaataagccttccaaaagcgaatgagccggttggctctccaggttgacgaagctccttgtggctcggtgactccactcggtggacgatcatgcatgctctggcatgtttccctatgttctactgaccactgctgtggcgtcactctcccccacactcagccaactcagtgacagccgttttgttgctctctcatgcctctgtgtgtacaacccagccccgccaggctcatcttgaggctgacccactcaaacaacggagagttccttcttgaaaatagcacaacaatcatgttttaaataacaggaaaggggagaaaagggaaggaataggtagggaaaagcctgcaccatttggtttgtatggtggcagcagtgagcagatgcaggctaagaatgagagtggtcccttcatagcccttcctttctttgcagcactcacttactctgattactgatttgcacagtaaaatataaaatgtcacatatgtttgggagcctataaaatgtagcattctaatttaatatatttgataaaaatattataatagggtaaattggttcattttcttaatattgttttacacggtagattcagatgcatgggttataattaacaaaaatgtgaaatagacgattatctagtaggatccatcttgcaaatcataaatcagtaaagctcacttgcacagttcatacaagcactaaaaacattctataacatgaagattacacagtcccaaataaatactaaattctattcttccctttaggtccttcatagacggactcagttaactattttcaaaaaagaattctgtgctgtactggtattaatccaaacatttcattcattcattcattcattcatcctaccactatggagtcagttacccaactcttgttcaaccacctggagtctgccagctagttccccgtgctgggggttcagggctgcagacttcagtcttcagaacctctgagaagattgtgcaataaaaagatgtggagactcacaggactagcgaaaagttaaaccgtctgcaggagcagcgaggaaagccgtgggcattctcagaggccccagctgggtaatggtatggataggaattgagttgctgaaaaaacagtcagttgtccaggatgcagagaacttgggcagcttctcaggagcagctctgggtgtctttgcattgcctgaagaggtttacggttgatcaaggtgtggtgcttggtggctcttgtcaatattgcctctgactagtgataggaaagctagattagtagggcaaggacccatagtagcatgagttcagaaaggatcataagacaataaaccaatagcttgttctgttctcttccctatagacttttgggtacagttatatcagttacaaggctccctgcccccatatgctcattgattcagctatttgtaagagtataattcagaatgtgaatatgagaataatatcccatggaagtttgtcttcaattaagacctgtgtcatcaatactttaaatctcattatgacattatcacctaaatgccacattttctatctgtgtatagagatggcagagaaaatctggcctgatgttattgtcatccattcattagcaatatccataatgaccttgactctccaaattcatcatattatgctgcatatctctaagaaagtaggcaagtctgcagcgcagtgattcgttccctaagaggttttgaagatcaggactcagatttttgttgtgtccagagtagaattcgctataaattttcatttttagagtacatgtggagtttgagaactgaactaaatatttcagacatttcatctcatttacctttaaaaagcagctgatgcagtaagcagtatcctttgagatgagtggcctcaacagtgactccagcagtgacaactgggagcagttggagtcctggttcaggaaacttctggaaagttctcctaaggccatcgaaaacacagatacttacaaacgattcataacactaacaaaattagcaacaaaaaataattttatggttgggagaggggtgacacaacataagaaaccatgttaaagggttgcagcattagtaagatttagaatcactgccttaatacatgcaacgtgtaaaaaaaatctgtacatgatatgaaataaaaaaagtatgaacccgaacacttggctcttatgtagataatatgattagtacctaaaaatgcaaaagctaagtattaaagcgtctgcctcagctatttttcttagactaattagcccctgtgatttaagaactttagtcctctatcccaagatgatcttcatattttattgtgaatgtgattaatccacaatcttttccttggtagttgtttctgtagccaataagttcatagacaattagatgacctctgaagtgttcccagtgtagacttgaacctgcctgcagaggaggatggcactccaaagattagcagagggcagcgtgacaacattctgatcaaatgttgcctgatgtgttaggtagtcagaagggggggggggctgcacagtgcagttcatgcaggcttccttaagactgtggtgcttccgttgttcagtgtgaggtagatggaagccttccttctacagaagacatgcacatgtgtctcgggtgcttagacctgggagctcacgcacagttcatgccagtgtgtgttagaagcagagggaagagagacagctacagggtggcggggaggggtatgaggggggacggggggatctgagcagtgtccacaccacacaagaggggtgtacaacttaggatcttttggcttgcttcctgcaaactcagggcactgcggtgggaatttaaacaagttcctcactgagactactgtacaccagacagcaggtgggtaggccatgcccaggctcccagttcaagagtagacattgggttttctgaatgatctgggtccctttcttgcttttcctctctacctgcagattacctgtgaggcttgtcttggggtcaggcagaccaaatataagatactggtttgcacacattcttagttccactattgattggcaggtaccataaacaaattagatcccttgggataacggtggacccactgggaagactggattcactttgggtcttccttttgccatacacaactaccgatcccaggactagggttttcctccctctgtgcttcatttttctaaaccccatgagaatatacaactctaatttattggattcttttaaaaccaggagttggtcatatactgtctttgttgggaaaaatatgtgaattagaatatatggcttgctagaaccttttacaaggaaatttatattatttatttcgctgctgtagcagcctctctatagtaagaaataaattaagataagtataatttataatgcccttccaatattgaattgaagtgcagttgaatgttaccccagaaatagaagttctgtctgggggatttttacagtggggcctgcatcctaccttttgttaatgaccgagaattaatttccctgatgctgtaagaggcagggatctggtccttgtggaagcaatctgttgtgttagcaatcggaaaacaatgaagaccattttgtgaagaacacagcatccaatacagatcttgcttgaatggggatagtatcttacttcttaggagagaccttaagatctgttatagattaaagatacggactatttgcccatgttgatatacactagtttaaataaataaactgaagaaaaaaatcattttgactcggtgaggatgattctaacatagactgatacggtattttgcaagagaatcagtgataggtttctgggtaggaaaatgatagtgtggtgcacttagccatctctgttagagatgcgtgctaacatattcacaggtaagatgctgcagtgccttagatttgttcaccaacagatggatgcatagagaaaactatgattatatacacataatggagttttatttagcagcaaagaagagctaaattatataattttggggaaaataagtggaaatagagatagtgatgttaagagaaataagccagattcagagagacaaaacaccacatttccctcaagtgaaacctatattctacacatgcatgccatgaaagtgaagggaatgaataaggtgggatgggaaggggtgggtgagtaagaagatgcaagacataccattatgaaaccaacatcttggacaaggaacacaccctggtaaaacaatagtgtgtcagaaggagctttatagataagtcagattgtcagtatatgaataaagtaatgtggtttgttatgatagtttcaccttctctgtgtttgtgaatgttctatttgaagccagaagtttacgtttaagccaaagtgaatgttgtcccataaagaagaaaaagcaggtgacacttagaggaggcctgccactcttcctgcctgtggggcgtagtgttttgctcctatgacccagtagttaagggaggtgcttccctaactaagctgaatgtcctgtgtttaggggagggtaacactgtgccatccagggacatgggaccttctaagaggcttaagcctcaagtggaaatagagatcccgagattcctcatctcctggcagttttctaacttaagaggatgaatgtggggtctgagcttaggtagaatggccaggggctaggagagagcagagttcaaatatcaggcatgcttctgcaggttgacctcatggtggagtcactgacttttcttaccagctcagacttgtgctggaaacacacccctactgttttgaagccaaggtatccatcattgctgggcgtaagcctgagtgggtgaatgctccctgactaccctcacacctgacacctctgcccttcaaagacaacaggcagcgtaaaggagttggctactaaggaaaatgagctcactgaagcaatgtggacttgtttgcttctctgaattagccccagcaggacaggatgttactgtgtcagctcagaggcagatgggcccatctgtttccaccttcagctctgctgttactcatatttagagctatgcccttcctcacaggatcttcagatgctcagaaaatggcctgcagttatcttgacatcaattggtactttgcgcaagcaggtagaataaattaggcttcccaaccgccctgttctgtagtctctgttagtcatttcctcacagtgaaatgatctgtcatggcaatggactatagttctacaaggacgtgattgcgggccttcgagtctcagtgtgatgttaagtaggtccagggctgtctcgtgtcttgcattttagtttaggattattatttgattttatttattcattggtgacactgtccagtgcctgtgatacaagtgttgtgtgtagtagtgctggtcgctcacagagctaggttctctgtccctgcagcatctgttgatgatgttaggtctgtggatcatggactcttgaagagccatgggttctgggaactaatagggtctttttaattgcttgcaccctaatgttccttcgaggagtctgtgatggtttgttgctgggcttggactttcctctctggggaaaaatgtggggaaacctggagggaagtttgattataaaacaaagtttgttttgagcaaatttttctatgggcaccagataaatgagattcacccggcaaatatgtatttagctgccactagatgcaaatgattatagtcctcagagcctgttccttcttggatccaaagtttcttagaagccagaatattttccctgtatcttcataattttgtagcaagtgccagcttaaacaaaaaccaaaccaaactcagaagccatcattctatagaataatgttctataataatgcacagagaatcgggtctctgacagtgagaacttataaggcagacattagcaaatatgaacttgtgtcacgaattgcatttctttattattttataaattttattataaaaacttgcagttaagtaaaaacatcaaaaagatcatctctctgattttcttattaccaaataaattacagttattatgtggtaaagtgttttgttaatggtttcacttgctggagaaagccatttgcagtgcccgtgagtctctactgtggaagccactgttagaaatgttggaaatcctgactttcgcagcaacagagatgccagtggaaataagctgatgttcttgtttgttttttcaagatttatttattttatgtttatgagtacactgaagctgtcttcagacacaccagaagagggcatcagatcccattgcagatggttgtgagccaccacgtggttgctgggaattgaactcagaacctttgggaagagcagtgagtgctcctaaccactgagttgtctttctagcccggtgttcatattttgactccactgtcatgtcaggttttagaagccccattcgtttcatttttaatgcgtgaaaagggtggggtacccaagtccacatcatgcttcagtccctgggaaagtcaggcttttccgttcctgttcactactacttataaactggtaactttttcaaaagtcttttaaagacactttataaaggctttataattttaatttttaaacctttttttttttttttttgactggagtacaaacgcctgacaagtaaagatggtcaagtgagggcttcttctccacacttaatgtccctctagcggagcattcctgggctgttcctgcatggctcagcagtcatctgattgatgaccagagagggactagagaactgagaagtgctccctattccccacatcttctggggatccttgcatcactatagatctgcctgtgtgtgagagaaatgtgctggccggcgtgtgagcaccagataagtcttgtctaaattgtgtcacagtgacaggatactcacggctgaagccacagccctggacattacctttgaagtgcagagctgatgctttggagctgagatgatgttcaggcttacttccaagttagtatagaactaaggagggagagagaaatgctacttcctggagctccctgaaacccaaaacagatagaagcagaagaacccctgtcaacgcagcagaaattcccacatcctgtaaattaaatgcttccagaagcacgcagacttacctagacgtttatgcatgtgccactatggtagtcctttgcatgttgatgaggtttttccactgatggtatcttgatggtctgcatgactcctctaattggctacacactgtcctctgctgtggatgtctgttgattttacagtcagagaataagcatgcttccacctgagccccctaagcatgaccctgatgagcagtgcaggcaccatgtgcttctaagcggcaccggcgtccactgcttgccaccttcccgtttcacatgcagtggccatgccgtgtggacctcggtgagggctttgaggcttggttcagggcttcctggtagacatttactgcctgtgtgctttttcttctttctgtcatctaacctggaatctgagacgactagaaccgaagctgctttagtagtgcttagtaatttttacgaagaaacactttggaattcttgtacacgaattactataacacaaattaattattttggaacctgggatatacattgattagtagaatgcttgtgtatcatcaggcacaagataaggggttcagtccctagtagcaacacatacattagacaaggcagctcacgctgaagatataggcagtaggatcaggggttcaaggtcatcttttgctacctggaaagttcgaagctagtctgagcttcatgagaccttgtctcgaataaaaggtttgtgtgtgtgtgtgtgtgtatgtatgtatatgtgtcaggtatatatatatatatatacatatatatatatatgggtcaggttgtttgactgaaatataagatcgggaccgttttctatctaatgtgtttctgggtttggattagtttcaagtccagcaaattaataccttaggatatgaaagtgtcagctcaggacagtccaagaccaggctgtcagcacagaggagattcatttgccttagaaggacaaagggcagggaataagagacaggaggtagaggatggaggagaagggaatgagggagaggggaggggtgtttgtgctgctgggtagagaggagatcggcatggcccttaggaaaatggcagtttataaaggtgaagggtatcaccctgcgttaggattaatcagataccttaactaggtgagccaaagggagctttggattgctggacttcaatgctttgatagttggaccttggtggtcaccacaggaggaggaagtggccaaataagagaacagacctcggtgtggtgtctcgttttaggaatataatcctaactccccccccccccccccgccgccttttttttttttttttttagcaagacagagggaattggggaaaagagcaaggcttgcccagtgtcatgttcactaggccctgcatggctacagtcctttcaggatatctctccagactgtatccctgtcattaatcaaagcttattctcggtgaaaggtttaccaaggtagcagtgttgactgtcttctttgaacataggtttatttgaaccaatgactcagcccctaatcttggtaggtgtcttctcatagcatgaacctgtcacctaagctatcgtggttcatgtactttagtcacttctcattttactctttcctctgttccatttccttaaggattccacttggggatgctaaccgtttctgttagcaaaaagccagaggatgccagcactggtatcgctcttttgctgggtacctgccttttgtaaatcccagtaacgtggttgtaaggtgtagtaaatggttcagtcaggcagcagccagagaaacagaaccagtaggagacccagaaagagaattactacacacacagagtgggcgcattcaactgtggaactgctgagggtaggctggcgtccacagagccgcctatcacaaggggcaagctgggctcctgaagcaggatagaagctgtgcccggggcagtttcttcagaggagtcctggcccagcttggaaggcttttttactgattggatcaggccagccagtttatcaggggtaacttcccttgatttgattgtgggttttaatcacatagactcagcaccttccatggcctcacctagattaccttttgattgactgtggactgcggtatacccaggttgacacaagacagtgggaactgccctctggaagctacagtaagcctgcaggctcacctttctcagtccccagctctccttgtggaattgagttccctttaaacttgctgcagaatccaggcagcttcttctctgtgccagagccaaacattattctctccttttcccttggctttatgagaagggtgtcttcccgatttgagttatttgtctccccacggccgagcgttcccattgttcttcattagctgaagttacatatcagcttggcacgcattccagcagaagcctcggttcgcaaagacaatggttgcaaaattggatgctgcttcctttcgtggctggtagcggctgtcattgttctgtgtcaccctcacttggaggaatgccatatagggaaattgatgggattaacacagaataagaagtctaattgcctctctgttctgagctgcctctttgaaagacttccctacattctctttgaaggcgctaccctttcatgttggcttttcaaagttacaaaattcttttgtctctacacgaacagcagcatttatttatttttttaattttcacagtagaacacgctacaggtttatgaggaagttctgctaggtgtccttcagtgtttggaagcacccattattaacttaccaacatcttcccaggcttttctaatcgccggctctgctgcgatttatgctgtagagatagggatgctaggttttctcagggcagtgcgagctggagtttaaaaggtgttaataggaatcagtgaggataagggccaaaatttagcagaagtggcttatctcagcctaatagcaataagctattttttttccttcttgatgttttaatgtgcaataacatggtcagatggaaataatttgtaagtgtgaattaaaatgggatttattttagacccagcgcatctacagttgcaagaagctacttgagaagtaaagtacggtcaggtctgtggtcgggcatagtgggacttaacaaatgcaacttgctcatcttcaaagagtcacagtgttcagaaggggaaagggaattgaatgaattccttatcagcccttaccttgattattccttttgtgtgccacatgaccataagtagagtggcttcagacagcagcagttctttttggagatctcctgtttcccaagggtcaggagttagggaaatcctcggcctgttgctgtctggcctcgtagagctgtggttgcatgggcttcctgaagctgtttggtagcccagaacctgcagaacacacacaggatgcttgtgtggttcctgagcaccttggccacaagtgtttacgtgactacagtgaagttccatgaatgaacgtatagggtatatagccacatcgttgttttttcctgacctaggcttagcagcggcgctttctcgagtctgcttcgttctgtcagccccgagagatgcactagcttacaaaaatcagtcagattcaggcaaaggtgctggactccagttaggttacccaggctgcccttgaactcataacccacagaggccttcaggtatctgtctccctgacatagcctcctgagtatctgagaacatggacagacaagtcaggtcaaagtacgtgtcatgcaagtttgagttagcagaggcaagaaagaatgtaatttttatacaccccggctatggtgtgtctaaagggatagagtggagagtgagtcctgaaagtgtattgtcaggacagaatctcaagagatttgaatgttaaatgcctggagtcatcccatggggtcagagtgagaaagtaagtgtgtactgctcgacaaatatggaggcttggagataagctctcattgtgcttattgggaaaggcagcaccggtgctgagggggacggtggtggcagtgcattgtgggaggggaagaggtaaaagctgcaaaatgaggtgcttgatagacttggctgtgaggaagaattaattctattaataatatcgcctttcaggtcttgggtgtttatcatgaggcaggagtcctgctgacagctttagctgatcatgccctttggctgctgtgatggacgtggttgacgtgaggcaaaatctagaggtgttaaatcagataacattggagaattgttggaatgaagatgctcatagagaactctgaaatttagttttcaggccttggtaaggtgcttatatccagccatggacttggaaatcaaaactcagacgtgttgtgctccgaagtcatccttcaggatggaaagggcggctgaggaggaggcctgtggactcacaatgacaccattttgtgacagtgcatagtggggagaagcagctatgtttatggctaagacagaacagagagcagacacaggcagaggcggataaatgatggagggcaaacagaatgaacacagaattgagagcttgaggtaaaagaatgggtgtagccatgcctgcatgatggctgggagttagatgtaaaggctgacccaggcgcctttctcagtgctgtgctagactggaccagccacccagaggaggggagtgtgaagcgtgaggcagtgcaagcaaggagagtcagccaatcgagagacctccaggctgtgtgtggtggcaggcaggagaagacagagctggaggggccctggaggccaggcagcatattcaggacagagatgcatgctgggagagctgatgccaaggtttcagccccagagacagtgaaatgcttactgccgaaaccctaccacatctcattttgtttgttaatttctgataacttagaaggctttttgtttgcttggcattgcctcaagtatgttaaaaacagcaattaattagaaacaactttaatgcttcttgttagtagaaagactagaaatagaaatatgcttgtgctgctttctgctgttcaggggagcttgaggaggggggcggctgaggtggctcgtccccccacgatcgggagcagggcagggcaggcacatggtaggtctgcaggggaagagaagctgagttcgggcttctcaataatggtgaaaattcttccaaggaggttccgagacccagtgtctagagggttgtgtggcagcggcaggtgttgatggtggtcggtcagtggctgggtgtgcctgctggaccacgttcttcttttgctcagcagtacatccatttctgtggtcagaggctatgtataacaagtctctctgttggctcccttagaggttccttgtctgtcctggtctgaaatcaggggctgtgtagaaagtcatacttaaaagatgctgccagggctacacagagaaaccctgtcttgaaaaaccaaaaaagaaagaaagaaagaaagaaagaaagaaagaaagaaagaaagaaagaaagaaagaaagaaagaaagaaagaagaaaggaagagagaaagagagaaagagagaaagagagaaagagaaaaaaaaagatgccacaggaacctttaggacatgctggccacttgtcccaccatgctgccttcttttgcctgctgctgtgtcaaatatttgtgctggacacctgcccagtggccactgttcctcttgtctgttttctgtcccggcccccgccctagtgggaaattggagctatggttcctttctgtaatgaattatagtcatcaaaagagatgaaaataaaggcttccctcccccaaatctttccacactcctaagtcagaaggccacttgtaaaatatttggaatttaggtgctttgactctgtgagttaacagttgtggctttgctctcataaacaccctccaaggatgtaactttgtgcaattgatttttttttcctctttactcgttgtcactgtcacataaacacaacatgaaacccggcttttagtttttgctgcagttttatccttaggagtgagctgaggaccactgcacaaacttgggtttttattcttgatactgttaaatctatattttccttgataagttttggcatgttcttggttctgattaagttactgtatatacttactagtttgttcaaccagcagctggttaaaggcccatcccatcccatctctccatagccagggctataatcctagacattgtgttttatcgttttctctttcagcaaataaaaactaagagagaagcagccagggttctgcagtaaagcagacacagaggggagaggtatcgtgttgcttatagattggaaactgacagatcacaggaaggcagtgcttggagggaacaaggcatggtctgtgtcccagggcacaagtctgagctgtttacaggaggaaggaggtgcattttgtgtcatttaatagagaatattaaatttatcaatgatccttggtttctgcaacttttcataaagatggagttttattttggtttttggtctacgattttatttgctttctcacttcttagctgcaaggctttcagctttgtaattgttacagctctaaatccctttcctttaaatgtagtcattaacaaatacccctcatcatgagtagtgttgccaaagaaattaattgtatatgtcagtagagaattatttcttcttcccttacccgtttcttgatagtttggaaatgagcaatctgttctaaaaatccttaagtgcatttcagcatctatttctgtagtactttgccagcatctataagaaccattaaaatggctaacattataatagggtttttgctgcaattcaaaatccaagtgggagaaaacaactatgctaagcacagagggacgcactgagtatctcaaaggtgacgttttggtttttggagtgctaaaaatgactgcatccttcaaaagttaaattatgaggaactttttcgttcttttgaatttttttttctgttggagctcaaatatttatgaacaggcagtcagagttactttcaaagatgatgcatgataatgcagcccacctctgagcatgcgctgagcatgagctgttcgtgccctcctgttaataggacatagacactacttgactcgtaagctgtcagtgtttctcttttgtttaatgacatgcctgtggtatggctcagtggtttctattgcagaaaaatagtcttcatcacatcacagacatccgtgcatgtgtgtgtgcgtgcgcgtgcgcgtgcgtgtgcatgtgcgtgtgtgtgtgtgtgtgtgtaggttagaagacaattaatgggtgacatttcttacataatgcccacctttcctttttaaacacaggctcctctactggcctggaactaccaagattaggttaggctggctccccacctaatctcagggatctacctgccttcctctcctcagaactgaagttgtgcacaccgtcatgcagagctctgttcacatggcttctggggattgaacctaggtctttgtgactgcaagacaggaacgcttcccatcccagatctccccccgaacccatggacttcccataccatagactttcaaagtcttcacagcacattctctagacagcttctttctgatttcagtgacgtgcgaggggagttggggggagcagggggtcgtggtgagtgggatgagagtctgaggctttgtttgttcctttgatccccccacccccacagctgcttttccttgggtcgctttctgggtcttcatctcctcctttgtgaaatgaaggggttgagcacaaggtctctactacggcgcccttccacttgaagctcctgggaatcagtgacccgcctgctgtctgttcacatggtgctcagctgttgcgcggctttgccaaatcacgtctcacattactgtagacagcagcctattctccattgccctctcctcgtaaaagcttttccttaccggccacagcacacttgaaagcatgccctgtggttgatatgacacactgacaccctgtgtccccaaatgcaataacgcaggaagcctgatgtccaagttgagggtgaagatgctgtgtttgtcatctcacaagtggcaaatgtgcttagacgtgtgttagggctagtctaatgctgtctcgttttgctcaagtaggttgtacagaatcctggggatgcaagcttaatgtcaggctctgaaaaggagcaaggtagccgtgggagcggatttgctctgtggacataaggttttagactgcccatactctgactcagttcatcaggtgctcatatttctctgcctctgcacagtccacatgcagtcagccacttgggcgcatttccataccaattttgaaatttggctcatgactttgtatgataattaagtttatagcttaagtaaaagtgaaaaatgcagtctttttttttttaatggttcacatgcttggtattctttaaaaacttttttttgttgttgttgttctatatgtgatactaatgtgtttcaagaaagtatttttggaaggatttgagggtggaagtctaaggcgtattatcttttggtatgttagcttccagttatccgtgggttgagaccctcttgagttacctttcagaggcttgtgtgtgctggataacctgagtagcagtaccagtgagtgctctgtccatccgacccttgaaagtgtggcttattttggtgcaggtaaggcgagttcctgggtcgagcggtcaccttcataagactgaagacggcgactgggagtggagcgatgacgagatggatgagaagagcgaggaggggaaggcagccgcctcccaagagaaggtaaccaccctcggccaccactggctgtcttgtatcgtggctctgtggaattccatggattttaatggacatatccttgttttgcagtcacgaagagtaaaagaagagaactcagaggtgaggagctgtgattgtgtatgtatgtatgtatgtatgcatgcatgcatgtatgcatgtatgtgtgtatctgcatatttatttattcgctctctagtcccccattgtggcggcagcttttgatccatttgggagatggttctcaaaatctgatggagcaggagagtgatggagcaggagagaaagggaaagcacatagattttattggcttggattctgtcagagttaccttggcctaattagagtgtggcaaatgactccagtctgtgagcctctgcccttccctatgctgtggggtgatcgcagcgcttatgaggtagccacaaagactggtggaatcccattggacgcacacagaggaacccttggccctcacagggagataattatttctagcttgtagtgttacaccatttggaaaatactgaaagcatgcaggtaaaatttgccttatactttaatttattaaaaaagggagccggtagaatgtatgcgtcttgccctttccatgtgctgggtgaattagaattaagtgaaaaataccctgacgactggtcactctttgtctgagatcatttatttttttacttacttcctccatatgattaattatcctaatgcccgatgatgattacagcatgctaattctcatagaggaaatttgagaatatttaaatagctcccagtgtctcccagtcagtaattaatgcctaccttcccaaggcctcattacagaactgaaaaactgtggcctagaaacgatacctatcccaacgtcttccttttattttttaattagcagacatttcctttggattaagtgaagtccaccttaccttgagtttgaagtctcagggctggctgtgcttttagtagagcagttgcagagccacaggccacactgtgccccggcccctcagagcaccctgctctcttcatatccccgtggagagaggtccctgctgtgctttctcaggtccctgcctaccaatattggctctctttcggatcccaccttctccctgcttgttctttgaactcctctctttatttcataatttacaactttgctcagggacgttattctctatgggaagaccaccatggagcccctgcagtggggcatactggggaaacgttgtatcgggagtttagaacaatcgtacctagctaaaaaaacggactctaccctctctcacttatgttcccattgtgcctagagcagagcacagagttgagggctttccatttgcatctaaactgtctctgacgaaaggggtaaggtctgcatagatgcagagcaagtgaacaggcttccacacgctgttgttgactcaaaaagtgttgtggtccagccacctttggctagaaaatgagggtagtattttatttatacacatgtccccttcgcatacagaatatactgtttctgtttgctggtaacacaaatatcagggcactagaataaaagcataacagagaggtatgaataggctataatatttatatggtcagagaaggaaataaaagatcacaaggcgttaggtagttgatgtgaagttcagcaacagcagctctggtaccactgtgtagacagagcgagattaagtgttttgcaagtcctgtgcttgtgagaggctgtgtgccatccttagcaggctaatgtgcaagtgccggggttacagcacctgttagagactggtcaagaatttctgagtaggtttttgtctgtggggcacccaggaaaggtagtccttaggccaaatttgaaggttctaacttggagagaatttccattatggattttttaaggtttcagagttcagctggtttgcttgaaactcatagcccagcactttgaaaaattggcccagtttgaaaattatgatcttctgggaagcttacccaccagtaattaataatttgcagcaaatggataattgccctcctctgtttatcatcttgttctacttggagacagaagtccacagagaccaacgttcattaacaacaatactaatattagaactagagagaattaattgatcaaaaccagagctcatacctcatgtctgtgtggaacggtgttagacaccatggggatttatgcaccaagaggagaatggctgctttctggggagcctttcatctttggggaaggatttggaggaaggcctggctaaggacttgagtttttaggtagtgttgcctagctcataaattgtactaaaaatttctagttattgcccactgttgattttgtgtgtgtgtgtgtgtgtgtgtgttcttttttcaagacagggtgtctttgtgtagccctgatgccctggaactcactttgtagaccaggctatcctagaactcacagatattacttctgccccctgagtgctgagattaaaggcatggctttggctttgatttttcttttgggaagtagtttgggattttgttttgtcagattctgaagtaagtacctgttacatgactctggtcatttttgcttcactctcttaattttctccgtgacaaatgaaactgactttatttaaatctagttccctttggtttcctttaacagaggaaggcagtcagcaggctttcacttaaacagttcccttaaaaagccaagatgtgaaaagacttgctgccctgcctccaatcacagcaggcaaaaccttgattcttaggctcagccagtagagttgaatttcttttctagtttagggttaggtctaggcaactctgatttttgacttctgattagtggctagggtctagacagctgactaggaaaactgcagaagtcactctgaatccagatgtgcagaatgacacccctgaatgagtgaatgaataaatgaacaaataaataataaaagaaggaagctgacatttttcagaaatcacctgaaaaattgcccttgacttaagctaagcagatcctacgaggagactgttgaaggtctttgctctcctgtgtctaggataattacgaaagtctctgtttgctggctctcggatactattctcattagagaagtattacaatacggatttagactgaattaatttttaccaggtttaactaaagattaaacacatgtgaagattacatttatttctgttgcttgattttttttttttaaactgccactagcttttaataccatcctgatgaaaggtgtttctctattgcttagctgctccagccgtgtttgttttctatctctgtataaaggcagagagaaggtctgatctcttcctgaacatgttatgctgacctctgtctgtcacaggctgctcagcctgggttgcagctgctgcagtgtagtgcaggtcactgcccttcagagtccttgtgactgaagcgagatgtgtgatcagaaatctgtgattccaaacatcagctttctgctttagaataattttcagttcgtacaaatgctgcaaaggtagtggactcctcccccagtttctccctgtgtccaatttttacataatctgggcatatttatcaaaactcaaaaatggattctgctacattcttatcagctaagtttcggaattcttaatagattttactaatctgtccactaatgcccgtcttctgctcaagtaggatgcaaaccagcacaacacactgcgttttcttacagtgttattaaaaatagaaagagagcagacaaggccctgctctgaggacttggggagcagacagtgcctctttttccttgcgaagctctgaagcagttgcctctcttttccaggtctgaggtccctgtcagactgtcagagtctgtgtcagagttatagccatcattcatctgtagttttccttctttcttcctgtcaaaatgcatacccgctcaaggacttcttcttgtagcaaattgtttagacagaaagcaatttggtacaatttctgtactgtggaagggtagctgctactaatcctgtcagctttcttgtggggtttcagtttaatggagttatgcagctgtggcttaatttcatagagttatcccccagtggtgacagtcggaactgcacttgattgttagtgagtatactttgtatgggagagctttctcttaccttgagcacccgtgcatgtttggaggagtcatgtgccctgtgctagaagtagctgctgcatgacatgaagtgttatacatatgtgggaagttgcaaggtgtgtggtacttctgtccagtcacctgactggctctccatcctgatgctagctcaggagcagggggtcagggaaggagcgggcagattggggatcagcctgcatgattcttagaaggggtgttaggttgagggctttgtcctctgctactaagtggtcagaggtttgttgcgtttctaagagtcatttttcacgaacatgttatgcaaattttcaaaaataaagcagaattaaattctgttgcagtgacataccaatgactgtgtttccagtcactaatgttgcttttccatatatgtgtcctgtttatccatttgcccaccttaacttttccatgcatttccgagtaatccagaggcatgaatattacctaagtaaatagcgaataacaattaataacacttctcaccatcgcttcagttagaatgaagttctttttgagtgaactcagagagcaagaattttagactcttagactcgagaaagtgcttgctgcgaagatttctgctgatttttagtattggtaatgaattagaaataagatctctatccttcattttcattgctgtttctctttgagtgtggtgggatttgttgttgttgttgactctctcaagtttatgcctcagggtagtgatcacaaaagcagagcttgaggcggaaataccttaggaccagaccaaaaatcttgagtgaaaagtttcactcttgcggttctgttgtttttttccaccatgtttacttgcccaagcaacagtgaaaacttactcgaagtaatggtataaaaagcaggttttgctcactcttcatatcttttcattaaggcccccttaacaatagagggaatgatagtatgagactgagttattcttttaaagcatgcagagagtatttattgcatagatcctccctttcgccatgagattttgaatggcaggacaagcgggctctatggtttaaggatgaccagcagcaggtgggccgtactttatctagatgttgttgcctaaggtcttctagaagtgtcatctctgatgattaggatgcaatgtcccagtcactaacctctccctttgacttccttgcttgtcataacactgcttttcttaacagatctcggtgaatgctggtggcatccctgagcaaatacagtctctctctgtgcacgactctcaggttggttcctctgccagttatttttatttgaaatgctttgtagacagctccatagagaagacaacttcatcgggttttagaccgatagtcaacttcagggtagtgttcccaaaatcaggggcttaaaaaagcaacaatagaaaccatctctttaagcaggtatggagaaagagcatcactactctcggccatcctttagaagatgctcagcactaaataacagactttggagaagggatagattacccaggtgcctctggagtcactcgtactgtgggcattaagtaaagagaagaaaatgattaagtctgctatgctttagccatcaaacactggttaatagataatttcctcccttgtttccgattggatttctatagcctctcctgacgattcttttatcattgagttttatgtgccaattgatctctacaacttgtcttcgtaaaatagcagtccagtgcccgtgcagcgcatgtatgatgcatacttagaacgtgtatgacaggagcctgtgctgtggttgtgttgggtggtgaaggcatcgcgggaagggtgtggatacagagccccaggactggcccaagtgttttgctatataatcatccgctgcttgtatgtctttctgctttactgcttctgtattttgtggggctgctgtgaattgaggaggtgtttagacagagcggctccatgactacaggaaacctctctgaggtctggtagctactccttgtcttttaagctacagaaagacacgcagaggttaactggtttgtgcaaggccttgttgctagctacacagcagaagtgggatccactttcagtctttacactcttatcatccaactcagtcaaagactctgagttaaccatagggttagcttccccatggaagacaaattaggaggaagtatgggtccaaaagcaaaggaggcaaacagggaaagggggctgcatcgattaacattttatgttaatctcgtggctcacttttacttctcttactttcccagcaaccttttgagagaggtgggatacctatcttgtaaattgagcaacaggctctgagaatcgcctgtccatggctgtacagcaggttaccagcagagccaagctttacctgaaatcttttattttcctacttcaccaaggaggtctgatcaagcctggtattcacaggaatagtctgtgtcatagaggcatccgtgatggatgatctgtatcaggatgataggtgagctgtgtagggagaaagaacgttgattaatctgtcttcacccctgatgcttgtgttcaatgtacctaactcatcccatcccaccacctccccatcacatagagtctggggatagaacctagcgctgtatgcatgatgggcaagtagtctgccactgagccacatccctagctcttgcctttttgagacaagttcttggtatgcggcttaagctgtacttaaatttgcaattctgcttccgtagcctgaatgctggaagtacaagtatcacaaccatccctggcaaggttccttacctttctgcatctccaaggtccagtgcatgttggctctgctctctggaccaacaaagtgccactttagatgggtggccttaatctggacaagatgcagcagtatcgagcacagaatccaccccatgactgaggctgtctataggaagcattcacacccacagtatgatgttaattaagcatctttctgatcctctaaaaaaggtcttgggaaaccaaaaaagaccttctgggataagcactaatcttgaagtttccagaaagggctgtaggaatcaagagatattgagattgtatttatccttttcccaataaagcttacaatattgtttgttgttttcatttcaaaggcccaaccaaacgctaatgaagactacagagaaggtccttgtgcagtcaaccttgttttaagattaaggtaaataaaattattttgcatccttttttttctctacaatattctgacctcctcctttaacttttcataatattaggataagatgaaattgttaacttacttgattttcccaaacaacaatgtatgccacattcctggaactaattatactcctttcattgcttgcaaaacgattaataagagaaacaccatttgaaagcatctgtaggctctatatacacttcattacattttttttctctccttgctttttttaacaatgtaagatcacagtaagagatttttaatgagtctctttcacactccggcagtcagtttctgacagaaataaaccatgcttgtactacaagttgcctgttcggaacatttttcagtggcaggtttgatcagccactgtggagaaatgacagatatattttgaaagcactttcaatcttctaggaaatggatacaaatatggcgcctgacactccccagcctcctgaatgaaagctgtttctattttaagacctttttcaacttaaaggtctgtccttgcagatgttctttgttaaggatatagtacctcaagaggaaggaaaattgggtaaacttaattgcagccggcctactttgccaggtcagtcaggatgctatcacatttctgaaggtataaaagggagtcatgggttctcttgacgggattacacacaaagcttttgtggttaatgagcatattcacagctgtgactgggcaaagtggatccacagcaaggccaaggttggtttccagctcatggagttagcagaatccataggaagagagtccattgctgtgagtacccttccttcttacaggtgtgcagactctacggcgtgtttacacataccttctagggcacgccataggacgccataggagtacttggtgacatttaagttagagtggatgtagaaaccaaagactgaaaatattacaatgcaatagctttgaggaatatgtacaattagtgactttagccattgccaaagaatgaagtaggtcatttcatatttttgcctttcgaaccagagtagagatttaaatattcaagtttggttcattgtatatctaattctctgaaagaaaaacctacatcaaatgaaaagaaaggaagggaatgttggtacatattatattgaaggtattgtactggatagttttatgtcaacttgacattagctaatatcatttgagaggtgagaacttcaattaagaaaatacctccataacatctggttgtagacaatcctatagggtattttcttaattagtgactagggagggctgtgcccagcccattacaggtggtgatccctgggctggtggccctgggttctataagaaagcagggtgaccaagacatggggagcaagccagtaaacagcaatctctatggcctctacatcagctcctgcttttaggttcctgccctgtttgagttgctgtcctgacttcctttgatgaggaacagtgatttttctctacaacttgctttcgtcatggtatttcatcatggtatttcatcacagtaatggtaactcaaagacaggtttattagacttaacgatgtgtaaaatgtaccccaagtggtgacatgaaacaacacccccgtactgtttcatcctgttagaagtgcagggttggctttgctgcattctccaatatcttagaagactgaaactaaggttctctgcctactgaggttctgctcttctgctaagcttacctgggctgttggccaaactgaattctttagacctgtagactcaggcttttaggaatacctcaccctatttattagtcatcttcataccagggggagagggttatgaaatagactgcgtacatgaggaaatagaacttttaggatcattccagagctctgaaatccctagaacatctctctaaataaggtcgtattggaatatagacatcctagtggaagttaagaaacaagcttgaggctgagtgggtagcacaggcaaggagtctgtggagggagcactgatgagcagtgagttatataagtgcaagggaacccgtgtgggcagaggtgggcaggatatgaggtcagacttagtgtgggagcctgtgtagcttctgggaaagattttgccttcactgttagagagtgagaaagtctgtgagcagaagaatgatgtgaactgagttaaactttaaaaacaatcactgcagccatgttatggaaatatatgcaacgtttttacagcaatgtgctgttcagagtttattttctagccctgcctattttgtgttgtgtgtgcttccatctatatgggtattggggtgctgtgaatgaatggcccccataggctcatgggaagtggcactatcaggaagtgtggccttgctggagcagatgtggtctggttggaagtgtgtcaaccgaggggtaggttttgaggtttccgaaattcaagctaggcttattgtcactctctattctgtcacctgccgatacagatgtagaattctttgctgcctctccagtgctctgtctgcctgtctgttggcatgctttccatcatgatattgggctaaacccctggaaagtaatacagacagtgaaatgctttcctttgtaagagttgccatggtcatgatctcccttcacaacaatagacatcctaactaagacctatatgtatttgcttaatttgaagaagtgttcttctgttatcttattgaagagctagtctatgccattgacctgggagacttttattcagaccagggtagtgacagatagaggcagtgtgaccagttttggagaaaatacttaaagattactctagggttcgacagaaaatattaatggagctctaatcattatttcctgaagtagacaagaaagttggagtttcaggttggggttgaatcaagaggtttgttttgggcaccttaggcctgtggtgcccattagatgtcaatgtacatatgtcaagtaggtatgtagatgctgttaatctcaaagatgcaaggagaaagaacaccaacccaaatcattatggccaaattaattaaagcaaacatttaattaaagcaaataattaattaaagcaagctgttttattcatgaacactgtctcccctaaaggctaggttcatgaggtcagccttggaaatgaggaagacaaggtttatgtagctcgggggtagggagtttccaaatgggggggttggcaagcaaaataggctgggttctaggagcagaacataacaagttagtcatagcaacctcctgaaacaaagacgtggttgcaaggtggtcatagcaaggtagtcataacaacaagtagtcatgaccaaggaggcaaaagtctaactttttcattgaaaaggattaactatcttttaaaactgatacattacatataagattgagaaatcatgtttaaacctttggtctctgtgtccagtgctggacatgggtaagatgtggatttttccctttatgcacttcaccagtattttcttctccatactgtatctatttaggttatatgtaatataaaatatatatcatagagtaaggcttaagatcagtatgtccttgaatgcacttcaagaggatgacccccaaccatggcgtcaccttctgtttcacataatgtcaagacatacttataacatttttggatcaagtcaaaaaattatacaaatattttaaccattaatgtactttaaatccaataaaaatatggggctaaagaagtggctctgtaattgagaactttttgctggtctggcatagaaccccagtttggttcccagcatacacgttggtcagctcacaatcacctgaaactctagccccagaggaattgatggcatgtctttatctccacagacatatctacatggccctgcacaaataaaattatataaatctttttcaaaagaagtcacagggactgcaaagatggttcatcggttaagagcaccaggtggtcttctagaggacctggattcaatttccatcactagcatggttgctcagaaacctttataattccagtcctaggggatctggtaccctcttctggactctgtgggtaccgtacacgtgctggcaaacactcatgtacataaaacagtcagattttagaatcaagtcatgtatttggaaaaacgatgagtttatcagttgtgttaatatgtcagttcctttgtgttcatgctttgacagccctgctcagctgtatagattgcattttaaagtttgcagaagtcgaccacggcaattgatgtatgtagatcctctgactcagtgtgtcccatttgttgttggctcataatgagtttagcttgttctaaggtagcggtaccctcagatccatatggacctgccaaggccccaggtgaatacactagcccctgttagtaggggaaggctgtctctggagtagaattctaccttaacagaaactctaaagtacaacaaatcactacctttattgaattactgttttaatcttccaactaaaaggcacactgtagggaatacacttagaaaattacaattctagaaagcatgctaatctgttaggaagtgctggccgcagtgttagcatgagtacaccagaattctattctcatcattgttcaggaggaattagttagttttccagctggtgaaatagggttaattgcataattctccagtcaagtggccaagagccttgattaattgcccacccaggggttaaataccatgggccttgagctcagttatgcaaagctcttttttgcaccctcccctcccctcttcaacaaactacttatttgctgctttctttatgtaagattttggggaagagacaaaggttccttcgctctgagcagcctcctcataggcagagaggtctgattctgcaaaacaacttagaaaatgataagtgcaacagtagacagattaaaaagagctgtgagcagttaggtgtaggtgggggctttttgtctggctgttatctttggtttgcttgttcccatagtaaccagtgtttacactttcagtagctccattttgagctgagaaataggtaggaggcatctgggggctgtgccaggctgctggcctccgaaagtgacttgcagtcttatattattccgacaagactacttttgcctctcaatgaagtgataatgtattattttgcaggtgacaaattattagaagtgcagtcctctagtctgaaatatatttgccatgttacttaaccctggatgttcttgtccagatattttcttttctttgggaattggaggaattgttgtgtgtttgtttatcattggtggtgtccttctgaatggtgaagtgcccagtatgtgccagacactatgataaacatgctatgtgctttgtcttgttaaccatcatatattattgaaacattactactggtactgacatctcacagctaagaatgcaaggttcaaagtcatggagtcaagtgtcttgcactgcaaagccttcaagcagaaacagtcatgttcctcactgtcctagacacatgagtctttgtccttctccacttgacccactcttgctttattcaattctgtcttgaatgcatttagaaatgaatatattcaggactgctaagccttcactcttctcattaacactctgtgtgaatatgcttttaacaatgtttcctgataaactcatcattaatgttgtgacagaaatgcctgaaaatatttgtcttggggatgttaaaggtgatgattgaattgtcagccagtgtttgtggtgttagataatttcaaaagcgtgtctcatcacttgcctgatttcatttttcctctcggtctacacttttaccaatggatgaaaaagaaagatctcttaggtggacttcctgtagtcccaatgctactttgcttaggctggcaagcatctgggtcttatgctaatctagtgtcctggtgatgtgatacagagagacatgcagatatatagaaggcagggtagtatagggtgttgtattctgtgtacacaaattgcacctgcgaggaaacataataaatgaagggtggtttatgttaagaaagatttggtaaggtaaagggagcaaaatagaagattgaaattgactaattataagactccaacttaaaaaatatttatttaagccagaagacactgaatctaaatattattggcaataaagaatgtataaagattttgctgaaaggaccctgatatagctgtctcttgtgaggctatgccagggcctagcaaacacagaagtggatgctcacagtcagctattggatggatcacagggcccccaatggaggagctagagaaagtacccaaggagctaaaggggtctgcaaccctataggtggaacaacaatatgaactaaccagtacccccggagctcgtgtctctagctgcatatgtatcagaagatggcctagtcggccatcattgggaagagaggcccattggtcgtgcaaactttatatgccccagtacaggggaacaccagggcaaagaagtaggagtgggtgtgtaggggagttgggggggagggtctggggtacttttgggatagcattggaaatgtaaatgaagaaaataccgaataaattaaaaaagaatgtatagagtttttaaaagctattactatttgtttattttcaagccatgtacagtcagcttaagacagttaaagcaaaaggcaacagaagaagcaagtggttgtggtgtagctcagttgtaggacacttgcctagcgtgcaggaggactcggccttactctgcagttccatgaaaagaggaaaaagaagatcactcatactattatcacctcataataaacgtgaaatattctcctaaatacgtgtttatacggggtttactttttaaaactaccacttcactatcattttattttatttttgttaaacagcatatgctggctagtcttagtttatttatgttttaattgaatgagtcaagacctacagtacttaaacatatatgttacggagctgtagtgcacttgcctgccacccaagcccttgggctcaatctctgacacagtggtggcagctgttatttgtcacttgaagaattctcaggttttggagaacccatgctgtgtaatcaagaggacctgggttttatccctagcacacacatatattcctcgatgtggtattgtatgtgtgatctcagctctaggaaaatgaagatggtaagatccctggagttcactggccagtcatcctcgtctagttggcaaaccctagggaacagtgagaaaccctgtctcaaaaacaaacccaaactcccgaggaacaatatggaaggttgacagctggcctccacgtgtacacacacacacacacacacaaacatttacacattcaagcactgtacatacattatatattacatattgcttatactgtgcaacagtgattgatgcttgaggaaaaaacaatcacatttgcactgaagttttacttatataaccgagtcagagtcagagcacatggggccctcgaagagctggttgtggctcatgggttatctgtgaatgccaacatccctgcagcagcagacatcattgtgtggctgagtcctgcagcaggatctaactaaagagcctgtactgacaaactgcagaaatggatgatgccctactcatgatttgctcaccagaagatgaacacagagattggggctcatcttgaagttttgctttgggcggtggcggggnnnnnnnnnnnnnnnnnnnngggcggtggcgggggtcggggggtaatttctaaataacatgttataaccaaccagtcctgccctggttttcttggagcaccctggggtattaggagctgccatgcagggtttgatagttgaaagagatgggaaattgactgagttcttagtattttatatagctccccatttcacacacagaaaaaattgattcttaagaacagacacatttactgaatttttatatcgtgactcacaggattgcttatatggacagttctttgtttttaattgccaaggcaagcctcttggcttggagagggattctgagggagggatgtttgagactggcaaacagacgacttgaagttaaatcatgggttgccagactgctctccctttgtgtattgagacagctttctctggctattctaaaaactctctggatagctcatctattgtaggtcagaagcccagtcttttatttacatattaattcagttattaccccaggttctcttttgattattccatgaatcagcatcccaagaccttaacaccttgattcttagaagacgacagcacacacattttttaaaaaaacattgcaaaagaattcagagatatgtctgcctttgttaagcacagagggtaagctaactgagtgggaccccaccctgaaattaccattcctaccaagttggagcccagacctaaattccttttgtcccaggctgaccttgaactcagggatccacctgcctctgtaagcgcaaatgaaaaaacttagctgggtggaatcttgccctgtgatcgccactccctaaatctcttcatctttttccttagtatctttctgacaagctggctcataacacagctgctcctgttcattagagaaatcatattgcatttttatattttacatagttgagaagttatatacttttgaacttcagttttcagaactttttcccacagccttatagactgccctgaaggtctcagcatttaccattttgctgaggcattagccacatcctcaactccaggactcatgctgtcattgattatcatggagtcattaaacttagcagaaggacagtcctcaaaggaggaacttggaatcatgtacattattacacaaacaagccttatgcgcatagcagccatcaacacccttggaggctgtgatcctggggcaggaaccatgtgatgctgtctgtcctgtacacggacaagctggactttggtattttatattacagcccaaaacacagttactagatatgagccataaaaatctccagccaggttggtacatgtgtataatttctatcctttgttcttttaaatacttgcatctaaaataagtctggagtcggtactgtagagtctgatgaccttttttgtgggggagatagcagagaagccacactgagtgtgtgcatgcttgagcatccttcatctaatgtggatactccgtttggatttctcccctagtgtttccaccggtatctagtgcctcttctacctctagtcgcaaatgcttactctttaaagaagcagcaaaatatgcttccttctccagacttctctgtgacagtgtgctccccagtgtggcactatcatttctttagatgaaattgtccccacaggctcacaaggaatgtcactatttgaaagtattaggacatgtggccttgttggaataagtggggccttattggaggcagtgtgtcactgggggatgggggtggggtttgtggtttcagaagctgaagccaagccccagggcctctctctctcttcctgcttcctactgatccagatgtagaactctcagctccttctccagtgccatgtctgcctgtgttctgccatgcttcccaccatgatgctaacagtttaaacttctgaatctgtaagctagccccaataaattataagaattgccataatcatggtatctcttcacagcaatagaattcttcactaagacacctagcagaaccatactcttcatcccctcttttctcattgaaaaaaaactgaagctatgctcttctaacgcactgtacttatttgacctttaagtagctaaaaagtagaatccttcatgcacatttatagtttcctcggtcttttcaggggatgcactgtgccatgttgcatgagcagttggtgccaggaacagagccctaatatcacagtgatgcatggagcaggggatgccctgctttatcatgattccactgtcagtccgaccacatgattagcaggtggtctctcatgctgaactggggtaggtcacatcctgagattcacacgtcttccatgagctcttgctccactcttacaaagccttttgatgtccttgcatgcaaaaccacatcttaaaaataggagacaccttcagaagtttgggtgacatttaagtcagtgttaatcacctgatactttgactgacaacatcctgaaatttcaacaaatgccttcatacatattttttttcttttctgctgctcttgcagagtctctctcccttctcctgttttatattctacccttctagctgctgctaaggtaaccttctgctctttaacagtctaaaaattccccccagttttaccaggggcggttgactcttaggatctgtccccttgattggagctgattattctagagactgtttgcaaagttatttctgttctcagctaccatatcccccgagataatggtgggtaagatttcttcttcagatattgggtcttggaattgtaacaagcatatctcatttgggggtcttctgtgtattcacttttctttcccagcggaagcagacttcttggagtataatttccacttcattttgcaatcctctattcactagaatactttgtccttcttggtgaaatttatacagttaactggttgtgtgtgggaagtctcagctgaccagtgaacttctttgggcggtcttggttctcatctgccattgctgccattacaggttattgcaagccttgtaacctaagacaacacagcctggttctctcccagatgtgtgggccagaagctcactgtgtgtggggaggtctgcggggatactttctttcccattgtgcccaatttctagatgtttcttgtgttgtccagtcctatgccagcagctggatgcttctctgtgcttgttacatcctcttctgaccacaatgatgaagtctatattgtcaaggacccttgtggttcaaataagctctccagagtaacttcaatctaaaattctccaaaccatcttctgcattggatgacacacatgggcttttgagctttagctctgaatatttttaggtgtctgtaactctagtggtagagaaataatatgtttctcttaagttaaaggtatataactttttttcctatttgaggtacacacacacacacacacacacacacacacacttcacattgagcctgacaactcacttaaagataggcagcgaaatttcctgacttttgtgttattattataaaacagttgaggctacccagtttttatagcatgtcacacgctacaaagaaagtgaacatgtgtatgattcttaatattgtatgtctttataatgtaccagaagcaattgaaggggaattgccatcaccacatgtactagaaacaatggtagggaacgtgccatcacctatctcatgtccttaaagggtaagaagatacatggtaatttgtggaagtctgtttcccaacagcagctccaaggcagaggttcaagcccatgcatttttccccttttgaatctagcacccagttatttggtggtatatctgtagagtgtattaaatctttcatcattacaaagaacttctttactccaaatggcagattgtttctcaaggaagaccatgaacatagacacagggttctatggacagtcaagggatcccaagttttcagtcggggatgaaacgatcactgttagggatggaattgtctgctacctaattgcatgtaagacagtgttccgaatgcctgccttcttttctgtacttctaatggtgcagaataaatattaaagttattctcaattacaactggagaagcaagtgagccaaaacctcaaaactataaacttaaagagttaatagatttgactggagtcacactccaattacttctctgagtggaaatttcagtttgtgttatgtgatcctggaggatactcctttaaaatttacttagcatagctgaaaatgggagtgaaagccaccatccccctccaaacacgcacaggtacattggcaaagtctgtgaaaaaccctgtgctattgtgtttgaatcttattctgttgtaaatgggaaataattaaaatttttggaagagaccaggtaaaacagttgtcaggccatttgataagcttagaaagtcaactttctattcttcattggtaacactgagacattaggaatgcattccagttgctactgggaggaagctggggaggaaatgcttagtgcggaggagggttcattttcagcctctgtcctacatacagagcctgtcttctaatgaacttatttcacattgttttctgttgagcatcactggacacttcaaagaatgtctgggctaaggcctaatagttaaaatgatactgggtgagtattgtcagcaggatatcgccagttgttgcgtttgtaaaagatgaagagccctatcttgacagcagcttgttgcatcaggacactgagatgaccatcaaagttgatggagtcgacttaagtcagtaggattctactgagggggttgtggggtaaaggaagccatggatctaatcccttggtaactttactcaagaaatcacccatgggattccagagatggggcaaggatggcagcagagtctgcgcttggtgtcatgtctagatgcctgtggctggtggtcaggtggtaggaaagctggaaaacaaagcagatatgtaatggcagaaggctgagggtccataggaaagcagatatgtaacggcagaaggccaagcatccatagggaagcaagtagaaaggacaaagcaagagccaggtactggatggcatggccgttgacagagtgtttttcagcagagctcacatacccactccctggacagtgccagggtctagaggtgacctaggagtccacgtttcttgatccagggtcctcaaaattgatgatgacatgcaaactgaggaggaggcaggaaatgtgatgatgttaaggaaccgtgacaaaataaaaatctgtcttttgatagattttttatcagtaattttttttaatcagatacatagagtaagcagaccttatctctcaagagttcagcagctagcactgtagaaatccatggtcatagtttcagaactccatcaaaccttttgttgttgttgttgttgttgttgtttaagaagattaaacaactcttggctcttggcaatcagtgagtccccagtgagccaagtaggaagataaactgaatttcaaaaggacaatcggaatttcgatataagtatcaaaaactttgtatagcagatatactgcctggctcatctgctcacaaaacactcgtgggagcccttttcaaaaccctatgccttgattttctttgcaaaaaatgtctcttttctaaaaaagttcatgaaggcacctgccctgagtgaaaaagtagacttttttctttgacagaagagtctctcacacggttcctccttggtggcccttggtgcgtcagaacatcctgcatcgggaccttggaggcagctccaagtgtgcaggacagaggacctgtgtgtgtgtgtgtgtgtgtgtgtgtgtgtgtgtgtgtgtgtgattgtgtgtgattgtgtgttttctggagactcaggagccagactcggttttgctgggtgctggctttcgtcttcgagctcctcacagagggacagacagaaggtcagcctggcgagaaggcagctggggttctcagcctccttgcctctctctctttatgattccattacagggcttcgctccctcccctgaaagaaaacgtctttctcggagagtgttcagatgaaatattagtcccctaaaaggcttgaaatgaatgtttattaccacagcatgggctgtaccactttaaactatcacactgtaaatcacagttgagatccaagccagactggcctctgactgcattagcctaacggctccgtagcagggaagggctgttcttcccttgtaggatttagccaagtaagccaagagaaactgtttgtttgtttgtgagagtggtctatttctctcgtctcccccccccccagtaaagatcagaaagagaacggggagctgtaaacattgggactaaaacatacttaataatcccacatttatttgttttcagtctgtacttggaggggtaaaaatgaaacttttaacttttgttcgtcctgcttgggaagggtcctgtcggatcttccctccgcctttagcgttctgagcactgtcctctgagacagttacacccgggttggctcttccgtggagacttgggtggggcgctctgaggagttctaggctagggagcttcttcccttctgctgaggaggtcagagacagtccagaagaggacagtaagggtcagaggtctagatcacagtcgtctgccatactgatcctctgtcataccatgttacaagtgtgcatgtacaggcaagctctaaagccaccctctgtgcaccttgcctgtgttgctggctacttgctcagggaataagggatcctaaaatgcccgttgttccctccttgcaagcagctctatagctatagagtcactatctgggggcaactgtagttgccatgggcaatgttatgagacataaaacttggcctttaacaaacgttttatacttctgtttaataatgtagacacataaacacaagaaccaccaaataactagtcaaaggaatgtgtggtggatatgcaggtagtacaactgagcatagtgtcctagtgcaccgtgtgtcagtgtggccagggggagtcagctaaggtctctctgctgtggtatgaagggtttgaaagtaggaccgtttccttgtccctcaaaagccggctgcttttatgtacacatccctgaggagccacgtgaagatggagtgggtggatatggaggccccctggggagcctgctttagggagtggatgtcaggtgccctgctgtaagacttccagctgtgccctgcagatcaaaagggaggagaaattctcagtgtgcagacagcacagtttggggactgactacattatatttgctagactaatttcaaagtgataaaaactcttttttatttagaatttcttttttgtcggtcacagtttattatacaggtgagtatgcattggatgctccttatctgaaatgcttccgagcagaagcagtttggatttcagatttttaaaaaatattttgacatattcacacatatatctatatgtaagtgtctagatacatcatgagatatctcaggaacggaccccgggtctgatcgcaaaattcacttaggcttcagagatgtgtatgcgcacagactgcagataattttatacagcattttttttttttttttttttttactgcccctgtgtcttgagttgaactcatcaagcgatgacaggtgtgcagctttcagctcctgatggagaagcttgagagtgaggtgttttggctcttagcctctcagatgaggagagatcaacagatagttaaaacaggatgccttggtgcgggcggcctttctcttttttctttcttttttttttctttcctctgtagtcagggtgattctttggtgaacttgttttgcatattgaccggaaggaataaatgatcttttctgtcatcataataacttgaaaggagactgtaaaacagctgctttgttttgacagtagtctcctttggattctcacctggtggggctttaagatgggagtgggttgttgcccaatgccttgtggcatgtaactcccttgtctctttccactctccttgtcttctgataacagaccatcgtgcacttctttgcacgtgggattgaccagtccaccccgactcaccttcctgataaattctcactggttttaccagctgggtgtaatgggctggaaaaccttggttttctcctcgttattggaaccactggtctttgatttcctctgtcttggagaagcatcagtagttgccctctttggtgtcagtaattgttataagcagctggtcacagcctagtagcttatcaaaatgactttaaggacaagccaagcaggcactcagttgctccccttaagctggaatggcattgtggtattcagtatatcaccatgcttaaggactccagacttatcatagtggccttggacttccagttgcatactgtgtggtaattaatttttctgtcctcttctctactactgtattattagtgttgaaactacacaaaggtccattaagtctaaggatgccttaaagggacgttatctctgctgttaaactgacaatacccttgatgtactcaacagtactgcaaagacctcccccttccccctccttcaaaagtcagcagtttttatttatgcagtcttgtataactcagaagagaggcgccatataaaaaacattttaacatagaacactgatgaccaaggactttcaaagagcatctccccggaagggaatggtcattatctttataaagtactgctctgccctgtctctgtcttgaatggttgctctccgagacctaaatcctccaagtgtgtgaggagccgccctcacatttgccattataagatggcactgacagctgtgttctaagtggtacatagtctgcacacatgcaggggcagttttcccaccatgtgttctgcctttcccgtgatgacaactgggccaatgggctgcagccaatcagggagtaatacatcccaggtggaggataattctccttaaaaagggatggggtttcgccatttgctggcttgctctcttgcactctggctcctgaagatgtaagcaataaagctttgccgcagaagattctggtttgttgcgtctttcctggccggtcgtgagaacgcgtctaataacaattggtgctgaaacccgggacgagaaaaaaactcgggactggcgcaaggaagatccctcattccagaaccagaactgcgggtcgcggtaataaaggttcccgtaaagcagactgttaagaaggattcaactgcatgaattcagaacttttcagctggggaacgagagtaccagtgagtatagctttacgaggtaagcctggccttgaactttctaaggaaattcaagacagtctatcagaagtaaagtggaaaatagctttataaggtatgtttggccttgaattttttctagtgttaaaagcccttttgctccttttcacatgttatcaagtggttaaggcagggcggattctagaggaaattcaggacaagctatcagaagtaaagcggggagagagagtaggagcaaagagaaaatatggtacacaaaataagtatacaggcctttccaagggtcttgaacccgaggaaaagttaaggttaggtaggaatacctggagagagattagaagaaaaagaggaaaaagggaaaagaagaaagatcaattagcggaggttttctaggagaaggagcctatacccatcactagatgagtttaaggagctagttccttagtagctctgaatcagataaaaaatttagnnnnnnnnnnnnnnnnnnnnttagaagtcatcactttctggattagacttgctttcattagttattggtgagtagtttggctctctctctctctcttttctaacaatgactaataaatagaactcagattaattaattccatttgttccacaaacattttgttttagtacttaagcatatgtcaaatgctgggctggaagtattttctaagaagtaaagaaaacaagttaaatgttcaaggaaaacgcacagcaggtttctgagcagcagtggggtttgaactttcttatgtcgtcatagcgaggtttctggtcatcggaaggtgagtggggacggactcagtgaggacagccagacaaaaataatagctcttaaccacagaaggatgactgaacttgaaaccttagactaaagcgctagacaccctctagcattcacacgtcgttcagagcaccctttaggtacagcttttgtttaatataggaatccccaggctccatcctaaccgcaacccccaccccttcccctcttgagctgtgcatgacctggctagaaacagaaactgggtgggctacagcatttctcgtctgtgttgaggatacaacaaaggagtatttctctgagtataggttgcttttgaaggtagtctctgaagagctaactctcccttagataaataaatgctcatccctaccaccataccacccccaaaacaccctatgtcatgtgacgggtgctgatcctgtggccaaggaaaaaaatggaaattgctgtgaatgttaaaatcagtcctgccttgtttatgaatttgtgctgcccagtcgttgacatgatcagatatccatggaacatataccaggagaggaggtagacactgattcagaccaggagacctgaagggaggttaacatcagctccccaataaaatcatgcatgtaaacacggcatccccacaagtctccgttgtctggagttgcccagcagcaatgtctgttggcctttcacttagtgctcgctttcttgtctctgatttctggtgatacctttaatagtgatatatgtccttttgaacctgttgcctttccgtctggagcctggctgctgtctttgattttcatcattgaattgtcagggttggaagcatcccacccgcatcagtttcgaagccttctctaaaagatgctggtagacttagagacaaaagttctgtataaaatcatggctctttcatgccatgtgcattttagaaatatgccagttgctacaaatgaaggtgtaaacattggaagaaaactgttcaaactgcagcattttaaactggctgtgagacacgcttttaactaagaagttttgccatatttgttgaaagcggtgtgtggataaggacttggaaggagactgccacaacatagcctagaaagatccaggagttgaagttgagttagcactgatgcatatgtggggaatgaatgactcgtgtctaccgcgcctttctctaaggaagatgtgaagcaactgctcatgcagattatagagtaggtggtgtaggatgaagctcaggggaacatgaagcatctctcgagaaggaaaagcaaactgggtcaggaaacgggcagttacagtcacgtcgaagcaacaagcccgggctcataagcagccaagaaactagaatttcctggttctcctctcccagtatgagaaacttgtaaaatcaaaacattgtgtagacgcaaaagttttcttgaaaccaaattcaagaagtgatcatctcatggtcccttccatgaagaatcttggatagcagcacagatcttggcctatagtatttcttttcaggagtgaaaaaaaaatgttcttacatagcattttcttagactgaacttcctcggaagccaagggcttatcttcattgatgtatagcatcaggctagctctttggggcccgaaccagtttcttgtctattttgtttcctgtgatgacctctgagggaagagccctgggcttagacaggaagaagtgctgttgacagagaaagggccacagttaatacaggagacgagacctgacacccagcaagagcctgtgagctgcgtgtgccatgagaactctcatgtttacacatcacacgggcaattacaacagttatcattcacagaaaaatttaaaaatcagatttttatatcgcctggagaaaggagatctctgtccatggtgctaagaatgtagagatagatattgcaaattttcaaaaacaaaagctcagtgtaactcacaagtgtaaacctataacatagatgagatttttagcagggaaaccacttttcatacaggatggaataggagcctgctgtctatagctctagtgtatccttctgaactttattgtcttttattctaaataaacctctcaccggactttatttccacatagccgaagaccagttctctattattgttcagaggtatcctccgagcctaccaccactcccaatacgtggactcccttaaatactttctgttgactatgaattaggagttggagagatggacccactggtgaaatgattgatgttctagtgtgagaacctgagtttggatctccagagcctgtggaagagccagggatgacagcctgtagccataatgccagcactggagatcgctgggcacccattttacccaaatcatgtagctctgcgtttctcaacctttgggtctccatccatttggttcactttaacccactggagaacagatgcttacatgacagctcataacagtagcaaaatcacagctatgaattagtgatacaaataattttatggtcactacaacatgatgaaatgtactaaagggttgtaccattagtaaggttgagaaccacttatctagctataggttcagtaagagactgtctcaaaacaaatagagtggaatcaaggaagatacctctgtccatctctggtctccacgtgtactacctcacgcactcacacacacatacaggaacatacacaaacatgtgcacatacttaatgcacacaaaaaattatagatggcacagcttcttaaattccccgtgtgttatttgacatgtgcacaacaccttgacatgggcacagcaccacttttaaacccaaggcactatttagatatgtttaatgaaaaggaaactggaagacgtttctcctaaagcccagtttggtgggtgtgtatgtgctaagacattcatcatccacacgacatccattgtgcgtaaagcccaaggaacagtaagcataaggccttgtctgcactaagcagacagttgccatcacccttttcaatgctgggagtactgaagtgtgtgcttaacagagaagcggcggtggcgaccgccaagagcagagaacccttagcagttggcagaggagatagacatacatatgcggatgggatgagttaagtccttgagaatctaaggttttcaaaaacagaaatgttttctcagctgatgagaaggcttatgtctttaaaccttagctcaattagcatttactttaaagtcttcattactcacacagacagggagtatttttaaggcaatttggtatatccttcttggacagtaccaccccctttataaaagctatacttgttccacagaggaaatttgcaaagtatacaaagctataaagaacatgactacccattgggccatttctcaggaataaatgtgatcaacatttttatgtattttctgcttttccttttacattaggtatcttttaaaattattccaattatagtgcataagcaattttgtgctctgctttttacacttaggattatgccataaccatttccaagggttattagaaattgtttctataaacaaagttctaatagttgtatatgagtatatctttctgttattttactgcaatttatcagccttctcatcactggagtctaatttggttccagaattttatcatcataaacagtattctaaaaactgtcagttttctaatttatttcacataaaaattcattgatgtggaatggggtcaagggatataacctgattaaatattttggaaacatgctgccaaacgattctgtcgagtggtatcagtttatactcccgacggcagggaaggaaggtctaatagactgtatccttaccagcattgttcgttcccagtaatcattttataatttttgctaatttaatttgacagattagccaggaatcattgaattttatagcttgcatttctgctgagccaagtcttaaaatcctcaggtggacagaatcgaggagctcatgaaaagaccttggggtagttaatgagtttccaatccactaaaataattcactctatatttaaaaatagttatctcttttaaaagttagagttaatttagaaattgttcatgaaactgtacatactttgagcaaattgatatttctattgttgctctaaaagaattcatgccacgtgcccctatgtgattcttatctaaacaaggcaagcctaaagcccccttcttgaaataaaaatgtttattataaagtagagaaacaaattaaattattccggagcactctgaatttatcctttaagaatgaaatgttacggtatcaactgttcatctcggccccattcctagcccctccaagaagcctcctgcctaggatgccccaacctctgccttactctgccaatggtgaccggagcctcactgcagggcatccttattgacttggagaagacagaagtaggtgtctgagagtcacctgagttgatgaatggcaagcagcaagagatatctgggtccctctgaagaacccttcttttaacatctttgtccctatccctctcttgttatgtgactgatccttcctcccatggaggaatatgcgcatccctagaagctctgttggttcctcatttctagagccaaagtgaagatgtgttgaatacctgaagcttatctgatgcctggaggcgatcagtaatgtgcccctatgtttccaaaggctctgaatctaatggagtcctgtagcataaccttctaatgtttaaaaattacacagatgagtgaatttggggaacctgtatcagtcttcctctctagttacatcatcttccattccagccaacagctcctttgcctggataagctcagagtctgggattgcaacatcacaatctggactgatctgggatgttctggcagaaaagcttggttcttggccaacctgtcctcgtctgtctcaatggagaaaatctacaaagtagctttgaagttccttagctatcttcccctcaagttaggagtttagtagactcgacttctccttacttaaagcattcattttgatagcacacactgtgaaggttcagatactttgtgcttggttaaacacttgcaattatcttgaagaaatgtttatgttttaggagaagacagattaccataggagtggcagtgtatgatggagtgtatgatggagaaatttggttaggttctaatgtctgagatgaaagctctcttcaggacagaaggccttgctacctgatgcacgttagcttcctttctagttacgagttctgtgatcagtcaaaaccttcttgagtaagctgcacatttcttcattcctgtgtgttctcttcaaagtccagagcatatctgcctgtcctgtatgagtctacactgaacacatgagtttctatctcctccatttttacctcactcattgttatgactttgatcttaaattcctagaaagaattgaacatttctacttaattaaatggtttctcttatattttgttgaggtttgaagaattaggtttagtacgtatttttgcttgttaggcattgtgtaagaaaaaaacaaggaaaaactaagatactctttgctttcaaaaaccacccattacgatcttgtaggtttaaatagtagttatattatcttcttactataattattctgaaattgaaaggggcttatagaaaagaaaaatcttaattcagatggttaaatgaaactaaattgcacatttcattttccgtggttttcgggatgaattcagggcctcttgcgtgtttgataagtgctctgctacctagccagttctgcaacccatgaatcatcctttgtgttacaagcatccttacttccatcttttgagactcctccactgtagaaatcttttttcatttatagcccagtcaaaaaccatgagcacccattctggacatagggagtttcaaggccagacttcatcacagcccgctttgatactcaatcccgtcctttcaaatgcacagctgcttggcagccaggcccacactctagttcataaaaagcctttcaggtcattaaaaaatgttttattaatgggcacatcaacaggataaaggaggtcagtatgctaaagtgcacataaaaatgagaattgtattttttttctctcccacttggctcagcaggagctcctattactgtgctaaaaagttacataatgagcaaggcgcccgatgctcatttggtgatccaaacagattgctgatgtggagggtacaaaacatgtaaatgccatctttctacaccccatgctatcactgatagccaggaatgattacagtgacagactcataatggcagggatggatctcagttaaagctcactgtgggctgggaacactctcccttcaggcaggtctgcgtcctgagaggctcagcagggtggacaacacagcgtccctgacatgtgtgcatctcttgtggtgcccatgaagaaagtcaaaagggcttctcataccgtgatcctgggtgctgggcacctccgtggactgggaattccctaagctggcagacaggagccaacacctgagccatgttttagaaataaatatttctaactttgatcatggaactagcaaatgaagtcaagtatttacattagcagtaacagaaagaagtgtgaggtagattatcaggagaatgaatgagctgcttgtcgtgggttcattttgcactgtgatcatggtcaaagttctcaagtcagcccagtaacagtctcagctgctttcaaaacctgtgctagagaccagcgtcatttctatttgcagataatcgatgtttacaggtgaacacaacaaaacaaaactcaaaacacccaaaccaaaccaaaaaatgctttggtgacccttgagaagatgtagacctgcccacccatgaagtgccacatttatgctgagtttatggtgagaagctggtatttgatatgtacactttctcaggttcagtgaaggatatcttagttatgtttctcatttctgtgacaagatattcgatgaaaaccccttatggtggtgttttacttttaaaccactgtgccaaagcaacttacagaaaaaagcatttagtcaggggcttccttacacttttagaggatgaatccatgactatcgtggtggggagcatggcagctggcaggcaggcatggtgccagcgcattggctaagagctcacacccagtgacacacctccttcaacaaagccacaccttctaatccttcctaaacagttccactaatttcgattaagcattcaagtagatgagcctatttttattcaaactgctgtgagtttgaatgagttgttttggctcagggtttgagggactgcagttcttaatggcaggaaagacatggcagctggggcatgagatggttgaaattactatgtccatagtaaggaagagtggcatggtggtatccagctcatattcagggtgagtcttctccccttggactcccgagaaatattgtcacagacttattcagaggtgtgtttcctaagtcattctaaatctagtgacattgacattgaagactaaccatgatagatgaggaagattatgggaccagaactagaagcagacatgtagaactctgtggctgaatgtgttgttcaacaccaatatgtaggtgttgcagcgtgggtgtgtgtacttgctcatccaaaccatctgtaatcagaccctcccattatcattatgctgtgagcatttactgtgctgaattcactgtagaaatgaaaatgatgaacttggaaaaccgagccaaattctgtgaagtcgagatcattagaatttcaggaacatgccttttgttctctttccacttccctaataaccacatcaaggattttgaagagaggctaggagaaaggcagaagagacgctgctgcagagaggcatgccctatttcctacccaccgatcacaggactcctcatatgactggccatcctgtagctctttgcacgagtggcttagcaacagagttttaaaagcacaaatgtggcatttctgagttactatgcatacccaagtgctggccgggccatagctagtatatcctagatatttgcctagattgagtttgcattccctactgttggctgtgggttctgctcttgccagaaatctgagttgtgcagcaatttaagtgccttcatcacagaaagtttttgttgttgatgttaatttgattgtttgtttccatttggccatatatacacctagaaaccttgtcaaatgtatttgtatttcacataatactgtgcagcaggaacagggtaatgtcacacccattcaaccaatttaattctaaaaatctttactcatcatttacctgggtcccaggtcctgctgctcacactggaagaccaggtcactgcccctgcttttagatcatgagtatttattgaaaagactcatcactgattcctgatggccttattatccttccatcttcctcatggacattcagccatttgccttctctaatcaaatacttctcttgctttaaattaaagttgacagtgaatcaatgattatctcattttgtcagaaaccgatagagagaagctcggccactgcattaaccacgtgggaaggggtcctcgtggctgtgctgtggaaaccccttcctgccaagcccacgggcaccagtgttagtgccttcttgaaagcacacggataggaatttactgtaactgggcaaatagtgtatccagctccgtggagtgagaactcttatacatttccggctggcctcttttttcttgagttagaaggtcaagaaatctaaactaattaaaaaagaaagtactagtgactaacagcctgtatactcatagtcacattgtgaaagaaactattgggcagatagatcttcattagtggtccatatgtaagagtacatttcccatagatattgactcttggactcatcacatagttgcgcacatgagagatgctgctcaagattctccagcatgttttttttttttaaatcatatatattattgctgtaaaatatagcattggtgcagggtggtggtggcacatgcctttaatcctagcacttgggaggtagaggcaggcggatctctgagttcaaggccagcctgatctacagagagttccaggacagccagagataaaagagaaaccctgtctcgaaaaaccaaatatatatatatataattgactatttttgtgtcatgctgatcaaaaaaaatcagcatgtttcttaagcacgtaagataattctgaatttattggaatatgataatactggatttattggaataagaaagttaatgcagatttcttgttcctctagctggctaaatttgaaagactttattatccattcatttcatatactcttgtggcgttattaaagttctctgggatacttatattcttgtctctgttgtatatttgtatgttttggggagggtctcattatgtagttcaggctggccttagactcatgatccttcttagtctccctcacgctgggatcacaggcctgccagccatgcgtggtagctctatttaaaatttgtgcaaaatcatctctcctctcttttggatgtaggaggtttgggaattcagttgaggacattgtccaggttttcatcacacacgtagagtgcccattggaaattttgacattttccaatatatgttccttaggttttggttagctgtctgtgctaaatgttcatagaacactgctcaagagtcatctacactggactgcgaatgcatttgcttataagcacaaccttgaaatatgtcgccagggaaaggaaaataccctcacagctttgcctgtttcccaccgatgtttcacctatatgaaacaccgtggccagtacttaggtagtcaagaccactttagatacctgtcagggatcacggtcctgcagtgtctccatgcagcacttgataaataagcttctgctgccccaggaagagaggtcgggacaggctgtccttttctctgcactctgcgggggcttcctctgtgaaggtaaatcatcaggaaacaaagcacctgggctatattatttcagcttctagcagaaacgccatcactcaagtaagatttaatatcgtgcctgcagcatgtggagggaaaaaatgtacatctcttgctccatatagttgaagacatttatatgaaaaaaagtttctgtcttttacagaatagacttgaagacattgttaggtgtcccttatgaaagagattccataaaatttttctctttgaaattaaagtcaagggatagaaatccactgtgcatgtttctatgttggaaaagtaataactgtataggtctctctttacctgccttagcagcaaaccaggcaggacctactgacttccatcctcacctggagcagccagcatcttgtataaatagtaacatcactttcttccctttgtctagtttctgctttcttaactaactaattaatctatctatctatctatctatctatctatctatctatctatctatctatctatctatctatctatctatctgctgttctgtggctcagaatcatagccttgtatcattgtaggcagatgctctacccctgatccctgccctcagcctctatatgtttgacacctaaatgttcattacacattttgtttacttttgaaatgagtaacattgattttataagaattaactaaagaatagacaaagaaaatgatacttacgctaactagagttggtgattgttcatgccttaaataagtaagcttaaaaaaaaaatgtgcctcctgaatcttccactgctgaatcagctctactctctttagtgaacctccccagtctgcatgattatacctacgatgattctgtgtctcagttccaagaggacattcattaactttgccttagaggtatctgcatttttgttatgaaggacttagggtgttggcttggaaacctgatacattgaagagaggcgtctccaaccaagcagtgatgactgatttatctgaattaagtggaatgtgtcctatactattaggcacaacagatgttgacgtgggctgttctctgctgccctcagctgatgtccagaagggcgtatacagagcttcctacctagtctatacactaagtatttctttctacagtaaaaccaaatttactctttgaccaggctgtggtgtttgttctgccagctggacggcagtcagcttgcttgaatctctctctctctctctttttttttccatttatgatcccagatagaaataagttcagtacacatattcacgtgctgaaaggaccacttaccacagtgaaaatagaacttcataatcttgacaggaagaagtatttacacaataatctagtctcttgtgatttatcatagctgggacataactcaattgattttgtggtgtgtaggtgaaatgttattaaaattttatgcattctactatgaagtaaacagagaagagtgttaccactttgaaattcaggatggagggtaaacaagtactagttttacttgtgtgtctttctccatacttaatttttgttgtaatttagaaagtaagaagagaaagcagagctgaggatgaaggtagggggtggggaggaaagaaatggttgtactctcactctggtgattccccggacagtaaagaagaccacagaggttcagattacctctggatgaaacatactttagtaggggatcagttgtgcaggtgactgttgctatatctcggcactgtaaggcctatctgtagtttctacgtatgcagctctcatgtggccattagccatggcaaagcaaatagccaggactgagggatcacgatggactgttaagctaaagctttggggtgcagcatggtcacctccaagcagctgaggcttgagatgggttccgtttgcagaatagcctgaagacagttaggacttagggcacattctttatgactatgtcaagactctgttctgaaaaatactgtgtgcagattgatggaggagtgtgggtgtagtgtagttatgtacatggtttgtctgtgtgtgtgtgtgtgtgtgtgtgtgtgcgtgcatgagcacatgctctttgtatgtgcatgcatgtagagtgtgtatgtgtattgtgtatatgtatgcagagtgtgtatgtcctgtgtgtgtaaagtgtacatgtggtgtgtgtgtttgaatgtatgtatgaatgcagagtctgtatgtgtggtgtgtgtaagtagagtgtatatgtggtgtgttcatgtgtgtgtgtgtgtatatttatgtggtatctgtatgtgtgctgggtgtgtatgtgatgtgtgtgagtgagtgtatatgtgaggtgtgtgtgtgtatatatgtaggctgtatatgttgtatgtggatgtgtatatgtatgtgtgcctgatactccatattttgtcattattaaatgggccattgtgaatgtctgatctctttgatgtcggcttatgtgactcttaatggatcagtgtacaggaaatttttgaatactaccaacctatattttctaagccaaggtcatatttatagataaaaggaaatacaatgctgagttatttttaccttaggaaatctcactagcttttttttttttttttttttttaaggactgtcttgtggcaagttaatgcaaaaccaggttgaacagggacggtaggagacacgggtatcattcttacattcctggagcatgtgcctcctggtacatgtgctctatatgtgcctcctggtacatgtgctctatatgtatcagaagcatcacatatacacatcacatacacagaccttggagacagtgctgagaggtccccaagagtcctcactcttatatctgtctcagtgtctaactgcctgtaacaattctgctacagtgtctcactgcctgtaataattctgctacagtgcttcgctggctgcccataacacatgtgttatagtgtctcactgcctatagtaattcttagctaggtgtggggtgcacttgaggaaagagtttctattagagattggaactctccaggagccctgcctgcacttcaagaaccaaccatgaacagagggcagtggtctagaagcctcagcccccagttctaagtgccatttctgcattaatagctcccagcatgggcctgacacctagtaggtgatcaataaggatttatggagtattgagtgaattaaccagctgtgtaatcttaggcaagccacttaatccccgtgcttcagttgcttcaccggaggaaagaggggaatggattaggtgacctcaagggccccttttggttgtaaaattatatgattctgggattgatcctctacctgagaggaagatgaatctggcaggtgtttgaaagatgaattgcagtgagagtcaggagtgggaaatgggctgtcccagaattgtctgacattgcttgtctaaatcgttttctaccactggttgacatatatacatatatatttacgtacatagtatatatatatgtgtgtgtatatatacatatatgtgtattatgtaagtacatacatatatttatgtatatgtgcatatatgtgtgtatgcctatatgtacatacatacataaatatgtgtgtgtatatatatgtatatatatatgtgtgtgtatatatatatatatctgtttattttgtatgtgtaatacaaccacagtgcacagatagaggagatagagatcagagaacaacttgtaggagctgagtctcactttccaccctgttggttctgagcattgaacttgtcatcaggcttggtgacagttgccttcccctgctaagccatgttactgatccccttatagtgggtcttctttctagtttttagatgctagctgtcatctccaagatgcttataaactcttcaaggactggagtcatgacttttcccggtgtgtgttcgtcagaatagatgagccataatgattcctcatggccgtgccaggagttcgcagagccttgccacaaagcttctttaatcttgaaggaaacatcactttctccctactgcagaagaaactgagtgatagaatgaatactgaacatggccactaatcactgctctgtcgggctctgcataggcatctccatgttctgacggctcccgcgaatttagtcaagactgcagcagagaaaccaaaacataagaaaggacattgattctgagcaacgtgggtggcagcatgggggcagctctcctccacgttcttgctgctggcctacgttgtaagctccttcagcttctcctaatttttcatttttcatttcttattaactgtaactgtttgcatcctgggctacatctacctgcaaggagcgtaccctaaacactctttgactgtccctttcactctctataaaccttcacacttctataaacaataggaaccgatagtggtgctgtatgaagtgtccgttgtccattaaatcaatatttctaatttgtgtctggtgacactgtgccgccatgaagtggtggaggagtggatgcctggagtaatctaagagagtagtacctgcatgtcctggttgtcggcctcagagcagagacagagacgtgcattggcaggaagagcgatgctttgcacctggaacgtactgagattttggtgtctgttgactctgatgtggaaagataccatgtaagcaattgactaatgggtttacagctccaggaaagttgctgggattgagttatagatttgaaattaatcactcagggaaagaataagaagtgatgggacttgagccgctgaggggaccggaagctaggagtgttcggaatggatagagaaggcagctagggaacaggggaaggacagagagtgctgtctcagaagcctgggggcatttttctaaaaacttgactgatgattttcattcattcgtttactcattcaacaaatatttgtacacccttaggcactatggtataccaaaagaatcctaagaatgagggaaataattgcataactgcctttgtgcaaaaccttgcacagaagcgtggaacctgggcagccagcaaggaagaagtgggctcatccacatccaaccacctccatctcctccactggtaatgcggagcaggatgggaatgatcaggcatggagagaccagcaggacagcagaggtcttttttgaaggggcaggtgctggatctaccacagtgctgtggtgcccaggatttcacacactgaggggagacaggacatgagcaggggaagcaggtgagccaagggtgggaagatagacaggagttaggactgggaggcttgctaagctgttgttgttattgctgctgtgacagagtctgtattggcggcagaggcatgacagcaagtgaccaaagcagaaggctgagacagcacctttcaaccataaacatgaagcagagagagcaaactggaatgagtgaagtctgtagactgtcaaaggcaactcccaggaacattttgtcaccagctaggctccacctcctgaagcctgcacatcctctccaaacagtgccaccatcggggaccaagtgactcaaatatggagcctatggaagacattcctaattcagaccaccacaggtgcctaaggcataaggaggactttgaagtttgttctgagaatgaccaaaacaactgtcctcaatccccatctcctaacactggtgttccgtggaacatctttccatatacaagcttattgaatgaccgattcaggccacagcagctagaaattacctctcccttctcacggctgagaaaataggtcatggaaggccgaagaaatggtttgtcagtcaggatccgtacttctgtgttgtctcagctcacattgtctcatcctcctgtagtagcttcttcctagagatgaggagaaaaggccagctctaaaggaactgtagtctatgccttcacctcaggccatggagagagttgtacatcagggccatgtaaggctagagcaagctgaatggaagatgaatctctacttgatcgatgccaacgttctcttcctccccgagaaggggcactttctaggacttctgtgcaatgctttcttttcccttggaattttaggcataagtaaggaaaaaaattcagctgtttttgcattatggactttaagatccttagagggtggggtaccaactgtcaccctttgattcttccagctttacaggacttctaatggctctgctgactccagagcagctgcatatcactgtagttgaaatatatcaatgccaggttcttttagcaatgccctttggcaacttgaacctgtacatctctaaataacatcaggttcttggggttcacaagccccccattctgttgtcagcactggctaagagacattaacctgaagctggagaattctggtggtcctgagcctacactttggttttaggaccctccaggactagtgactgtcagatagccctgatatgatacattattaggagaccaggtgaataggacatcctgtgaaatctctctctagcttcccagcctcgctgctcccagcccaccagcaagttgcctgctttcccctgtggtccttgctgccacagctgtctccttggagtgttcactgtgtcacttgaagatgaattgacagcacaagaagaagagcttaacacattccagcctagattgtgaactcagtttgggcacaaaataaaaccaaaccaacaaaacaataccacccaccccgcaaatcacacactttccattattaaatgacaggtactcagtgcttgaaaccacttcaaattttcaagatcatattttccttttgattaaatttctttggacttatctttctttcccatgattaatttttccaatgctcatggcctgtgagtcagtgcattatttatgactttttttgtagattcttaaaaatagcatcaaagtcttaacaaaactttgtgtgcttctgcttcccacagtttgtgtgttaatatcaagagatattatatttgacactcagccttgctagctagtgtttgcccacttcattgaactctgtgcctagcatcaacacttgaaagttatgcattaacaattgaaactacggggtttgcatatgatgtcaaaatgccacgagtctctggaaagtttgaacaactacagtgaatccaaattcttgtctgtctgtcaccagtaagtggtgaggactggctgtgtcccttccatggggaatcagcttttccctgcctgctctccgtatcacctgagttctataataccctccctacatcattcttcgaaagttgtggtaacagtgcttacaaattgccagtgactgtggaaattggtctaagcgagacaaagaggaattggcagtactcatcacattgcctgtgtaatcaagcaactgaccattagaaacttactcttatgcttattttttttttttttttttgcagataagagataaggacaggcttattcatcaactcgctgtttgtaatagtgaaagactgaacgcaatctcttcacaggatagaaagaaagaactgccaaaaggatagagcaatagagtgagaaactattgttgtacagcaaaggctgtgagcttaaatttggaaatttcacggtgcattgttaacttaaaactgaggcccagcgcgtggcccctggactcgcagctgtagtaaactgagtctgaaagctctcaacgaactgatatttagaaattcaagatacattatgaacttaaaactaaagcacagaatagtggatatagtaatctgccactttgtggggagagaggaagaggggggagagagggagaagaagaggaagagggagagacagactaaaataggaaaatgacacaaagcctaaaatgcccgtggtctctaggagctgacaaggtctttaagggaggggagcgagtgagaggtcaaacagctgcaggatatacagtcatatcgtatgatcacatttctcatttgtacgaataaatttcaagtaaaatgctttgctgtttgcatttctgagaaggagtatgcctgcaacaagcagtaagaagtttagctttaccagatttaatagctcttattttaggagtaaggaggggttttgttttgttttgttttgttttgttttataagagtcgcagcctgggagcctgggtctagaaactgttcccactgtaaagccgcaaggctatttttggccttaaaccatccctctcttctacttccccgaaatccagagtatcctgtgccatatcaattaaagcgaatgtactttcaattaaaggtgtaagtatgagtctggaaagattaattctttataaaaggatgaccttcagtagttagatccaattaggcagttttccaagcatatatcatcttgatgggacaagtctgctacttacgatgaatcacagtgatcttttcaaaggtgggacttaggctcagagtcataaagagtgacttgctgagcggcaaactccttagtccacggctgaggggattatgaagggtggttactgcttttgtgatattaatattttaaaaacttaggatgttcatgagagtgttctgggtgcagctcacgcatacacttcttttaccatgacccgagtagagaaaactaatttaggcaagagcagtcagatgagagaggagcaatgacatcaattaatatccaactaagtgccttgagttttctctccaggagccatttcatgattacatagagtattagtccttcctttctagtgatcctttgctctgactagattactttggttttaatttaatgtttgcttatatacaccatgcacaaccgagactactaatgaggttttcgatgattattcaatagcaacatgcaaaatcttggaagatgcggctttttcttaaaagtgacagtgacttgagtatttctatgtatatcaggtatttccaggacagaattgtttgtcatcactctgccatagattaaaattagaaacaaggaagacagtgaatgtaattatgtaaagtggggagaagtggtgggcattgggaagcagaataaacaagcagagatattttgcatatctcagtagctgactattggaatcaaatggagaaatatatagctaccattaacacaaaaatctgaagtattcaattctcctacataatatttttcatttaacatataaagtatgttggaagcaacatgctgtgaacgatctgtggatttctttcagtgactcatacaatatgaagagacacgcacatatcatgacaaggtgttatactctatttaggagatacttttccttgttttaagcctaactgctctcagattctgtctgcattcctgccccacccaacttcatgttgggtccctgcctctcttcaactctcacaaaacaaaaggaactataaggaaacaaagtcaatagaagaagaataacagagccgtaacctcacatggggtcacttagtgttggcagctgctgctgggcacagggcctgctctggcgtgtggttgatagacccagtgtccctccaatagagtagactactcttcccctttcccagcacttacctatctcaaacagcttctctgataagggtggggcattgtgctcacttctcctccatcctggggttgtgcctgtcttgagaccgcaggtctcatgcacactgccaccgtctctgtgagtccatgttcatcagccctgtcaggtctggaagacatgtttctttccagttattcaccatctctgactcaaaaagatgtaacccacttgtagtactggagtttttccctgttgacataagatgtctagttgggtcattgcctccccttatgtggtgagaccgtttacattcctttatatataaggtatatgtatatatcttaggaggcttctacagtagtgggttctcatccaccctttcacaccacctgtagtgttagttcttcctccccttagtccctcctttatccttacctccatcttgctcactatttactcctctgattctctttgccccttttctctctacaagacaatactctatgtctaggggacacatttcatacacagcaagtgctgtgtaagtggttgttgcattgattaaaaagaatgttgagtgcaggcttacttttcaccatgggcatttttgacctgtagttggttgattccgaggatccagagcctatagatacagaaaagaatcctgggagttcacaggctccctctagaatgtatgagggcagaaccgtttataatattaagaaaccaattgctccctcactcattcctttttacatacattattaatggatttttttccttagagaatatgctgtattgcagcatatgaactctaaatattcagccatgtgaaacaatttcagtctgcttgtgcatttatttttcttttgtgagggacaactacttttattttcacattggagatcaaaaccaaatccacacacatattagacaaatgctctgttttacagataagccctcaatcaggaagtacttatttataaaatatttgaatttgaaattaggaaagttaattggttttctttcaagtaaattgatgacatttttattggctctgaattttaaaactataaaccagttctaaaatggtttctgacactctactattgtctccaatttactttatggtatggatggatagacagacagacagacagacagacagatagatagatagacggatagacagacagatggatgggtagatagatagatagatagatagatagatagatagatagatagatagatagatagatggatagatagacaggcaggcaggcaggcaggcagatagacgaatagatagatagatagatagatagatagatagatagatagatagatagatagatagatagatagatagatagatagatagatattttagggtgaggatccactctcttcagtagtgagagttccacacagtcttactggaagcatagttgtaagatctcatctcttagagggtttgtggccaagtccagatggtgaaacctgagggcagatgcagatttctaggttcaggaacatctggccttgaattcttgtcctcttcttttttgtctgttgtcccttgtggattggaattaaatgtggcgcagctttttctagggagtgagaagggctttctctaagtggatactgagtcctttccagcttcctggcctccttgtgcttagtgtgacatgagctgatagcccaaaagtctggggagggtaatgggatgaagggtccagaaacacatcagcagaagctatcacacagggttgagaattgaacccggtgtggttggtagatctcctcagtcatgtgtggcaggaagaggagcatagtcaggggcattcgcttgggttctgtttctgtctcagtctaaccccggaacctgacaatcctgcttctgcttcctatgctggttagacaggctgctcttactgacatgattttagtgtgtgtgtgtgtgtgtgtgtgtgtgtgtgtgtgtgtgtgtgtagatggatagatagatagatagatagatagatagatagatagatagatagatagacagacagatacttttaacagtttacagctcaccttatcattacttaaacttcatttaaataaagaaattctcctagattttttccaagtgcgatttcgtttgtattaaatacattcttatgtatatattttatagtttctgtatcttatagaatgtttgttattcaatggagagtttttcaacattcacgggtccttgaatttggaataggcttttaacaacaagtacaccttcttgtgtttttttttcatgtgatttaatatatgatacttgtcttgaactcattatagagtctgttgttcctgatacgttgttttagaattctgttactaaactgctactgtccaggggaataaaactgtacaggacaccacttagatgatatgcttctagagatgtgtattctgaaattagatttaagctttattgggttagtatggcttttataaaatgaacatttttgttttggggattttgtgttatcagcatattagtgtgaggtaaatgtcatcaaatatatctattcagttattggtatcataactgtatcttccacttgagaagatatttgggagaaacctaaactgtaaaatacttcctccatgttagtcgcgtcgtgtaaaaactgagagtaatttggtttgattaaactctgcctcattagattttaatgtgctttatgttatgtgtttcagaaactccagaaaggaacttaatgacatacgatttgagtttactccaggaagaggcaagttttaattgaaattattatcttggtggaacaagaaacaaatgagaaattgattacgagtgtatggttgtaatttgctattcaaaaatgttttgtctacaaacaaacaaagagagaaaggacttgctaattgtatggattctaaactactactcaccatatgaatcccagaggcacatgtgtcatggtgtagagacacatgtaaattagatatattagcttaaccacgaaaatatacatgggctggtgatgcagcttttcatggaaatgacagtgagtattaccccacaagactctgcctttcttatggcctccgtgtaatctgaataactcaagtacgttacttcaactgcttaatggctggactgcttgtttgtacatttcctggatgccagaagacaaggccatgtattatttctattttttattaggttttgcaacaggcatagagcctgggcatatagaacaacatcaagaaaccttggttaatagatatgtatcacaaggaaaaatataggttacattatttactgtatatcctgtagttcagagaagtaaaaatcagacgttaatacatgctaagtttgtaagtcttttctatggcctgtggtttctctattttacatacctgtaaagagtctcctcaaggtctaccccgaatacctttgtaaagtacagtggtctcatgcattctgatagtgtccatgagttcatagctcacttggctttagagctactcaggcagtaaactgccccagcctccttcctgttctcaactgcctggaggagccagagtgagtaataggcacttcaagtcttggtgtgtcctgtccatacacattcatgagagttggtttttaagtactgtcaatcaaatacattccattcttaggccttaaatgtttgaggtcccagatttactccagtcctgatcatgagccctctataaaaccaaagattcgacggtcccctgagtatttgaattagacaaaaatatgaagtatcttctacaaaataaatgccctgggccccaatgagccacctaaccgggttttcttttcaagtgtgtccatctttaataattttagattggtctgtgcgattgtacgacagcagtctcagttatcaaaaagccactcatttagtcataatataagcatattgaccaggcagtgttgtgaataaatctgctaattatgtaatgggtgttccaagcacgagaaggagcaggttcttgcaccgaggttgcttctcttcatccagttgtttaaaattgactacagcaatgaaaatcaatttcaattttaagaactaacaaaggaatggatttccatcttgaggatttgcgtggtcaagccggtcccatcatcactggtccatttgcagtgcctgtggcagcctcatttgccagggattgatgaatagtctctacttttgttgccaggtggataccatagcagtgacttgtctggtaattgtcctttactggagagcgagcacaggcctgttaggactagtcacgctgtctgtgacattcctggtgcttcctgctcttcacgcatcatctgtgatacacgcgtgcatatacacttcatgtgcattatgattatgctaactataaacaggcatagttgtgtatggcataagacacgatggacacacagaacaatctctgctgtcttttgaagacacactcttttagttactatgttgttgtatactctggaacgtagatgctaagatgtaatgtttttacctgtttagcatcaatgtagaacaaaaaaataaatttctaggaaacttgaaataatcatatttctggtctaaactattacaggtgtctttacttacttgtgtagaaaaatgacctctgaatgccatacacagaaacagagtatttcctgtcttgtccagcaagcgttagccatttgctactccgatatgattcatctggtgcccaagggacctgaaaataggacccgctgtccaatttaatcaccggggagtgactatcactctggcactggtttggtgtagctgtgcttggcatgtccctcttcagctgcattctgagtgtgacactgcttgctgaaatgtaagattcagatcttctagctgctagcaagtcactcgaggcataaaagacttcctactgcaagcctgtcactcagcaccttcattacaagggcttcctgtcctggagatctggatgatcatcaggaacacagagatgctgagtgccagtagcttcagaaagagagtcactctgggaacgtaaccattaggtgatctatcctcaagtccccttatccacataagagacacatcattccatgagagacctttataaactttattttttaaccttcgacaaaaggagaaggcccaagacaagtttaccttgtgtggaattcactgtttagtaagcagtccctgctatccatttctgtttgttgcatcctattatgaaatgggagaaaaacacaatcctcagaagcatcaagtatatgcattgagtttttgtcgtttctagagcttgagcaaaggagacaagccatgcaccacagcgtacgatgcatgtgggatgcattgctgtgtcatcgccaccatcactgattgtattcttagtgtcacacactaggtaaaatactttaaatcccccaaactatgaaaagcaggtcccgtgcatgtatgtgtgtgcatatggcatacacaatgtctatgtacacacacctactctgtaagctcatttatgtagtcaccacagctgtttgatgctgagggtagatttctgcagttgtttgtctgatgcagcagctctgtggctgggtgttccctgaccttggaaaacacatatcctgctgtttgtagccagtgctactacgtgacccttagaacatctgaaagccatggagaccaaaccatctccttcattataacacagggttctgtaatagttctcttgagcatatttcaatatatccttcctccttgaaaagtctttagatagaagttagtgttgccatgctcattcacaacctctcaattaagtaatcttggctgtattcactcactcacttgctacaagcctgttcagtcccatctttatgagattgccaactcctgtcacttgccattgagaaactacattaatttacccagccacactttctaagagaatgaatctgttgctatcaaatgatcaatgttgtgttaaaggagtttcttaatagcacacatttaaatagttcatcttaatagtccagcaagcccacgggctgtttgtaccaagaataaggttgtatcagatcccacccattcaaccttcgctataaattcttaactccacagccacaagtgattgaaagggattgatggcagctggaattaaccttggcatgagaggaaagcaatgtcatgacgaacacttaggtcttccagcgtgtactagaggattaattcagatggtggccagagaggaagtttttcggttcaccaaaatgaaatacttttgcagtaacatctgttaaataaaaaacagaatacaaatgacttgtgggaaaatatacctcctggtgtttctgatttttttttttcctaataggatctgaatagatggattaaagtcattgggtgattttagtaactgaaatgtatgctcttttgtactgggctgggctgttgatttttatgttccggtttctaatacatattcatctcacatttggacagatacagcagacggtgtgtctcaggagctcttctctgctggcttggttgacggccatgatgtagttataggtaaattgatttttagtatgcagtatcattttgttgctatatcaaatggaaatgtgtttagaagcaaaatctttcattaaggaataattcactctgaaatgtaaaagacaatcttcataaattcttttgtttatgtgaaattgcattaagaatcatatttaattttcttcaaaggtgtctcgtgtatttccctcccccttatgtacacgtgatttatcctatgagctattataagtatcacagagaaaaaaatcatattgtagttctgcatttaggttggtgtgggccttaaagaacattcaacccaattcatttgttgtacagataaggaaacagattcttagtaaagttttgtgtttctcagacccatgcaatagggtactcaatccctttaccttgaaaccctgggtctttctaccattcatctttttttttctgaataataataaaaaaaaaatacacccgcacgtagttagagaagctcatgtgagccacacatgctgatagagcaagaagtcgcaggcagttctgtcaaggactgggaggtaagaagtctcttagcatcatgtgagcaagcctggtgtggttgcctctgctcactcaacagctccatgctcccttggaaacagtgggtctatgaggcttttaaaatgtgatctgtccctgtgtgttcctaataatagttgagtgatgaggttatttaatacgtgaatgatcaaacactgaattaattgtactaacattaataaaaatgtactgaggtattcttgaaaaataatctttcaaaatattcttcaaaaacagtaatgattgaagttttgtgttgtttgctttgtttgaattgtatctgttttgagacagggaatcagtctgtgtagcccaggctctggtggaattcacgatgtaatccaggctgacctcagactcacagagatacgtctgcctctgcctccccagtgctgggattaaaggtgtgcgccatcatgcccagtttcctattccacattttgaagaattcatttattctaaataagtctttgctcaatgaagatggagtgtgtgactcagagaatttgaggtagattagcatacctatcagaattggcttctagaaacctgataatgtatatcactgaaaagtaaatttctgtattttatttaaatgaggatacactgggttatagtgtaaattataattctggctaaaatctcagtatcactgtcctgtataaacaaatggcgtgacaaatgcaaagtaggaaaacaaattcttttgcactaattataggcaaagtagagacagttaaaactctcattcctttgccaaggagtgagtaggtaaggagacgtgccatgttctaagtaaaatttgcatacataatgcacatatttatgtatgcatgtgcttgtatcccctcagccacctttatctttcagactttcctttatggtcctgttaggacttctggccagctgagctcttgcctcttttcttaaaatgtaaagtgaagactcagaaaaaaacatcaagccaacttcagttcctttttacatctgacttcttaccctgaaccttccagttccttgtttagaagagaaaacaaacaaacaaacaaacaaaaacatacatacctttgtttcttagtttacctaaagaaagaatgagaatagttactgccaaaatcaggatgtcctgaagtatgcatattccttgaagagaactgtgctccatgtactaagcagacagaattaaaagtcagttgctcaagtgcaagtagaatttaagactctttaaatacccactaatgcccctctgtaggagggaataaagaatggaatggttgaggggagggatagttcctgttctttgttttgttttcacttactgtagcaagaagtgacacattgaaacattgaagcaagaagtgacacattgaaacattagccactgggctggtactgtacctctgagcctcagttacagaggttaagaggttacaggtgtgcaccactggccaatggtccaatcacttctgtgcggtaaagggggcaggttgatttagacactgttgtacagataaacttgagatcagatgaggtccagagggtataacctgcagtccttggtgatggggcttcctgactccgatagcttatccttgtccaggcatttgagacagcctcagaaagtgccattcctgtgctcttgtaggaaacaaacaaacaaactgattgttttcccaaagcagtaggtgtcattttatactttagttgttgattattcaacagatacaatatatgtacccatgtccctgctaaccagtcttagggattctccactgcctcccttgtcaccctctccagtcttcactacatatgacccagcagcatctcatagcttttatttttcacatcttacagagtttctcccttgaccccacattttaatagagctgttttttttctaatgtcttataagaaaatttgcttatagacccatctctgccttcttccctttgttactgtggtctccagccagcaaactctagccagattttggccttcctcctccactccagctgttactgtcaaagccacatctggagaggaccagcctgacagtgaagagacaggccaaatgctgggtgcaactggagtggagtgaagactgccacctccctaagtctggttaattacctgtctgtcgtctttttatgtcccaagtactgggtatagaaggcatgaccatcctccatgatcattgggcttttaaatgaaccctttcttgtttctcgctccagatagtgagtttctttctgtattttactggattctcttcacctttctgacctgtagatgctgatgtatccaggaagtctaagaacattctttcttctgtaatcacttgctcttttggcatgtcacctggcatggtattagtcaccatccttctctaagtttctgactcagaaccttcttttgcattgtagactcatagccagtccccctcccccattttaaatcatcttccatttggagggcagtcaatatctgaaatttaattgtcagtctccaaaatgcaacccttggtgtttctgtagtcccacctgacttacatccacatactcgaccctcccccttttaaaaatcctcttccctcaggaggacattcaatatctgaaatttaattctcaggctccaaactgcaatcttggtgtttcctccccaccacccaacagtggtctttctgtctcagggtgacgttgatctgtctctaggcttttatgacaacacatgacagttgtccttgacttttctttctttcacacccaatttccaaattgaatgtgtacagcatcttagaattcctcgttgactcagttctcatccgtgtttgttgtagtgaccaaaacaaaacaaaacccccaaaatcattaaaaacagtgtaatgaagggaaggttcgttttggtttgagagagtccagtccatcctggcatgaaaggcatgtcagtgttcggggaatgctggtacatgtggtcgagagcaggaagcagagttctcagccctagggcagtggaagccctcaagctccgttctacagatgttatccaaaaggttgtgcgacctcctccgacagctgcagatcaggtatttaagtacgtgagcctggagaggaccatttcacgtttaatccgtaacaccctgtgctaagtccctctcgttccccagcccagttatcaccctcatgtccttactgggatctcggattctgcctttgctgcccccaaccccgtcagctagagatgggtaagtgaattagatcagacataaagcatcacctggtcccaggcatgaaagctgctcacagtgcccagctcaggcgaggagtaagatgcagaggctctgagggtttgtttgccttggatgctatggatactttggaattcagagcagtaatggatatgcaatctcgagactgtcccccaaaccaccgagtcatgaacttccaaaggacacacttgtgtatgagtcacatcccaactgaaaaattgaccagattacactaatgcttcagtcaaaccctggaatgtgtttccacccagggaccagtggcgtgcaccccttccatgtatgtcccaatcacttttcaaacccaccgctcttctctctaccacgtacacacctgccagccgcaccagcctgtaacaccagcaaactacacttgcctgccctccaggatggcccttctgaacgtgcacataggcttgccctgtgtctccgggtgctttgccaaagtgccttccctaactccccttccccggctctgtcttcattgcttcatactttctactttgtctgttcatatatagcaccttatgcctttcaattatgttactatttgtaggatttcttnnnnnnnnnnnnnnnnnnnncctccctccctccctccttccctctctccttcacttattatttctagatagttatcaggtaacatctcactatggctgaccccaagcttgtgacccacctgcctcagcctcccaagtactggcattaaaagtgtgcttgaccacaccaagctaaacattagtttcttttttttatttattttattttattattattatttattatttttatttatttatttatttggggggggttgtttcaagacagggtttctctgtgtagccccggctgtcctggaactcactttgtagagcaggctggcctccaactcagaaatctgcctgcctctgcctcccgagtgctgggattgaaggtgtgcccaccacgcccggcttaaacattagtttcttaaaggcagtcgattttatctgtgctctgggctgatccatgatcactgctgaagtgctttgattgaagtgaattcccccacaaacgcgtgtctgtagctctgctctgggagctacagctatctcagaaccttttcatcagaaaagaatcatagtgaatagattatagtggcatgttcagaatcttattttaaagatagtaaaattcaagtagcctttacaaaatgaactaagtttatatgagggaggctgcgcagaaaataaaatagcctttcattcgcttttcttcagcttctgtgatataacagagctaacatttaaatagattaaaaatctgttttttcccatcagcgtttctcctttgagttgggcaaaatgcttacggtagcatgaaagagctgaaaaaggcagtgccccgtggcatggagcagtgggtgccatggcttttactacagcagagcaaacacacattacaaaagtctgattacctagctgtggggtaagctgcctggagagcgcaaagcttcacacggcacagtgtggattgaaggaaggccgctgtacagcccagaaaggctgctttcatggagaacaagggtagggcaaaatttatgcactgttcgtaggtggaaatcataaacccacccctgttatgtttaaagttaacaccaccttaggcaagaagcaggcaacactctcaggccttgtgtaaatagacatgcagaagacagcactgccttctggctggctgttgcttaaaaaagtaaattcgtgaggcaaaaagaaagtagatgatatgcatgtataaatttgcttatcttgtctgcctaggttggctataaaatgtaaatagacaagagcggagtcctcgttacagttattttaaagaggattaccaagaaaactgatagggagaactcagaaaaatcccctctcacccctgaggatcagttagttacccatgggaaaagaagtctccctaggaggtggctacgcagagccacgtggctttctctgtattataaaagtagttctaaattttgcactggacttgtgcaaggtctttgtcattttctttaatggcttttggtatctcaccagttggataaaggaatggggtttgtaaggagaatgcagtgctcctcaaagctgcccaccaccggcaggcagcctgcaagactcagtgcagaggccaggggccagatgcccgagctgaggactggaggcgggtgggccggttcatgtgtgagcctgctgactgctgtcactagggttctctgccaccctgcctgggctctctttaggtggattttgaaagcagatgttagaatgtctatttctaaaaggggagacatatttctgcattattttatgcaatattactgacacattttgagccaggatgttatgaagcttattttaataatgttttatgaaaataatgttttttaaaatttaatacttaatactaataaatagatatggcctatttgaaaatacatatatgtccttgtaagttggctgaggactttgagagatattgttcattattttctgaaagactcattttctgcaggactgcatgtaaaatcggcttcctttgtaagagtctgcagaaatgcttgctccctgccagcccttcacacccatcagctggaagacacacgtgtggagcctcagagcgtggggttttatcattgtatggcatgcgcccgcctctcttcatgctgtgcttctggtgctgggacctgtcttctcagctgtgggctctctctcatccttaccactcaatatggtggataaagaaatacacgttatcccatttcacagatttacccctggagcagcacatgaatggatgatttaggacagcgacaacatcgctgctccctttaaaatgaaattatgatcaacaggagtttggtttgcatttgtgtgccgttctcccttcaccctctctccgcctcgttcttatcacatgacttttgggaaggaaatcgtcttttccactaggatgttcttgagtttggatgttttggggagtccagacagtgagattcctgtatcatgatctcgtcttacacttcttacaggtgtgaacttccaggctccaacctcaagtcccagcagcaggagtcctgggcagagaggctaggaattagcattgttcataagcatcccaggttcgccctattcacatgggggccacctttactttttgttttcagtatcctaatgcgggctgtccttgttcctcaatctctgtggcttcacaatgttattattctcctttgcttttctgatttgcttggttatcttatctgcttggaagttggtatactttttactctaatgaatagttaacatttttacaaaattaaaactaaccttgttgggaatggagagatgtctcagtagttgggatcgttttgtttgtctttctagagggtttcgagtcaattcctagctttcacatggtggctggccccgcctataactccggtttcaggaaatcaataccctcctctgacttcctgggccaccaagcatgcacatgttacagagacatacatgcaagccaagcacatacatttattttaccttagaaaatactaatattaccactcatggcatagcagaccctgcatggagtttcctcttttgtttttctaggtgatagtaaagcatttttaggctccaatgtatgtaagcaacagaaccttggatcccttgggaacgtgcgctgagagttcacagctgttccatctccgtttagcactgcgcacgtctgttccgggtgatcggcaggattgagtagcattggactttcatgacagagactgtagaaagactgagattctcttacattcagttcagccacatttccatggcgtttaccgatattgaaattgcatgaagaaaggttttcctgaacaaaattgtctgtattgcacaatcatgctattttttttttaaacaaataatggtagttttttagaaaagaagatatcttcttacacaccctctgggtttaagcagatttggagacagtttgagtaatgtcaataaatgtagttgaatggctcttggtcagaagttctgtgttggggggggtggctggagagatggctctgcagctaagagagttgattgttcttccaaagggctgggggtcagttcatggtgtcaccgggatggaggctcacagctccagttccagggactctgaggctttcttctggggtggggcatagacccagacagggcaaaacacctgtatgcacatttctaaaacgaaaattaaataaaaaaaacaaaccaacagcaagccctctgtgtatgtaggattgagtattccagtgaatcaggtgatgctctgctgactactttcctcgggtccttttaacaagccagtagtaaacactgaaccattaactatgtcagggtttctgatccttatctaagcgctgctgccagttctctgtaactcatggttcctggttgtctgaataccccctttgctcattaaatgtaagagtcgtagcatggggaggagttctatgctgcctgggtcccccactgcacagacacatatacaaaagcaatttttccaaaaggattgcctctggataaggggttgctgacctgtccttctgatagatgggcatcgtgtagttcaacactacctttccacatgcacacaagtgctcttccgaggaagttctcctgtaaaatgacatcttatcgccctaaagatattgtttctatattacaaggttatgaatcagaacagcagtaaaatacactgtaaactctgtataccagttagtatcgcctctttttatttactggggagatgggtactgtctgtagaaaaccccttgtaaagatagatcccagccaaatttatcatgtaagtgaagtaagagcttgccagtggattagtctgagtccccagagtcctgctcttttggatactttaaattgtcctgttttaatcaaaaagttaatctaccttttagttctaaaatcaggtatgtgtgaagataatgcttagtgtattcagactttcagactgatggctaagccccatattgtcattcttttcttatgacaaggacatctttctgatagaactaattaaagtagatttatttggctaaggaagttaagtttagtccttgtggtaatacaccatttaacattacaaggtgtctcagacttaagtgagtcatgttgaattcttcacttagtagacaaaatccatctttcatggtctacagtgtatgtgtggatgtacatgcttatgtgtgtgtgtgtgtgtgcgtgcatgagtctgtatatagtgtgtatctgtttcaccaatctctgggtttaagtataactattccaataataatacaggattctagatataacatgatctgttgtacttattaatagtctgacaggtctctctcaccaccaaatgaaatttcactgctattttttaaacctgtcactgtatcttatgcaagataagtaaattcttatgcaacaggaaataaagctattgcttagcaaatcaaaatgcaattaagaaaataagtccacactttgggtctcagtattggttaatatcactgtgttggaatcatatccaattatatttaacttttatctcgcatcctgaattctattaccatttttggacaatgaccttcttgaagactctaggaaaacctagctcttactcttcaaccacacaggtttaggatccaagaaacagtgtgtaagaatgctattgcccctgaattcattttaagaaagagagacactttcttggtcaccttccaacagattgaccaggcccttttctttagacctatgctcttccagttataaaagtcaacattgacacacattgttcagtagcacaggctgttatttggtaacctatgttgtccacctcacagggctggtcttcctgtaggactcttgctcggtgaactacaggaggattcaatgggaaaccatagcccagaaaacaacccaagatagacacatagctgcagattcctgggcctggctgtgaatccgtctgcccagagctcactgcagcaaacagtgaaggagctgtctattcatttgacttggaaaacatttttttttccacttaaattcttaacagtaacatgccttcaaccgttagtgagtttatttagccgtgagatacacattactgaaaatgaggctatcttatacaaagcattttttcagtaatagactccttggagggctaatttataaccagctcttgagacttcttaccatcttgtatttgttggccaaggctctagaaagcactgtatccatggcttaattcttgcttggtcttcctttgctgtgggggactgttgcttccttacacatcttcctcacagtttttgttttgttttgttgttttgtagggtctttctttctttctttctttctttctttctttctttctttctttctttctttctttctttcctgtctttttgtcagtggtcccaagtcataagataatacttacataaaatgatacactacttctagaaataaagaatataacctagaagtcatagttttgatgtcgttgcttttaagacatacacaaatgtaatagattatgctggctaatgggctaagcccctggcatagcaggattacagagactgtcaagacttctttgaagggctaaaccatctatccaccccacccacccgtatcccagttctgttctcggaaccctgggcagtccagaatctctaaatgtaatcccttcactgggcagaggggcttctctgattaaggacaagagtaccnnnnnnnnnnnnnnnnnnnnnnnnnnnnnnnnnnnnnnnnnnnnnnnnnnnnnnnnnnnnnnnnnnnnnnnnnnnnnnnnnnnnnnnnnnnnnnnnnnnnnnnnnnnnnnnnnnnnnnnnnnnnnnnnnnnnnnnnnnnnnnnnnnnnnnnnnnnnncagtttgctatcccaaaaccttcttacctggcaagttgtcatttgtagtaaacagggttcactgtaggtaagactgttgttaccacctctccacacacacacacacacacacacacacacacgcatatacacccaaggcagcatcttacacagcgccttcaagcactgtgaaaactgccagcctagagaaaactttcctcacagttccaacttgattcttctatattttgcaacctacgtgtgtggtgtagtgtcttatgtacttcatatgggtaaccaagaggaatggcgtgagcctgcattatttgtggggcattttggggtttttctttccaacagctaataaagatgtgtctagaaccagtaatatctaggcacgcagaacatctctatcataacttattttttaaacgtatgtctttaattagcttaacaactagtaggtttctgtttgggtttttcctcatacagtctttgtttagagtaacactccctcttgcttccatcagctctcactcccatcctgcttaaacctctctttccagtgattcccttctccactttcatgccatccgtgatctgctatctcccatctctttagacacattcaacacctggcccctgccccccacccaaggctgaggcaagtcagaaccacagaggggcaggaatacagtccttgacaactggagaaacaaaagctggaatgtttgaatattctagattctcttgtatttgaaaggttttgaaaactcactggtaatttaatgtttggggacccagaagaacttcagagaagccatttgggaattctttatccagttagtcgatcaaaaggaaattagaatattgacaaaagagaacacacaggcattaattgctgatatttttctttacattaattcgtgaccaaagggccttcatgtatattcccaaagagaatgccgcatatttgcatttcctattgtgacataaattacagcatgggctgaggtagcaccatccgtgcagtaggactattatcaccgtcatagagaacagaaagtgggaaatattcatgtttgtcggtgtcgaagtaagcctgccatttcaagtctattaattgcagtagaattgagcgaatttttggggactaacactataattaccaagatgaaagtgagtattcaaaggatcgttcagaatgcaggctcagtaaactaagctcgtgttttgcgcccctttgtcctagcagactggaagcgggggcttgggccaagtttgcttgtgatttctggattgtttatgagttgttaaaggtgtcccggcccactagtcattcctttgtctctgtcttccctttaaccagctttagtctctccatagtgctttcaaaggaaaaggctctgaatgcttgtgagtgcttgtgagccgtagagaagagcggtacatcagaaacagccacggggactgtggtctccttacctgccattgttaactccctgactccaggtcggttctggtggagtccataaccacctcattggttattcatagaacctgttgctgtccccgtctcgggtggctgcgtggccttccatgctgtgctgtctaaggatccactactccaagctcttaggcccgaggtatttcagacatgaggatagatttttcaaacttttaaatatttgcctatgtataaccacatcttgtagatgaagcccaaatctaatcttcagattcatttatgtttcatagtcactttacagacatagcctggaggcagtttcatacagtgtttccattgtcgcgtgccggaaacagatcttgaagtttcagtgtggtatttccagcttcctgacagtgcttgaaaggattttgaatttggagcagttctgactttagattttcagattaggaatgctcaacttgggagctttttgtggttaactttaaaatagttccatcttcatttagacttttggagactaccgaaaagaccgtgttgctcagtgaaggagcacagccttagggataaggcaggtcccatgaccctgtccctcagcaattcctgcaagtctggaatttcagcaatccagtcttcattgtactcagaccccgggttccatggcctgctgagctacagaaatagacctagaccagcctctcaggctggggcaagtgacattttgtccattatgttttagggctagttcatcagcctcttatacaattgttggagaatcgaaagcagaatggtgggttttgcaactacaataggcaggaagtgccagtagggggtggagtggggctgaggctggggagaggagagtcttggctaactgtagaccagctaaccacagtgggcatcatgtatttatctgtttccttggagctagagggggtccctttttctgctcccactcaggctggaaggtggtgtaaaaataagaagaaagtatgctaaggaagggtgggcagccaagaaggttggtctaagcttccatccgtgtgggtgactccatgatacctcctcttcaactttgcaggtttcatccttgtgccctttgatgctgcctacgaggtccacccctgcacactgctgcaaactcccgaggaaaggggaaccatgctaattctgtccttgggctcacactcagagccccaggctgatcgatgaattatagttcttttgccaagaccttttttctttcctggaagttggtgatggctatgtccaacagtgtatgaggactccatagcaaatgtgtattttttttcaaggaatggctcttaggagctcccaaatgcctatctcttctgtcaagttgctggtctgtgttgacctagcatccattgctgaacaaaccctgtactagtgcagggttgacatccctgtgacccctttgtggggcatcagttgtattcactgcaggccttgaaatcttctctctaaatagtcttagctcttctaaaatgtcttccataaaacactcattctaggtatagatgattcttcagagaatttattagatcacttttaggttatgccacagtggcgacacatagctttccgggacgctattgagacacattatttgcaacccattttcaaaagcgaagaatattaaagaggaggaaaaaccagcctgcacctcccgcgggggcttgtatttcataggtgagtgtctcacacttgacaggagagcaacatctagtttgtttatgtattttcctttggattccgcatgctatgtattcttatttttaatcaacaagccctctattatggtaggtgcacagttggtgcttcatttctgattgtgttgttttgttccgttctcttaaactccatttggtatgcaggaattcattcttaattatatattataggctttcccctgacttgaaaccatgactccttttgtttgaatatgttaaaaaaaaaataaaccccagactgcaaaaaaagaggtgatttttttttttcaaaattactgcagcccacattttccatctcaagtcttaatttaatcacagttctcacggaaatgaacctaggcagtcttaattgagtgcctctgtgcctgtggaatacttttcctctgttggcataccaaaattgaaattcgtggagcttggagtttttaacccgcaaagattctgagccaccgcttagttgatagcccgccctcgtcctttttactctgtgctttgactccagggagggctgcttgcttctctaggctttcgccatcatggagaggtttcactcttagagcccaaggctccagcctctcctacacacggacttgacttggcctggacaaatacaatttttggaattgattgccggcatttgaaaactaggacagatagttgatggaggaacacagctttgaccggcctcagaaaacagaggagctccaagtgcaagtgggccaaccttctgcctctcctcacccatgtgcagtgctccttctggacccccagagacaactctgcagtcttggagagtgcattggtgctaactggtgccatcccggtctctttctacacacaaagcatgccattcacacagggttagaatacttttagagcaagagccaagtgtggctgtttggatgatgaggctccagtgtgagagtgctgctcagtagcttgatgatgatcccgctttacctcagtgggagttctcagcattcccagacaacatctgggttagaagaatatcagcgcgggccacgtagcccaactttggaagccggtgtatagcagactgttggactatggagttctaagctgtgaagctgtccccctgaagagagggaagacctgtgtctcgtgaggattgtttcgaaatatccaccatgagggccactcctcttctcacagacccttggtgagccattaatgtgaaagatgtgttcactctgggatccggatgtgttcccatcctaaaatggaaaactgccgtattcacctacacacagaagccacacatcttcatactgatttggcagtgacctgacatgctgttctagcttgcggatgcttatggcatcaccataatgtccttcattgctcctggtgcttcttatttgaccaaaccccaagactcttccactcccattagacactcactttataactttaccttcctgtttctgctcaggtggaccatcattaacccaggtcagcatccacccccatcccgacttttgagtggtggccctggctgagatattccagtgttagtagcaatacaggcagacatagccattatactaatgatctctccgggttttttttttttttttttgtttgtttgtttgtttttctaggatgacttaaatgtctgtcatgataacttccatcactagggaagtgtatacagcagaatacttatattttttttcagtaatagtttacttggtcattatactatttaaataatcaaaatgattgggtggtttagcaaactttaaaggtttttaaagtctgtcaaacatgatcgcacacaaacatttgttaccttgacacctatgtaatctccagtgaccttactcgaaagaaagcccatggaagaccttaccatggaaccacatcaccacccagattactcatgtgccgtcgccattttagaccccagttgaacaccgtagctcagagtgttacatatcgaaaacatcacttctctgtctttgctgtgagggagaggtcacgtgagtgaactgagtaactttccatgtgcgaagggggttttgctggctctgttgactgtttcctaggacactaggatgataaaatatttattcaataaatatttggtagctgaatgaatgaattactaacttgactccaacacacaattgcgcatattataaagatatacggggccgtttttttgctattggattttgtaggtcttaatcaaattgctggcatttactagcagcaaacgttggggttcacatttgaactgtggagatttatagactaagcagggtaggcactcagagtttctaccttccagaattatttctcagaagccagaagttagatgtgcaatcgttttttactgcattagccaggcaagaatgaattcatcatttttatctcaccatttctcattaaaagactaatgccaatatctcccacagaacagagccaactttcagctggtgttaaagtaagaacctaggtgtacatttgaacagcacacagaggacctatggcagattaactccttggtaatggaaaatatatacgtttgagtgacctccagccagccagaaataaatcctgtgcataatcttgccagcctgtcagttgaccaggaacagggccctcatttgtcttaggactgcctgcagagcaggtgtccggccctggcagtctcctctggggttgttctaggaaactgcatcttagataagctgatgctgaaagtatgtcactgtcatcctttgtcattaaaggagtactgcctgacctgtatatgtggtggggaggagttctcctctgtttagcctctgatcgctgtttagttggtctttgaacttccttttgatttgttcttcagcttctgattctttgcaccttttcagtcaggcctggcgcttttacacgaggctttctctgcatgtcagcaagaactctgagtgcgctgtcaggaaggctgtagagtgttctgtgtacacctggctaggcaaccttgatcctgagtctcctctctttagggccctgtgtatatagctgagactctaatgggtgattgatgtgttttcttttggcttcacattttactgcaattagcaaaacttcctgtctataatgtatgtgacgcaaataacccttaattggactaaagtgattatttcttttttacttttgtaaaaaaaaatctctctctctctctctctctctctctctctctctctctctctctctctctctcccttctctctctgtgtgttgtgaaaaattgcaaacctaacattctttggagtttctctgatgatctgcactgagagtccgaatctttggcttggctccactacccccatcatccaccgccctctagctgtccccacgagaaactgcttttgggttaaaacaaccttctatttaatgtcttggatttgtgtttcttcttgctgttaaaaaagagagagagagactaaatcagtacaactggctccttggggacaataaattggaagcgttgggcagcagcaagattgccactagaaccagtccacaggatcatatatccttggtgtcgttcattcgtgggtaaaaccgtaggccatggctgactgtttgttaccatggctactcttcttgtaaaacacaacccataatcaagcaatcaagtagcctatctgctcatccatctcctccggaagccttctagaggcatttttctcaatatccccaaatactgtcattcttagggtggtttgaagcattcacatgatctcttaggatttttatatacaaattcctaaaattgatgttaaaaccacatcacttgtgccacagtcatctatcctaatggtggtttccctctcgtgtgcataagataaaggcttcacctaaggaatttaagatttgttcttccctagagcaggaaaaaaaagtgtcttttttcatgaaaacaagaaaaagacacagaagtagcaacaagaaagtaatccctagagcagcttccctttcctagagctttaccagagccggctgtcagtctggagttattgaagggtttggaaaccctgggctgaaaggccccaaaagcaaaggagtagtgctttatgttggcaattcttagttccggttctgtctaaaatgttcataggtggagaacatggaggtctccccaccccaccacagctcaccaaagagatctccccgctcctgactgtgtgtcaggagcagggtcagctagtatgtgagacagaattcacactaactctggctctttgatataggaccctatgtgcagggaggggtcccggtagtgtctctcaaatcctgggtacctgagttgctgaccttgaggtacatttagcttgctttaagaatgtaaatgtctctctgagaggtagcaccaattctaagtggccctgcaagtgctgggagctaatctgcaggctttaaagtcctgtgtaggtctcacaggctgtgtgactttgggcaagttggtgtgtctttctgtgtttccatttccatcacaaaaagggggacaatgctagtgcagactccacatccacattgtagctgcaagaatttaagccccagcaattgtttattgataatctttaataatagttttatgtattctgaaaaaaaatattattccatcatacaaaattcctcaatgacagaatgaagaggtgttagtttgcacactttcccaacaagttgtcatcagcagctgataaaataactgaggctctcactgaggaagcataggggagcgtgtgggagccgttaggaggtgtcacttcctgggtggcattcctcacgggcatccgagtgaccggctggctttaactccatcaccaggcagctgtgagcacagtacatcaaagagagaaaactggctgcctaaaatggtgtctcaaaactgacatgttttgataatgttcatgatagtctatggaactctctggttaactttcctgcacacgcgtcatacatagtcaccgtgactgctatgaagaggaacggtgtgatcagagtgcaagaagtggctgcacagtgtatgtagacttgagtgttgttctctgcagtggtaaatctaagtccgctcaccctccccccacacactcagtgtatagggttacgtgacaagcctgagcaagggccaggtgacagaggtattcattttatagtagaactccacgagctgaaacctgcatttttccttttcttttctcttcttttcttttctcttctcttctcttctcttctcttctcttctcttctcttcttttcttttcttttcttttcctttctttttttctgtcttttgaaccatggatactcttgagttgtagctcacagcttttcggttggttttcttccttccttcctttcccagcaggaagggagagccagatcagcccagagttaatgagaacttgctgccttaaatagcatcagaataagcagctcagacttgatctctctccggctacacacacagcccacagccctggttgcccttttcactgctgtcaaacattcttctgatttttattcctcagtgcattattgatgatcatccccaagtcagtatctcttccctggctcctcttctgtgtggactgcctgtgtcgtctcttcatattgagcctcattactgcacctggcatgagcctcctgagccacatcctcccaccacagcatccgcactagcaacagctctgtttacctgagtactgaactgccagaacctcccattgcaacctagtgaacctagtggtattccttttttataagtgatgcatttgcttgtgtgtgtgtgtgtgtttgtgtgtgtgtctgtgtttgtgtgtgtgcgtgtgtgtttattccccaaatcagtgtgattgccctcactttctcctcttactagttgtgaaaagtctctctctctctctctctctctgtgtgtgtgtgtgtgtgtgtgtgtgtgtgtgtgtgtgtgtgtgtaggatgtctaaggctgatgcaggagaatggtgttttctgtctgttatagcagtaatgaaactctgaaattcagttttattatgtttctgatgtgtgtgaggagcctctggtatctgatcctgatgaaacacatcatagtgtttctgaaagttcagccaccccctagagaagttctgatatcataacaaaagttgtgataattagcccgccctgtgtgtgtgtgtgtgtgtgtgtgtgtgtgtgtgtgtgtgttacttactagcattaatgtatgcacctgtgcatacaggctcacatgccaaagggtatttttgtatatggaagccttggtttgaccacacatgtctttcagttgttctatacttttatttattttggagacaggtctcttgctgtccagagttcatgaactgactagctaggtgtgttgtccagtgtgttttagggatgtacctgtccctctgcccctactctgagctctgaggtgacagatgtctgccttcacactcagctttcctgtagcttcttggaggatccaaactcacgtcttcagaggactacttccaagacttggttctctcataatgtgtagatttcatggattgaactcggattgtcaagtttgccaagtgccattgcccactgagctatctgggtgggcttgagagtagcccatccttatgcattatggttggtgctgagtggatatctccatttcctaaggcatagaaacagatatgctattaacagttattctaatatggattctttaagactgtgcattggattactatttagataaccactcctccttcacacacactatttaatgttgtgtattcaccaagaattcaataagggaagcttgtggtttcgtttcagatgcactgttgggtaatcaggttgtaacagtgtactgtggaaaggcgtaatgaaggaagattggaacttccctctatcgacaatttcaaatgtcagataagcagctttctccagatcacaaatgaggtacacacagtccagcatggagacaaaaggactgatgtcattgattccagatggctcttccatcatgaggacacattagagctgtccttcctctgctacatgtattcaacagagaagcaactcagaagttctttcccaagaagaatccttttcttctgtagttgtttagtactcccaacacacacacacacacacacacacacacacacacacacacacacacacacttccaaacctcctgcattgttgttaacacccagggattctcacatgctgaacctgctttggagctgtgtagatggagcccaggctcaagtacaggaacttcctctaggctggactgccagcctacacttgtagccacttagctgttctctattgccttcaagataagagaacagtatcaagaggggggggaggggaagatgccctgatagaagatttttctgttcacttaagatagtgaacataatgaagttcagtgatttctccattaacaaatccggttaccccaactatgctgtttcattagggtgattgtcctgtgcttaggggtgtctaaggatatatcatgcaggactgtgtgtgagagagagcctgcagatgaggattttaggacccactttaatttccattttttaaaaaaatattagattctgtgtatgaatgaaaacacatgatgtattttgtgtctggcttactggatgcagtgtgatgggctttagttctagcagtcttcctaatggcatggcttcatccttctttggctgaataatactctgttgtgagtatatatatcatatatccattcatctgttgatagatccaaaccactgggaaaagtgctaccataaaagagtgaatcagaaggtgtgtcaggcacgctcactccacctcctttccgttatgcacctaggaggggtctgagctgtaccacggcatagctctgtttgcaggcttttgaggaacctccttgttgttttccatggtggctgtcctcatttacatacccaccagcaatgtggaagaaccccaccctaccccacccctaaatgggccagcatttgtcattggcagtttttgtttattaatatcaattctgaatgggagaaagtgggatttcaggtccttctgatccatctttctcttgtgagttaaaggtacttagcatagtttatgtatttactgcccatttgtacttccggttttgagatctgttcatgtttgtgtgtcttggagacaagaccattgtaagaggaaacatttttctgcaatccttagctctcgcactctgttggttgtctccttggctgtgcaggtgcttctgaatttgatgtaaatccacatgccaacccttgcttctttttctgatttgagttctattctggaaaccattgtttgcttcaatggcttgaaacacttccatgatggttttactctggcgatgtcaggagttgaggtcttaggtttactctctggttccctttgagttgacttttactcactgagaggtttaatttgtctcagcccagtattctccatgcagacactccctttacgcagcacccactgttgaagaagagatcttcttggcaacatgagttcttgatgcctgactcaggaatcagttgactgtagatgtgtttatttctgtggcttctatctactcctatgttggttttgggtgctttgtttattcaccctctcccccaaattaaccctgcagattttgctactgcagtatgtttcaaaatgagatattgtgatgagagtccatcattacccttccaggtcaggactgtgttactcagaatctttcacgcttactcacaaattttaagatttttttttcagttgggtgttggggtccagcctcgacacagtatcagagttctcaactgggagcagggatatctgcaaggcgcataataaatgtacatagactacttttggggtacaagctgacagacaatttttcaaagctttaagtttctctctcttctctgtcattctctgctctctttctctcttgctcattcgctcgcttgaggctgcacacactctgcatgatcttgggctctctgctttcctcctgtactcttttctttccttgaactctcacacgcatacacacctctgtgcattcgcctttcactatcacacacacacacacacacacacacacacacctcacacacacaccacatgcactctcctttcactcacatacatactctccatacacgcctcacattctctgttcactcactcctcaaatgctcttctcatgctcactcgcatttttcttgccccagtcttttattgatactccaaaggcaggttaaaaaaaacacattgtataatcattgtcaaataaaattcaagagaataaccacttcccacaaagaatcaagaatttcaattgttccccaaagtttcaggcttccctattcccaggcctgtagccaaagtaataataattgcaaacttatcattatttaaactttaacttattatacttcagagctcagagctccgaggccagctacttgcattttcttgtgaagctctaatgataaatgacatgggcaaagctgccaggcagtggccggaaagaatcaagttaacccttaactcaatagttccgctagctttctgcttctgcacattgcacacaatgattctcctaagagtcccggtgttttgacttagttttactaatatatgattttacatattctatactttgcttatccaggaaccattctcaaatttgtgctaaacttatttcataactaaaatagtttttttctttctttcttagatcccaatgttggctctatttaatttcttcaaactttctttgcaaatcaagcattaacctggaactaccattgtgcagttattacattgtttctaagatgagaacacgcagcatgcacctggaccattaggactgtgctctgctgtgccccatgcctcaatttttaattgtttacgaatcaatacatcaagaaaaatctagtttcacagaattcaccagagtagaaggagaaagaagtaagaaagtcagttataactgaataattatgcacaccaaggccaactgaaaaacagtcacgcacgaatgaaatctatacagctgttgtccagtactaagattaggagaaatggaaacaactggttttttgttgttgttgttgttgttttttttttttttttttttttttttacaaattgctgccttaggctactgagatgtctccctcccagcctactgcaggaagccccttctttcagatggtgggtcccctggagggatgtgtctcctgctcagggttccagatgacattctttcctacaaggagctgccgcaggctactgagatgtctccatcccggcctactgcaggcagtccctgacattgtatgctgtccccagcagttgggtattgcactgaacttcaaatttgcttttgatagcatagacatttttgttaatactgttgatccatgagagttggggagagggctttccaccttctattgtgtcttcaatttctccagtggcttggtttggtctggtttggtttttggagtcagtctctgtatgtagctctggttgtcctggaactcatcactatgtagaccaggctggctcacagcgatctgcctgcctctgcctcatgagtgctgggattacaggcatgtgtcacacaccaggctcttgttttataatttccatcctcttagttagttgggtttatccatgggggtcctgctttatttccttgctatggttcattgcttagagcttgcttgcaagaggccatcaggaacagcattgctgtcgtgatttcattctcagtgactttgtggttgtttagaaggaaagctactgatgtctgcatgcgtgttttgaatactggtatcttcttgattttatttgtctcttctaagacccttttggtggactcgggaagtttataggtacagaatcatgtaatcaagatcaaggatgatttgactttctattctcctgtttgtattcctcccctcaccccacctgacttttttaggctaaaacatgctatatagatggggcaagggccatgcttctctttttaacctcattttagaggaattgctctcattttctttgtgctgtagatgcttctgttgtgatatggcctttattttttaataagagttggagttttattgtcatagtttagtatataatccatctctacccaattttcagggattgtattatagaatgatgttgaattttatcccaagtgttttctgcacctataaaggtgaccgtgctttttatccttgatcgaacaactgtgctttattacgttaattgatttgcataatttggaccatcctacatgaccaatcaccttgttcatgtcttgtaattatttaaagtgtttttaattttattttctaggattttactgaggacttttacatctctcttaaaagatatttgcctgtggttttgcttgtttttattacttttatgtttctacaatacagttattgtctccctcccggtccccacctcccacagttcctcaccccattcctcctgccccggtcttcaaaaggatgtcctcctcagccctgtcggacctccccactcactgaggcctcaggtctctagaggattaggtacatcttctcccactgaggccagacctggcagtcttctcctgtatatgtgtcaggggtcttgggccagctcatgtatactgcccggttggtagctcagtgtctgagagatctcaggggtctgggatttttatttattgattgattttccttggtcactattttggatttgtattttgtatattgacatataaaaatgttttcaaaatactacgtgtgacctgtggattttacttatttgttttaatatccatttttcttctctaaatttgggttctactttttgtttttgttattgttgttggttttttttttttaaacaggtctgctaagaaaatgactactttatgtctttcttaaaggactgattctgtttcattgattttttttttttgtattgatcttttggtcttatcttatttacttaaggtattatctttattaattctttccatcttaatgttcacgtagctcattcttggtgtttaggttgtttatttgtatgtctcctttatcacaggtatttgtggctgaaaatgtcctcttatcaccgtcctcccacatcccacaggttatagtgtgctgttttcactgtcattggactatgatgtcttgagtttcttctctgacttcttccatgacccctgtgtatattcaacattggattccatctttgtgtgtttgtatatcttctgtagtttctcttgctgctcagttgtgactccaggttcagttacgatgtaataagattaagacattatttgcattgttttgttacaaaggtttgtgacctgaaatgttgtctgttttgaggaaaggtccctgtgctgcttaagaagatgtgtccttcattatttgctagaatattctgcagatattcttttaggtctgtgttgtggttgaactgggatgctgttttgttgttttgccttaatgatctgtctatcagtgaaagtgagcattgaaatgacccactcttactgtcttgggtttctcttcccatatttcctatagtattcattttataaaattgatattccactattcacagttcatacagatatggcctagatgcccactaacagatgaacggataaaacatggcactgtacatagcagtggaattttgttcaaccacagagagggaaattatatcgtgaaactagatggaattggacatccacatactaagctaaaatggcacaaatcagaacgtcaaacctttttcctcttagaatctatgcagccacaaacatataaatataaaatgcacaaacataaatatacatgtgttccctctcagaatctgcagaatgtatggagacacacacaaatataagcatgcgcacacacaggcacacacacacatatatacacactcatatgtatatatatcaggaagaactgtatgcaggggacaaagaagtataaagggaagggaaacccattattttatatattactgtcttagtcagggtttctattcctgcacaaacatcatgaccaagaagcaagttggggaggaaagggtttattcagcttacaattccatactgctgttcatcaccaaaggaagtcaggtctggaactcaagcagatcaggaagcaagagctgattcagaggccatggagggatgttctttactggcttgcctcccctggcttgctcagcctgctctcttatagaacccaagactaccagcccatagatggtcccacccacaaggggcctttcccacttgatcactaattgagaaaatgccttacagttggatctcatggaggcatttcctcaactgaagctcctttctctgtgataactccagctgtgtcaagttgacacaaaactagccagtacaattacctaaaaaaatttcaaagaaaagttaggcttcaaatggttgactaaatcactacatcttcttgatagattatcagtttgaattgactttcttgatcacctaccaattccagtttgggttctcatttcattggctatgagctttttggttataaatatcttatctcaggtcggggtttctaccctgactttgattatttggttcccagataaaaagcacaagacttattatatttatgataagcctttaaaaccctagagctgctgggcagtggtggtgcatgcctttaatcccagcacttgggaggcagaggcaggcagatttctgagtttgaaccagcctggtttgtactaggactatacaacaaatcaataaatgaaacactagagctgggcagatgtctatgcttttatatctacttccttgccagtaaccctaagtcataacttgccacattccatctgaggtgctcttaactctaattagcctgccctaatggctgcattttcatgattcacttaccccatttcatcttctctctccttgtgatccctgcttcagccccaagtccctcagcccctgactacctctcctgctgtgggcatctttattcaccaatcagggataactcggggacaaggctaacatcacttttgttcctgcagattctcttgtccctgggggcaaccaggccccagaggccagtatttaacattacaatacatagcaaaagaccaaacctcaataaacctagttactcttggctttgaatttcatttccactttctctcctttcccttcccagactgggtgtgtctttccattgaggattcttggagcaaatagtttgctctactttttttaaacataaagtaaacaatatacatagggttattgttattgagtaacatattctgagtcctgctattgtactactgtatacatcacatttgatttttgcccaattcttagttgtttatatactcttctagagagatttattcttcccttatttgcctttgtgattgcacttgtcttgttttgtcctttctgtgtcgaagtcactaagtgttgtattagctaatttccttgttgacaaaagaaaggtcattaaggaaggaagatttttatttgggcttgcagtctgagggcattgtccctagtgatttgaaagtcatagtagcaaaaggatgaggcaggaggtcacacgacaagggtagctgggaaagcggagagaaatgaatgttccctctcctccttgtcattcagagcaggaactgacccatggcactatgttgctaacatttgtggtggaacagtgttctgtcttctgttaaacctttccagaaacatcctcataaatgcaggtgtaaatgcatggtggattctgaaaattagttgtcacgtgtcttcagtcatgctgactatggttccctttcagttctaagtgttccggaaagtgtggcttctttgattctgaaggacaattgtgctggatatagtaatctatggtgacatatttttcagcacttcaacgataatattctgtgccatctggcgtttagttccccctaagcaatgtgctattactatggtggcttttctcttctatcagtagcatggactatttctcttgcagctctcagtggtcatccttttgttctgtactttcagttgctgtttatgtgtgatggggaaatgcatatctctgtccattcattgcccagggttgtaatggatttcttcactaaagctagcctgtcatccagggagagtcatgtgaaaaccaagctcccttgataaatttagaggttctaggaacagtgggtttccttctaggaacagtgggcttctcccagaagctatgacactgatctgctctcagctttggagttcttttaggtcttaggctgccctagcatctccacctgtatgtagctatcgcttagcctccatctctcagacttgctcttcctgtatctgagcacatctttctggacctcttctacttggaatgctctcattctcctaataaatttccactcctctttcaggaccttcccttacagtcctactgagagggtaataggaagtttttttgttttgttttgttttgtttttttatgcttctccctttgtgaccatggaagtgtgttttactaatttacaagttttatgagttttgcaggtggcacacaagacagtgtttccaccacttatgtctatatctccccatatccagcagaaatgcctacttctgacaacgcactttgcgtgcatttgtttaatagttgagtgatcatagtatgcatattatgacgtatacctactttagaaagagggcaagcatctcaatagtcagtgacttgaacgtcccatatgaagcctctcactgttctgttcccttcagctgtgcaagttcagcccccaactccaaggcgccaagtgttctgtggtctgctacagagcaactttctcatgacacaatctgaaaggtcttgagtaaacacttcctgaggcttcagatagttaaaaaaacagtagtcattaagatccagaaagatctgagtttgaaggcttgacaaggagcaatcaaataaggcaggagaactgagctcaggtctcacagcgcacatggccaaggatccatgggtttgtcttctaacagtgagtaccaccttctgcagctgcactaggatgtctgagcttctataggatagaacacatttaaacaacaaagatatgatccacctgtgacttctacaagacataaaataagtcagtctccactgaagttggtctcttataaaattcactcttctatctcaaaattaattacagaccccaaaagaacttaaacattgatactagtaaaatgcactgctgagtttatcttcatttatttcttccaacattacttacctacaccttctgagagctagacgcctgttgcctatagtgtgccactcacaagcccattccatctttctgtcccccttcctgtgcttcctcagcctttgcttgtctgagagggcagttttctctgcatttggtgatggcatgggagtagagaacacacagggaagctagaagctcacagctataggctttataacaccacgttgctctggtctgctcttctccatctctgtggccaagattgcagcttcctgaacaagcctttcttcctagccatcatgtactgcctagggagtcttttatctttatattcagctggtgcccactggtgcctggcaggagttgggtgctgaccgatcatggaaaggacaggtgggtgtgctggcaagaatccccagactggctactcttgtcagtaggctgaccgtaccaatttatcatccacactagggcatttgggaaggacatggtgagcaggcagccctgggacactgccatacagacactccttcagcggctgcacttgggcgcttctggagcagcaagtggctgtggtctcgcgaaggagatgctgaagcttctcaggcagcttgcattccctggactttgaggaacccaggatagtagctggaatacacatgcagattactgggcaccttttataggaagcattctttagaggtttgtttgattgttttgttttgttttgttttgtttttcgtgacagggtttctctgtgtagccctggctggcctgaaactcactttgtagatcaggctggcctggaactcagaaatccacctgcctctgcctcccaagtgctgggattaaaggcgtgcgccaccaccacccggctataggaagcattcttagtgcttggggtttttttgtttgtttgtttgtttgttttgtttgttttttaaaattgtatgtgtactttttaaaacatactgacatcaaaaagtttaaatgatgattattaattaagaaaataaacagtcaattacttaggccatacaaccagcaaaagtaaccttgtcaagatccttcctctgtgttctgtgtaaggactggaacggtttaatgtctgcagtttgtttcttgacctctagttacacagttccaccaactggtgaacttcagtttcctgtgcttcagtccctgcagtgggtctaacccactacacctactgctacagcagatcgggcagggacatttgaattggctgtttctctctgtgtcaccctaatagggttggctactctccaccaggattccctttgtgtttgcagcaaggcccctggatagaggtgtgatttagtcacgagatgggagagggtcctttcaattctctctcacactttattagataaagttcaagcaggatgtacaaagtaaactaccatagccaccccaggttatattcctgtaacaaatgaaaaacaatttgttttcaatgctgaaagtagaagacagagattaaggtgaaaacggcaccgacaaaaagctgtgaggttgttgatcactgcgttccattcctcttttattaaaaaaatattattagtttatttatttatttatttatattccaagtgttgccctctttctggtccctcccccaggagttcttcatcccctcctccaccaccctttgcttctgagagggtgctcccccacccatcctcccactcccacctcacccccttccccgggggtatcatatttagtgcatcttttcccactaggctagacaagcagtcctctgctacatatgtagcaggggccacagaccagatcatgtatgcactttggttggtggcttagtccctgggagctctgagggatccaggtcagttgacactgttgctcctcctatggagttgcagtccccttcagctcctgcagtccttcccccaactcttccatagggagctccaacctcagtccaatggttggctgtaagtatctgaaaatccccaacagtgggaagatagaacctaaggagaccacctccagtagatagacatggcccccacttgaggcattgggccacctacccatctcccaaattcttgactcagaattgttactgtttaaaggaaatttagggacaaaaatggggcagagaccaaagaaaatgccatcaagagaccaacccaacttgggatccatcccatgcacagacaccaaactcggacactattactgatgtcaccgttgtgcttgcagacaggagcctggcatggctgtcctctgaaagattctaccagcagctgactgagacagatgcagatacttacatccattcctctttcatagtctgcaggtcctctctccagctcttcttataacagtgatgtgaaaatctgtgcaaaaatgccccactgctttatcgatgtgttaggaatcccatagagcatggccaatccacttagtcatatactacaggatcaaaatgtgattgaaggatattgggggcaggaggggctgtggtttggggaagagggagcactactgaagggatgagccaggcattggctcatgagccagcttcagccaactacacgattaagcacatgctggactttggctctttctctcccaccccaccatttctttgtttatttttctggcaagactcttggcaactgaagccatgacttgatttacatttcagtacacattccataactctataacttgtggacagatagataagagaggcttggcaactggccatgagtttcactagtgtaagatatgaagaagtctcctattgaatattagattaggattatatttcggattaatcatttgcttatgtcatagcataagtttgaggtctctgttaattctttaattaattggatttgtttattattattattattattataaaagtgaatttagaggctagaaagatggctcaggagttaagagtactggctgctcttgcagagaacctgagttcagttggcagcactcacatgatgcttcacaactgtccagaactccagttacagggcatctgatgccctcttccgacctatattggcattaagtgtggacatgacacacagactaacatgtaggcaaacacactcagacagatgaaattttttaaaagtgaactcagtgtttctctgaattttacactgtctgtgacgtgtatttcagaggctttggaataggtggcaaatgaagaagccagtctcccataatgtgaagattaagtggacctcctcctagaggcagagtcacccataacatgaagattaagtggacatcctcctagaggcagaggcacacattcaacaaaggctggggcctcagccgggaggctagccacaactgtaagatgtcttccttctggaaggctgtggccacatgctaagcagagtcccctggatttccctgggctttgtctgggcagcagatggcattgcttcagtccactgcatcacctggaagttagatagcattcctcatagcagtggagttgctgtctcattaattttaacttatccggagcttttccaggtccagaagtcagaagactgaagctcaagctgtgtgtgggaaatcctccctgtaaaacacatcacagtaaactgagagtgaagataaagggccctgaagtttagcgatgctttccactttcctgtgacatagatatgttgatgggtgcctttctgtagctcaaaggatttgacaaatttgtaatgacaacttttttgttttttttttttgtgctttttattagatattttctttatttacatttcagatgttataccctttcctggtttcccctcagaaaaccccctattccacccccttgccctacaagtctttatacatacatatatatatatatatatatatgtatgtatgtatatatatatatatatatatatatatatataaaatagggtttatcagggcatgggggaggggagttgttataaatgggggggagagagaggaggggaggggaaggnnnnnnnnnnnnnnnnnnnntaatgcttgatttgcaaagaaagtttgaagaaattaaatagagccaacattgggatctaagaaagaaagaaaaaaactattttagttatgaaataagtttagcacaaatttgagaatggttcctggataagcaaagtatagaatatgtaaaatcatatattggtagagggaggagagggagagggagagggagaggggagaggggagaggagaggccagctatcagcatgtggagagagggggtaggggaatgtggagagagggggaagaatataagaaaacaagggcaggagagtaagcgccccctacaactcttaagattggtttagtttttaatatacatagaaagggataatttatcattcggccttgtggatagactcgattggacagcagtttctcttgtttaaatgagtagcatttgcctggaagtcttccctctcagggactgtgagaagattgccatttagacctggggtgtgtgtgtgtgtgtgtgtgtgtgtgcacgcatgtgcatgtcacatgtgtgttaattttattactttttagtgtacaaagtaagttttattataatatttttatatatgtgtcattaaagttcattctagttcatctccctttgtgccttatgcacacatagccctgttagcattcccagaactatgttcatggtctcagactcccatttcggagtccagtcatctagcataattaaattagcactttctgttgacatcagagagctgggaaagcttttctttgtgcctctggatatcaaatttggatagatccctgtgtggaatcccttctccctgtcttctctgtttaactctactcaaattcatgacctgcccactgaaaatccatagtgtaagagaactggggtttctacagcaagcagatgttggggagatttcgaagggcagaggaatgtggtttttctgtacttgtgtagatatgttgccccttttgctaggagccagaggaaggtgttacatgtgccattctatgaagaaacaccattgttttctcaacaaagacaatcaaaactcacttacctatagcaaatgccattctagatagagcactgtagttctaatggggccatggcctttaaagtcttaacctttgcccctctacttattctttttattcactttatatcctaattgcagcccccctctcctcctgggccccaactcacacagcccttcccctctaccctcttcccttcttctttgtgaagggggaggacctcctgggtatcgccctaccctggcacatcaaattacttcaggactaggtgcatcctcttccactgaggtcacgcaaggcagcctggttaagggcccaggatccacaggcaggcaatagagtcagggacacctcttcccacccctgctccagatgttggatgaagaccaagctgcactcctgctgcatatatccagcccatgcttgttctctggttcagtctctgagaagtgggcacacaaagcttcacctaaaatgtagaggcttctaaggctgaaagcccaggctaagatacctacaaaattcttcatactctaggaagcaagggctgatttactgtgtatctcccaagaagaccccctttgtttctcgaagcaaatgagtgggtttatgccattacctcagatgaatgcttgttttgtttgtttgtttactttctcttcatcttcactttgtagaggtaactgtaagtttatttattggtctatcactaccactaacaaaatgaggctacaactgtattgattatacaatttcattattctgcaaatgagcaataacataaatgattattggacactttcattaccacgttgtcagccagtttgtaacattgtaccttcaacacattaaagaaaattcagcatcaaaattccaatattgcagttggattttaaaggatagttaacatataacatatttgataacacagttttgcattgtcaaatgagttcagattttcacaccttgttcatattatactaactggaatttacctgtatctaatggagaattacaggcatatgtctccgttccttttatctcccataaatttcatccttctgtgcatatcactctgtgtactcaagtgtgacacttggttctcctgtaagctcatatttttagtacatgtaagaccctagaatcctcaccaagattttaactgagtgaaaatactaaggcagtagttaatatggccatttctgattttcctccaacatttctttcctcatttttgcactgtctcagagttctgtacagggaggttccttctagggcctactcatgagcagagcctgaaggtgttcacagaaagaaaatgagaagtgtagatttgtatccaggaaagcttggggttgagggtttccaaaatgaacatctgttggggaattaagcaacccaaatgtggaagaatcaagttgttccaactagagaaaagactctcatcaaagcgagctttcaagaagagaagggtcatctagctttgaagccccagggccttcttactttcatgaccagtcactggatgcaggaacgttttgggaagagccctgacctgggctgagcctgctctctggactcggggaactcccaaagagagacttaagttcagagttatttgctaacagtagccccagaacatggagaacagccgcctctgtcttcattctcttctcttcagtgcagaggggtgacgggagatggagcagactgctcaagtgggctgtggagacccaatggagaccctgatttttattctgagctgacgtcgatcaaacagatttcaacagaacattggcagggtcagaatacttgttacagggctcacctgaccgacagagagttctgggttagcatccctgctcaaagctgtattttacctcattgaggcagaagtgaaatctcatttctggaaaaaaaaaaaatgaaggaacatggccagttttgaaaaacatagattagtgtgtgatacctgatactcagttgagatgagtcaagagttcattcattttcatttggtttgggaaacaattgggattatggaaacatacttgtagacattcttctaaaataagaatacttcttctatcagatgctcttagcctgggcttattcagagtcttgtattcgttcaaaatggcatgctagtgttcatgtgcgcgattctagggagaaagtctgcattgtactcactaagtgcagctatgaacaaagatctcagaaatccacatgttagtttcatgtgctcaacatagattgcattcactctcaggcattgggaaaatagcagcaaacatgacactactttttaaaaaactcatccagaggtttaagtgatatagaaaaaaatcctgagtaaacagatagaaaatgaggctatttctgtgaaggagtgtgatagctcagctaggggaatttgtgtagaaagagaaaaagagtgggacagcctcagaggagggcttctccttgggtagaggcagcagcaggttcaggggttcatggtaggagcctactctgaatgcttgaagtcaatatggaggctgtttgtgactagaacctgcccagagagaacagtgggagatcaggccatgggtagagctggggtcttggcttcaaggattgtatagactttgcaggggccgtatactgatctagaaagctataaaaggactttaaacataaaagtggtaccaactggtatatggtaacagatgtagccaattactgacagaggctggcttctggggccaaggctggaaacagacagaccatcagctctcatgatgatggtaagcagagatgaccacagcctcatgggggctgcagcagaggtgctgatgagaactcaccatggtccctgtgtacagataaacttgtagaatacaagaagtgtcattctaacaaggacattagacttagacaattttagcaagagccagtggtaaagacatggctggagaagaacagacttagggagccattcctggcaagatccagaacaggaaatagctaaagaagtagataagtagacctagtaagtatctagactctgtggatatggcaatgtccaaggaggtagtacattcccattcgtgacccaggctctcacgtaaataatgagtgtaaagaaaaatgctttgagcaataaagaccgaagagaaaacagctaaggtactacaggtgcccagagcacaaagcatgaatgttttatcatagtgaatttccaaaagcacttaagcacacagaggcagaaaggacttacctacacttcagagaggtcaccagctctaagcaagaggtaggatttgaacccagatgttctagccagggaattccagtgtatcacactgtacttctgtgcatcaacctatgaagtcgggaacctggagatgtagggcaagtactcagggaagtctcagactccttgccaatccggaatgtaagtgggcattgatttcacatccgatttacagtgacacacgtccgacccaccttcctctctcctccctttctccttggagctggggttatcttcctgcctttggcatttcttgctacgtttccatattggctcagtgtgagatcagagatgcaggatgtctcttgaataaatcatcagactgaagtcatcaccttgccttgcgttccaaaatcttgctcgttgtatcttaaagtcctactcagactcagtgagcttttgctcagtactaggtaagattaaattagcactccatcacaggggcatcaatattataggaggtggttatgaaataaaccggtgtcctgggagagaagtgtacctttggactaattgctcagaatgtaatcacaggctataaataatccttaagtcatcgttacttctgtaactgtgaaaattcggaaaatcaaactgtctggggaaggcctggcttcacttgccaaagaagtgtgtacttggccatccggatactgactgatggccttgacaatcttttttccttctctgtttagacccagggaggtaattgcatggcttccgtgggggctattaatgaagctattacagttccataaatcaaggtgcttgctatagcttatggcattattaaaaagaaatgtacatacaaacgtagccctgaaggacctccaagcctacagtgtgaagcaagggaaaacagcaaaggagacttaagaggtacactcctgtgggccttggtgtggccctgtttctccaaagagagaagctcttaggactgaactcagtggtccgtggtccagggagggtgggaggggtggggaggcaagctcaaaagactgaatagtgtgcacaaaagccggagacctgcattttagctgaggaagtctgagtttagagaagtttagttcttggccactaagaaaatgggctttagcagccagtatttccaaaggatggttggtgtctcttaaactggcgggcttagtgttcttagtgtcacaggcagccctgcccagcagttccttctccgcccgctcacgttccaggtaaggagtgtttttttatttttgaaatccaggtgcacagtcaggagaagggagcaaacagtgacacccatctttttaatgagtattgctgctggaagagagattagcatcaccctgaattttctatgatgtcagttaaatgaaggtgttttatagcactttacaacaaattagaatcaactaaattgaaaataagcctagcagctgggttaagtaatcaggtaagtggccagccttgctatttttactcagagctgaagacagaatttgaatttctaatgtcccaaaggtatggggctcacacttggggagcctgggtcctggggtgattgtttaaagggccagcagccatgcctgcttttgagtccgcagacaagctgctagacacttccctagaagttggccctcctgcacatgtttgtacaccagagagctgtgaattagtgcaggacagagcagtgcttttggctgaacattagagagcaacccagaaatagatgacccagaacaaggcagtaaatcacccgcattagccaagggagcctaatgaaaggacgaaaattcatgtgaagactttacagccactcatgaaatcagcccaaatcagcggggctattagaatgtttttatgtcttaagaatgcaggcactgtcttcccttgctgcaatttgtgtatagtcagagtgtcctgacacagtaaatagtggctttctttggtagacagtatttcctagctggaaatctcactctgtgagtcagtttcctgcacacattcctgatgcgtgtagtagtatctagaatctattcatgaagcttagtaaggccagcctcatgggtgtcactgcttgggctaagctctgtaggtgtgtacttgccaattgcctgtgctaacacaagaggaaaagaagagatgagaagggagtgagagtgagaaaaaaaatgaaacctttcatattgtccagaatagaactagtgagagagcaatagatgcaactaaaaccatatgtttataattgtgatttataaagagaaataggccatatcaagtttgtcatttttattttgccctcctctgtgactagcagataaaatgaactacatctatagaaaatccttatatctagattgattcctgtcaaccattaaaaaacagaacaacccccccccaaaaaaaacccaaaattttcatagatttccttctgctttctatttgaaactcatagcatgcagaagtattaaactgtcttcttaaagttttgaatctcaaaaattcagggaaaaatgatacctagctgctgaaccagcagatagtttttctcatgacataaaaatgacagagacccccgctgctctcagcttttgttctggaagtaacctctttgcagtggctctaacttgactcttcggtagtttgatcttgaggtctagatgtatgcagggtaccggtcagtgttcatcctctttgctttttgataattttactcttaagtagtacttcaagatgggtgggcaactgggaaaactctgtctgtacttactgccacttgacacaaagccagatctccacaaagaccagggccgacctctgatggatcaactgacactgagcctaggttctcagtattgagctatgtgctggcagtctccctgcatgaccctgcccactgactcagatgctgggagaggtggccatcaccatagagagggataaatgtgctctgagagcatgctggtctgtctgagctgtgagcgtcatcagctgtatcatgttgccttgatataagtggatgcagagaacagagtggatttacaggccacgagaagtctgtaacagcccctctcctcttgcacactgccccctcctggctaataattttcatagtaatgagtttcagagaaaccaaccagttgagactctggagctgcggtcatttctactttccattagaaagtaatttcaaattttattataggaaattcagggttgatgtacagtgattaatccagatgcacatagataggaggtgacagaaatgatgtaaatgcttttagagagtatctgtatgaaagtaatttggtcatttatatggactttgtaatgtctgtgaaaggaatgattttgcagtttattgcatcattagtcaaattttccgaatcattgatgtgaaaatccagagctattggaaataacttggacactgtgtctctgtgtttgtattttacagtggctgctaatttacagaagattgtagatgaccccaaagctttaaaaacgttgacatttaagttggtaagtgggaaggtagaaggagacgtcacgtttctgtcgggccggccccgggagggaggtattgcacctttgcacgcttagcgttcttgctggattgcgggagaatcacattttgtactcagtagttgcctcggccacactgggagcattgcttctcatcatggctggaacctcttcctttgtgaatgtagcccatccttgcctcatcagaactatgactgtgatggccctttgagaccctcaaagctctgggtaccactttttttttcctctagaactcctttcttttgcaccttgaccgtacagacaaaattaaatgtaactcaaagcagcgctctgactgaagctttcctcagtggaagccaggtggatgcagcttttaaaaatagaggccgatcgttgtgtaaatggttcaggtaattggagacgacggcggcaggacagctcactgaaggctggtgagcaaagacgacagcatttcaccccctactctgaaaccatgccaccacactgctgcagaggatagctgtcctaacagttttctatgcgctagcacattttacacctaagacagaacagcgagcatcctgaagagacagggaagtggtagttcaagtccacatcattaacattgatggttttccaagcagttctcacaagcaggatattaaggaagagtaaataactcattttcaaaacatgaattaatcttatcaagggccaatcagaagccacaagcagtttaagatccagagggccaacacatggctgtgcacacgatactgatgacctgccgccctggctgttcctagaaaatcaaacggaaattgcctgtgggctgcaactgctgcatgaggagccacagtgaagacaagcctggtggtcatgaatcttctgtggcttgcttctcctctcatttcagagagctgggctgtgtaagcacatgtaaaccacaagaacttccacagcctctacccaggaacagtagaacattttcctcggtctagagcactgtaagacccagagctctctgtggggctgtctactatctctccccaaccatgttggaaattcacatgtgattttgggaacatattttattcatatgagagcatgtagtgagagcatgtttcctcattttggctgtgtgcactgaggcagtcatttggaactttcatgctgattcattcctactatgtgtgaacttacgttagtgaccctagcccctctttcagcaaagttgttctgaaagcagctactacaccgtcttgaacacagtaggagcaacaacactctccacatgtcttcctcgggtcaggttttaggtttcctggattatgtcttgattctctcttgcacgctcagcacctcagtaagagacactgctctgctcctgagacccatcttcctaacgacaggtgctcagtgctcagcagaactgtggctctcaccagagtaacctctctgtggtcccagagtgctggaaagagtggctctctactgtcctcttctgaaacccccagcctgctcttgatgcagaagccttccctgatcatcttctcttctacatctcctgctgcacttcccctctgatggtggggccctttacatctcgaagtctgaggccaacctgatgtccaggattacacagtagatcctaaagattcaactctggtccagctcagagcccatgcttacagtgccatgttgtctttcaaaggcagcctccaagcccgtgctttcttagagtcctctgtggttttcttttatatgcctggatgtagtcactttgcttgagacggggtctcctctgtaccttaaccagtgagcagtgctgccacatacagaagagtcctgttagcagatccatctgtatgttcccctgcctcaactagacagctagcagtgtgagtggtctcaagaaatggacattggtagtctttcttccaagccccaggagttagaaatgttaaaccagtctcgggaatgaccttctgttcctgtctgtcgagcccctgttacagcctcagaggtttctttgttgttatcagcaaccagcaggttaaggcccactccacacagctaatttgagccatgggcagccagctgaaactcaaagatcccaatgcattggctttcattcatcaacttggttatgttatttgaagaataaaagatcaaagcgttccagcagtggtatccttcccaagcggctgctgtggttcagggtcctttcatctctcagctgtttatcctgattctaattgtagggagaacatgggggtctggaaatcacctgggaaacagggaggtcttactactgtgtttctctccttgctgaactcttgaaccttgtctcactcctgggactgtagctggggcgtctaaaaatccctaatgcccaggccgttggcccggttctcctctttaatggcttgtgcagtctgggcttttagaactttgaaggcaccccccccccccttaatgatgctagagctggaagcattcctcctgtagattgatgacttgaaacttcaccaccaccagtcagttcacctgtgtccttaccttatgtatctgatcagttatgaaaccaatagtacaaagggccaaggttggtgtgtccattttatcccagctctcaggaggtagaggcaaggagacctgtgagttgaaggccagatagaactatagtaagacttttatctcgtgtgtgtgtgtgtctgtgtgcctgtgtgtgtgtttgtgtgtgtctgtgtctctctgtgtgaatatgtgtataaatatatgcctacatacacagacacacacagagacacataaggacacaaacagacaaatacacacacgcacagtttgcttgtaccgttgcccacgaggatcctcagccttccttgacaagtacatttctacgaccatggctggggatgggcctcttctctacttttagcacagtgcctcagccatggggccatttcagcccagtatcctgtggctttgagcttgacacagcggcagacactgctttgggattgttattttttaaactagctaccctgccgttttgtaatgtaggtgagttttgctgctttcggtgtggaattttaaaaattgcattagtgacaatgtgaaataagatatatttaatttgcttttgaaaaaagtacaaatgggagtgagtctaattaacatccagttggcccccattgcaggagcagtatatattttagttgccgaagtggaatgccattatgtacgcacagataaagatttcataagggtgttgatgattgataactgagtgctaatgtcgtcttggaggctgcttgactggaccacatcttttcttgaaatgtgggtgaagtcaaaacagacaaaactacttgagagttttgaggtttttgccttattgtaggggacaagagtaaaatctaaggctcttggcttgttctgaaggatcaagtggccaccccagcttcttgttctgtcagaagcaaaggctgtccaaatgtgagacagagaccacagagttggccaaaaccctggtaaaatggtaatgccagggtcagggtgctggcacagatgggacctgagtcacagggtctacctatgtgagaactgaagttgtgagcctgaagcttaaggaccaaggcttcataggtcatacagtgtacccaatacatggagcactggagtaaagtacggttctcaaagtccatggttccttgtaatttcctggggagctcagaggatccccaggctatacccaagccagctaaatcatcaccatggagcagaagctaacgggttttatagtatgttttcaaactctcccactacagctgaaacatagctaccttttggtagagatgtgtcacggggatgaacctcaagcagcccacaatttctagactatttctctgccccttgattgctgatcaagatgtgaactctcagctgtccctgcattatggactctgtctgaaactataagcccaattaaacagttttttagtaagtgggcttactcatggtattttgccacagcagtggaaagacaaagacttccatcctgaggtctgtggtgacaggacacgttgtcattccagtgtataagtgtttttcataccctgtatccttacccacgtttattgttgtttgtttccttaacgatggccgttctgactctggtgagataaaacctcagagttttaattagcattttcttagtggccaaggatgttgaacacctttccagatatttattgacttcttctattaattttttcttgtaaaagccatctctccagttcattaagcatttattggtcgcatgttttagcacgtggttatttacctgtcacagttgtttgcatattcttgaatggatgaatccttgtctgatacataattagcaaagtttggttttgttcttattctgtgtgctgtctcttcgatctggtgattgcttgctgtggacaaattaattttctagaatcccatttgtccgttctttaagcttcattttgaggctgagctatacaaggtgtaggtaggtcatgggcctctgaggttccctgtgacccttctagaagattctgggtgtcataacatgtccagtcctactaagacggagttgtattgccttttccactatgttgaccttggtccaaaggtcatggtgggtaaatctcaccatgttgccgtaaagcaaggcaggagcttcagtccatcctcctggttacacttcatccctgtaaaccgtcatggcggcttcactgaaaactgttcctaatgagacagggaacacttccagttttattaatttcaactagaggacatgcccatgtaataatgtaataaaatgtaataagatggggtttgatctttcctttggtatgcaatggaaatacagtgaggggcttcagggaaagccaccatgaagagtggattgtcagctaagattctctttaccctgcgttcccctcccccaggaaaccatcttactaagaaaacgtggcaaactattgttatcagattcagctgtgtagcaaacagcactttaaaacctgacaatatttgttgttggtaatgaactggaattttcaaatgaaaatgggatttttggcaaactattctctgctgttgtatgacagctccccaataccgagacactcttccgaagagactgctgacgggccatattaatgaatacaatttgtttacactgtctaacagtcatattctgtaatgaaataacctttagaagatctataaaactcggtggtgcttaaaaatcataccaggtaaagatccgctcaaagggcagagaggaccgacggactttaatggaatggagcgcagaaagttcagattccacgctgcagctaacctttcagaatcaccactgggaaagttccggcaccgtagcagacagtatttggaaaggcttctaaaaataccccccttttctaaatccatgtttgtgtgaggctgggcttgtcttgacgtacttcagagcaagaggtgtcatggaggagagtgagtgcagatatgtgtctgagaaccccgctgtcaccactaagcaaaaaacgttgaagaagtaaatcatgtgattcttctcaagggttgctgctgctgctgctgctgctgcctctttgtgggaggtgacggggagatgtattgtttcccatgaagatttttatttatggtaacgtggagtgggttcattattagatttaatgatcagtaaacaaatattttaaaactgtatgttttaatttctaagctagtatagcaaatatattctacacaaacatgtttttaatgcaagggttttgtttgtttgtttgtttgtttttacatttggggggggtactgggacctgaacccagagcctcatgcatgataaatatgtgaggtaccactgagatatagcctcaggcaatacttgttttctcagttttagttttcaaaacagtcagtacaatgaatgtaccccacataaacatatttggagtctttgatctcttcttaacagtaaatggtagccctaaaggtttgaacactgtttcacgacagagtgctggtcccttgactcttgagtgatgacatcatgtgttcatggtctcctgggtgatttgtagattgagaaagagggagagaagctaaacagagcatgggtcagggacagcaggcgccatggaagatgcctgagtcttagaggcaaccaagcaaaagctgttcaagaaatgagcacatctgcctgctggatgccgtggcacagaatgggaagccaggagagtcttcctctgtgcccatggtaaccaaaggcctgttgctaaaccgccgctccggaagaaggacttcctagttctgttttgcttcaagtcagcttaaccattgtggatagtcaggtttgttattcttacttgtttcaagaaattttggtattcttcttgtcctgactctgaagtagctttgaagctcttgacggcttcaacactggccactgggagcattttgtcaccagcggtggtggcaatagcatgtcctcagctgctgtcactcacctgctaccaatcccatggtttctgctgccagtcagggaaattaaggagagcctcacagggtggaagagggaaggtgttgggacaggagaagggacagctgtagggaaacaggaaagtacgagttgagagtgttttagcactggtgtgacagacacttccgggaagtgtctgccagattgcctgctctgctggatttccttgttggaagtgaggggaagcagagtctgaaagctgttcttcactgagctgctcagctgtcaaagaacgctatggcgttgccagtgtcatcagtgggcaggcatagcgttgaatctttgctgtaaatgctgcttgatcttacccaccttcagggcactgattggacatcagcgtaatttactctgaatgtcattttagagatagttagctaaaatgtcttcaaatttttaaaatgcctttttagctatattcgtacttaatgagaaatggagcattggacacaggcaggtttcatgcactcactgttgtttgaacactgtacatacataagccacacttatcaggtaaagggtggcgtctgcagaggagtttgaggaaataatttagcatgcataaattgagactggaagtttttatgtggccctttgaaacttaatcattcgccaccaccagcgcccttagcatttctgcaatctccagttctgatcaatgtgatggtaagatgaagaaaaaaccttaaacatagtgatctccccacaaccatgtgtgtgagtgtgtgtgtgtatgagtgtgaatgtgtgtgtgagggtgtgtctgtacccttgcacatacttatatggataaaagaaatgaacggggatgaaaataacacattagggtcaatgatactatcccagaaagcgtggcttattttccataccttctgatcgtgaagtaataggagtaataaagttttggtacactatgatttgctctgattttaggtttaaaaaatgtgttaaaataatatggataaaattttgtcaaaggaaagaattctgttacaatactgtgtaagccatcttttgctgaaacaaaagtacttcagataatgagcttctaaagagaaaatgacaactctggctaacagtcttgaaggctccggtccatgattggtcaaacccattcactgatctgggcctgtggtgggagtcagggtgggaataggtgggaacgcatgaggatacatggcaggacagaaacactaatcatacagccacaaaacgaatggcagggagaagtgatctgggaccccactttccctttcgaaaggcatgtttccaggcacctaagtctcccacttaggacacgggggcaggtagaatatgaattttgtttataagcctagggaggcatggtactgttagaatggatagtagatctcaccatacctctgctggttgaagccacgggtgcaaaagcatttcgtagggattttctgcacctgttatgctcccattaactgcagggcatttctatacccactctagcccattttagctctggaataaagacacggagagctggcactttttattaataaacttcaagcattaataactaggcagattctggtctattctaacccaactaggctactactactacccagctaaataccctgttacttgccatcttctggccttgccctggtttgctgtccgtgtgtgtcctgtggctactctctcattgtgatctcatggcaaatcctcctggtctctccctgtggttttcccacctctttccccttgtgattctttcctacactctcctatttgggaccccctccctatctcttctgcccagctaattggttgatcagctcttttattaaccaatcagaggtgatggaaaacaatttttacattacattgagaccatgccatagtcaggactgtagacagagagatctgggcacacaaatcagcttcagaatacacagcacaaaaccatcccctgacacaccaggactgcatttccttctttttttttcttttttcttttttttttttttttttttgagacagggtttctctttgtagccctggctgtcctggaactcactctgtagaccaggctatcctcgaactcagaaatctgcctgcctctgcctcccaagtgctgggattaaaggcgtgcgccaccactgcccggccaggactacatttctaacagcatttggcacccagcaatcactcattcactcatgtggttcttggggcttgcttcttcctgaagaggagctggttacctggaatggctttgcccgccctgcccttgccccagtgcactgatggtttcttcctcccttcccttccaggcttctggctgcgatgggtcggagattcctgatgaagtgaagctgatcgggttcgcccagttgagtgtgagctgatgtacgccccttgctgtcaccctcatctgtcgtgacccttccctctcccagctccccctttgcctccttcctctcaccccctcactcccaaatcccaacaaataagaagattgtgaagaggctggcttcgatgaagtgcgatcaaaaaaaaataataataataatttaaaaaaaaaaaactgtgagcactccgagttctgctttattgtccagcaacccacagtgtgagcacaggcaagccctacagctgcgcaactgttgctgattcctttccagagagctatttactattcttagcagtcaatttggctagcccgtaagtgaggcgtcggaaacacactcaggtggtcctatctcttggcagcaaaaggaatcttctaccagaagccttttctcctcttactgttgtatttctgtttaagactttaattgtacatctgacaatactgcctcttttatgttgtacttagaaattaatatacttataaaattaagatttattagccaaacttgaattctagttttaaaactgactgtgaattttatttttcatatatttatgctttacacaccgtagctccgagggggaaagttttgattacgcgctttctgcaattgatctcttgttatttaaaccaacggtttcaggtcaatctttggagtatttgtagcttctaatttttgaaatgactgaattaagaatttggatgcttgctcttttggttggtttgcctaaaatccagcccacaatccagtcgtctcttgggagagggaggtgccttgcaaactttcatataacgaatgtgcctgaggctgcttaactctggactagtctcagatctcaaacctgcactacacgaggaggcatacttttgcttcatctggacatttagaatactgtaaccttgctgccgttctgttagattgctaactacgtcccccgtctccaatttggctctccttaggcgataggatttgttgtttttaaggcaataaacttgacaacaccagaatccaagttttacttgaaaagctcggcagaatacacagtggtgtgaaaaaaacaacagaaagggtttttttgtgcaatgacaaacggtaaaaatgctgtaaacgttgaagaataaatatttccaacgcaagaacctcctgcttgactgtgtattatgaacccaggaaaccttagaagtttcaaatttggagtcaagaccttcaagaaggtgggctccggggatggtaccattgctctttcctagctaaccctagatacggcagctctttaatgtactttaaaaagcaaatatatattactaaggaaagaagttatttataattgccttgtcataatcgttaaggtgttctagaaccatttgcatacaatttaatgtaattccattccattctgttgtttacacaattactcaaagatgactgcaaaggtaaacggaaaaataaaagtgtattgcacagtgcactcgagtctcctccatttcgttcctcccccagccgtcaccagcatctccactgcgcaattcaaccctgtcctaagatgcctagtgcaagcaaggggacgagtgtgaagtgtccctgccggacgaatgccctgcacgtgaagtcacagccgtagagaataggttttaactgattactgaaacattcacacttcacttagacaggcagccctcgaaagcggtggggctccaagagacaaaagagaacaattccttccaactaggaaaactgaggaatgtccagagtcgttaagtgactcatccagaccatttctcagagctgcaggcaaagcggggcactctggatcctgcttcctgacacaaagaacacgttcttgacagttttcagtaccactggtgaataagagcagccccagaagttgaaggtaagtccccattgctgaagacaccacacacttcagacaaaggacacagacagttttagctataattaatcccatatcctcccctttgaagattatttataataccagaaggtactcttcgagctgcttacaaaggaaagcagtcagtaagtagtccaatgctgctgatgctacgaaccacgtggccagcatggtaagatatctctgaaggtgcagcagtgggactttcatctcttggagttaaccagcagctctctaaggggactcacagaccacttgaatggagggaatgcctgtcatataaacctatgcaactacacatggctagtgaggtcatggaccttaaaagagaaacctgttaccgccactgtcctaaatcgatataattccaatctgcattctaaagatttacttatccttagaggtgccctcacctcttgacagaggagctcctttcttcagcagacagtgaccagtgcagaattccagaattagttaaaatgcagacaacgactcattggggtgttcctctgcccccaagtgatatatccacaacatagctcctatacctaagtgtcagagaacatcatggaagagaggacagagagattgtcgctggcagaggaccaggaagccttctgtgaatatgtgccttctagctatgatcaggaagatccccaggtgaaatctcaacatggatacttagacaagacctgaaaattccgacacagttgaccatcccagcagagatggaaaatcttacagggctctctctgtagataaaatgctataagcagttagtaactgctaagagagggagaattagcttcccaagggacgagccccctgattgactatccagtttgtagtttgtgaacattgtatccaggcaacacacaatggactcagcacattaaatttagctggttacaagaaggcagtgacgaaagagctgtagacaggaggagggggaggtggtaagttatgtaattatactttaataaaataaaaataatgctatacgataagaccttcatattcgacttttaaaatgacattgcaccatgataattaagtgtcttttaatttctgtatccatattcaaaagattttcctaatagcaggtgagagggtagattgcatacattcacataaatggaataaagattttaaagcacatgagaattaaggataaacagacaataaagcttgcttagaaaacagagataaaggttggaacactattcattgcaggagtttacttaattgggaaaatactcagatttggactaacttcctaaccactacactacctcactaccaacaatacaaagggttctatagaatcaatagagtttctataaaaattcctaagttctatttttcacataaattggaaaaaaatcttaaaattggtatagaaaaacaacagcccaggcagcttaagcagacttaagaacgaaataggctaaactgccatgtttcctgctttcaatatctgctacaaagctttagttatctacaacctaagattaaactgctatgaacataactaatctctgggctctgaagctaagcagcgaagggcctgttcgtacttggctgggaaacaaagcttttgataatccaagtgttgtgttataaaatagaccccctcatacacatagggtatagatcccagaaataagcctacaactgtgtgatcaacttatcaaccaaaacatacaatacagaaagcactacgtcttctgtgaaggcttttgagaagataaaacttccatatgcaaaaggataaactgttgtttttaacacaatctcagccacttggttttactaataagagccagatgctggggagagaggcaagaaaacacccagccaagcttccttctcagcccatgtcccaaaaggaatctctccttcatactgtctcaaaaaaaaaaaaaaaaaagaaagaaagaaagaaagacagaaaaccctcaaactggatgtccctcttttatacttcctgacttcctcttgctagttttttttctgtgttcactccctgtcaacttgttgcttgcttcatctattgacctatggtggactaaatttcattttattttcaacaagcagaactcttagattaaaggtgtgtgctagggctgagcttcaccacaactagaaacagggttttgtttcgtttgtttttcagtaagcaacactatcccagggtttacagcctgatcaaatatcctgaaacatctcccacattttatctaagtaagaagattttacctctactacagtaaaactaattacaatagtgaaggtatttctaccaagctttttacaatatccagcttggttgcatttggcagttttaggatttaagtatttttgagtttaaagtactgtaagatgtccatgtcagtctcatatgaactcagcaatttgaatgtcctgagcagtttgtaatctgaaagttgatcatggggtggtgttggtcagcttagtggcaattctggctaggtagaacacaacagtcaacccaaaggtttccagtgtgtgtgtgtgtgtgtgtgtgtgtgtgtgtgtgtgtgtgtgtgtgtgttagaacctggtggcagaagaggcaatttttccagtggttatagttaccacaccccaggtggattagtcatctcggagtccatcatcttcttggatgcttcaaaggttactgtcagaagtgatagaaaatattttaactgccgtattgagaagatctcagaaacgtttgagggcaacggtctagtaagtacagttaggtccacaaactttgttcctagttacctgcttcagacgcaaccctgagaacatgcacagggagttagaggaagcttgtttctagaactagttagtgtgctgtatgactactaataccacatcaggaagtttatatatacataataattttacaggctttgagatatgttcactttaaaagttctagagtgtcaaatggaaaacagaagattatgagattagtggcaatagagtagtccctaattattagttttcctctgtcccaaacagggggctcttctggtaggagacagaaattttggatttttctttaacaagcatgtgtgggtttggtgaagtaagagcccgaccccaaagccagctttaatttctaactgaatgggggtcacgtaaagaccatttgccacttatgtcagagagggaagcagagacaagctggaggtggacaatttactcttttgtcgagtggtctccggattcctttgttggatgcttttatttgcctgaaaagataagagcaaaaccctgccccaaccctaactctgggagttctttttttggcagattaaatctttcctagggcaaaatggttttttggcaacaaaaagtattatcaccttggtatgtatgcttaaatatacccatactctgctttctcttcatatataaattcaaagtttaagcatatttatttttgatcacaaacgacattgactttaaatttcagcctattacaagtagctttttaattaattaattaattaattaatatcccatatgctgctccccttccagtccttccctcgtagattccctcccgcttcccttctcctttgagagggtagggatcctctgggtatccccccaacgtggcccatcaagtctctgccagattagactcatcatctcccactaaggccaaataagacaaccatggaaacagagctgcatgtctgctacatatgatctgagggcctcagtctagccagtgtatgttctttggttgcttgagagttcccaggggtccaggttagttgattctgttgttctttctgtggagtctccttccccctcatggccatcaattcatcccctcagctcttccataagtgtccctgaaatctgtccaatgtttggctaagggtgtctacacctgtttaagtctgctgttgggtagagcctctcagaggacaggtacactaggctcctgtctgcaggtataacagagtattaataatgtcaaggattggtgtaagcagctattaaatttaacccattgtaaaacttatgtgcttgcctctgcctcacatgtgttgggattggttaaaggcatgtgtctatctaaagtattgggactaaggattcaaaccaccatggcctggctctggatttgttataatagttattgtcatagggctgtcctggtttaatttggttatcaatttcttcttatttttttagtgttaaagttcaactttcaagttttttgaatatgtaatctattgttgctgaattattctgaacttgttctatggcaaaatttactaatctagtcttaagtaaacacagtgcccagtttgtccactattttatgatttttatatatttttgtgtatcttgcctctatgagctaaataaattttgatgtcatttccaagttttgccattttcattcataccagatactgttaccatttaccactgcattagtggttttctatcttgttgactatataactataccagcatacacataccatgagttggagaggatagagattttcagtttgctttcctagttggttttctatagccaatatgctacactaattttgtaattccttcctcaatgctggactattgaggtctaggaatctctatgcaaaccactcagataccgatctcagttaaacagaggttgtttattgaatgtacagcccaagactgaatgatcaggaatgcagtctagactcaggagccaaagtgcgaccatgaatatttcttggggccagtttataaaggtgaaaaccataatgagccccgtgcaggtgcaggaagtgctgcccagtagtcagctttgacgcaagctattctgggtcgaagagttctaagtgactgctttttctaattggtcctaagtggaacttatggttgtagaacttcttactattaacaaacctcagaacacaacagggcatgtggtcatcttgagtgtctggcaggcatgtaacaaaacggctacagctatgctgtgtaggctgtattgtctataggctgctgttttccattagttttggttccatcggtgacttatgaccatcagtaaatcgtgcattagccaaatgttgtgaccattctgctggttcccacagtttaataggtgcctcttttgggggaagggtaagaagtttaggaatgtgtattataggcagctgagctagctatttcatcagtgcaggaaggcacagaccctttagctaccacatcctgatcacgaaggaattcaggtaggtatcagttccactgtaatgctcccccccccatggccaagtatgtgaaggactctgtcttcagatggatacaatccattattttaaggggtgtacttatgaccataggatggctggcaatgactgaatataaggttctccacataataaatgtccctcataaaataaaatgtcccaatttgtttctcaaagagagaatatgtattctttatatatggaaagcatttgcaatagaagccaacagttaaatgctggtggagtcctcagttgccaattcaccaataaatatgatatccgtagttagggtatcatccggcttaatattggtcagggttgcatgcatggtgatgagcttttctagcagtcgaaaaaggtgctctttgttcctttctccattggaaattagctgcctttctagttaccatgtaaagggcttttataataatatataaatacggtatgtgatttctctagtgttcatacataccaattaggagctgtatctgagttttgttcctgggtgatgggattaaaggcaggtgccctcaccaccttgttcattgtaactgtagaatttagaaaacaactaacttaagaaattctgcctgtctctgttggtattaaaggctatcattgccctgctcaaatattttatcctagctccaaatcactccaactcatagagatttaggaaataagtttgaactgtaataaggctttgaatttaaatctcttaactgtgtatttaataccaaaaaagttctttttatttataaagaaatcccaaaagcttatgtcctgatttatttgcattggtgtagaatctcggggctccagaaattgatgtccttcttactatatgagggagaatccaattagttgtttttataaactgaagtctttgaggatatttttttgatagtctttcccaaaaaattactgcaagctctgtgccaatattcattttctgtccatgagtcaatttcaacattttacctttcagtaaaaggtactacaatgtctgctggatctattcctgctaattgacaaagtctcatttttcttttcagaatcaattcaaaatccttttctacatagatcttttaagtttttactctgtgtgctaaaattatctattttattatcttctctgtgcataagaacttctgtgggagaatgactataggggaaaaaaaaaacacaatccaattttagatccaaatgaaccacatgtacatcctgaaattccttttccaccagaaccaattctctctcaacctcagctagtaattttcttgaactatttaagcccttattaccttgtaagttttgaatacattactttgctcttgagtagttaatccaattatggaccatagccagttaatataaaccagcaatttttgaaaatcattatgggtttgtaattgatcattcctgatttgtactttctatttggggaattttctgtaaacctatctcatatcctagataattgatagaatattctcttggtatgttttcaggagcaaattgtaattagcaaacatttttcctaagttatatctacatttgaatcagccagtaagatatcagagacaaatgatattcactatctttataaccactttatttataatagacagaagctggcaaaaacaaacaaacaaacaaacaaaaaacagatgtccctcaacagaaaaaaaggatacaaaaaatgtagtacatttacacaatggagtactactcagttattaaaaacaataacttcatgaaatttgtaggcaaatggatggaactagaaaatatcatcctgagtgaggtaacccagacacaaagaacacacatgacatgtactcactgataagtggatattagccccaaagctcagaatacccacaatagaacccacaaccatatggagcttaagaagaaggaagagcaaagtgtggatgcttcagacccacttagaagggagaacaaaataatcacaggaagtagaggagggaaggacctgggagggagaggaagaggaaggaaagggtagaggaacaggtttttgaagggagaggagagaagtacagagggtcagaaaattaaatagaagcatatagcagttggggatggggaactgggggtagccactagaaagttccagactctagggaagcaagaggctcccaagagccaatggtaatgactttagccaaaatacccaacaaaggggagatacagcctatagagaccaactccaatagataggcatggcacccagttgagggatggggtcacctacccatatcaaaaattttaacccagaaatgttcctgtccaaaggaaagctgggagggcagggggaaggaacagagactgaaggaaagaccatctagagaccatgccatctagttatccatcccatttgcaagcaccaaacccccacactattgctgatgccaagacgtacttgctgacaggaccctgatatatcctctcctgagaggttctaccagcacccgaccaaaacagatgcagatactcacaggaaaccatcagactgagcccagggaccccagtagaagagcttctaaaaggactgaaagagctgaaggggattgcaaaacaatacaaagaacaatattaactaactagaacctccctcatccccccaccttcccatcccctacaaagctcctagggactaaaccaccaaccaaagagtctggagggagccatgactccagatacatatgtagcagaggattgccttatctgacatcaatggcaggggagggaggcttggtgccccagtgtagggggatgttagagggttgagggtgaaatgggtgactgaggggaggagcaccctcatagatgcaaaggggagggtggaggagatggggtagaggtttgtggaggggtaaccaggaagaaggatattatttgaagtgaataaaatgactatacacacacacacacacac

SEQ ID NO: 46 - DNA, 1615 bp, Mus musculus
gtttcaggcagcggagcaactgcggtggttcaggcagccctatgcaaacccaggcaagaacgcgtagccataaagcggatcaacttggaaaaatgccagacgagtatggatgaactcctgaaagaaattcaagccatgagccaatgcagccatcccaacgtagtgacttattacacctcctttgtggtcaaagatgagctgtggctggtcatgaaattactaagtggaggttccatgttggatatcatcaaatacatcgttaatcgaggagaacataaaaatggtgtcctagaagaggcgataattgcaacaattcttaaggaggttttggaaggtttagactatctgcacagaaacggtcagatccatagggatttgaaagctggaaatattcttctgggtgaggatggctcagtacaaatagcagattttggagtaagcgcattcttagccacagggggtgatgttacacggaataaagtcagaaaaacatttgttggtaccccatgttggatggcccctgaagtcatggaacaggtgagaggctatgacttcaaggctgatatgtggagttttggaataactgccattgaattagcaaccggagcagcgccttaccacaaataccctccaatgaaagtgctaatgctgactttgcaaaatgacccgcccactttagaaactggtgtagaggataaagaaatgatgaaaaaatacggcaagtccttcagaaagttactgtcactgtgtcttcagaaagatccttccaaaaggcccacagcagcagaacttttaaaatgcaagttcttccagaaagccaagaacagagagtacctgatcgagaagctgctgacaagaaccccagacatagcccaaagagccaagaaggtaaggcgagttcctgggtcgagcggtcaccttcataagactgaagacggcgactgggagtggagcgatgacgagatggatgagaagagcgaggaggggaaggcagccgcctcccaagagaagtcacgaagagtaaaagaagagaactcagagatctcggtgaatgctggtggcatccctgagcaaatacagtctctctctgtgcacgactctcaggcccaaccaaacgctaatgaagactacagagaaggtccttgtgcagtcaaccttgttttaagattaagaaactccagaaaggaacttaatgacatacgatttgagtttactccaggaagaggcaaatacagcagacggtgtgtctcaggagctcttctctgctggcttggttgacggccatgatgtagttatagtggctgctaatttacagaagattgtagatgaccccaaagctttaaaaacgttgacatttaagttggcttctggctgcgatgggtcggagattcctgatgaagtgaagctgatcgggttcgcccagttgagtgtgagctgatgtacgccccttgctgtcaccctcatctgtcgtgacccttccctctcccagctccccctttgcctccttcctctcaccccctcactcccaaatcccaacaaataagaagattgtgaagaggctggcttcgatgaagtgcgatcaaaaaaaaataataataataatttaaaaaaaaaa

SEQ ID NO: 47 - protein, 425 aa, Mus musculus
VSGSGATAVVQAALCKPRQERVAIKRINLEKCQTSMDELLKEIQAMSQCSHPNVVTYYTSFVVKDELWLVMKLLSGGSMLDIIKYIVNRGEHKNGVLEEAIIATILKEVLEGLDYLHRNGQIHRDLKAGNILLGEDGSVQIADFGVSAFLATGGDVTRNKVRKTFVGTPCWMAPEVMEQVRGYDFKADMWSFGITAIELATGAAPYHKYPPMKVLMLTLQNDPPTLETGVEDKEMMKKYGKSFRKLLSLCLQKDPSKRPTAAELLKCKFFQKAKNREYLIEKLLTRTPDIAQRAKKVRRVPGSSGHLHKTEDGDWEWSDDEMDEKSEEGKAAASQEKSRRVKEENSEISVNAGGIPEQIQSLSVHDSQAQPNANEDYREGPCAVNLVLRLRNSRKELNDIRFEFTPGRGKYSRRCVSGALLCWLG

SEQ ID NO: 48 - DNA, 313287 bp, Homo sapiens
  misc_feature (1)...(313287): n = A,T,C or G
ctccatactattagaagtagagtctgtagcatttctgggtctaatcatattaagcagccaactccagaaacccaaaatccaatgaaagaactccatcattaatattctgttcctctagaaccattcctggtatcaaaatctgtattaggattctctagagggacagagctaatgaaatatatatatgtgtgtgtgtgtgtgtgtgtgtgtgtgtgtgtgtgtgtgtgtatataaaggggagtttattattaattcacatgatcacaaggttccacaataggccatctgcaggctgaggaccaaggagagccagtccaagtcccaaaactgaagaacttggagtccgatgttcgagggcaggaagcatccagcatgggagaaagatgtgggcgggaggctaggccagtctctcatttcacatttttctgcctgcttatattctagcctcactggcagctggttagattgtacctacctagattaagggtgggtctgcttttcccagcccattgactcaaatgttaatctcctttggcaacacactcacagacatactcaatatcaacactttgtatccttcaatccaatcaagttgacactcactattaaccatcacaggtttacttctttttgtcattttgctttaattgtcatttgttatgtctaattcaggaaagccaccatgaccattgagccttttaaaattgccaccctcttgggagctctctgacccctgtgctttgctagttggtgtggctttcatgtgtcacagtgatgttctcagggctaccatagttattttcaactctggctaaacttttgggtcacctggatgcctgacttctacctgcagactatagtttggtagaatgcaggtgagacccaggaataagaattgttgacaagctgcacaggtgactctgatactcagctaggctgaagaacacctggatcacctgcgccttactctggggacaagcaaaaggctgttcttcctggtctgatgtaagtatgggctctatgcccattaaaacatgctgtgcaaagtctgcaaatagtgctccacaagcctgatgtggactacaaacgttttgtttgtcctgcaaagtattattgtttttagattgtgaaatatttcaaacctacagaacagtgggaataatgtcataaaaactcacacacctaccatccagtctaacaaatcttattattttgctctatttcttacacatttttattaaagtaataaaacaacatagatgcaatagaagccctttgtgtacctttccccttccttccttctctccctccctctccaggggtaacaactggatttggaatttatcattccaatcacttttcactaaatatttattcaaagactacatttagtgttgttctcttgtttttaaacattaagtgtatggtatcagattctgtacagtattttataaagatgggccaatattttaaagctgagaaatttcacatgaaatcagatttgttggcttctcttgaaacaacaggaaggtctggcagtgcgggactagctttctggcaggacaatgtgccttactgggccaagactctttggtgtgacatggtcccactagtcacgctgtgtagacatatgtgcatgcacctggactgtgtctcctttgatgcggatctggcccctgatactgaacttccttccactccaattcttttctctcctcaaggccatttctgctgtcctttcctaagtgctaaatgccaaagttgtctgcctctcactcttatctcttgctgcctctccttctgctctctcttttctctggttttcatttttattttcttgccatgccctgccattttttttcttgactttagtaccagaaggacctgggtttgtttgtttgttttaaagactttgtcaatcgatagtaaaagaagttattttgaccagtaaacctgacccatcataatacatctctgttacctctggtttggacgattctccctagttttgtttttgtttttgttttctttttttttgaggtggagtctcactctgtcagccatgctggagtgcagtgacacgatctcagctcactgcaacctccacctcctgggttcaagagatttctggctaatttttgtatttttagcagagatggagtttcgccatgttggccaggctggtctcgaactcctgaccgcaagcgatccgcctgcttcggcctcccaaagtgctaagattacaggcgtgagccacctcacctggcccactctcgctagtttaagtgttattcacatgttttggagctccagaagcctcgacactggataaagtggagtttcactaagttatatagagttcttaagggctgagatccttttgcctattttacccacagcagttggcaaagtgccacacacttaatccttaagaatgtatttatagaatgaatgaatattaattagttaaattgtgttttactacatacatcctttttaataagccaggccagtccctggctctcctttatttttcagaatacatacaacccaagatgtctctccagatgaagatctgagcctggcaggggaggcccggggcagagatagaagagtgtttagggcttatggtggttttggtgggaagttttttgaatagaaaagaagtaaaaggctttcagacatccttggtatttgtaagaatctgaaggtgagagggataaacaaaatattttcagaaactgctgtttcatgtgtaatgaatggattcctcttgaagtggttcttcaacagagattgcactaaaaaatcaattgctttaaattacatttttatgtcattctgcctgggacgggactatcaggctttagacagatgacagcatgaaagaaatatgtatgccatgtagatgactataatgccctctggtgttttagccaagggcaatccttgctaaatatggaagtcttcccctatgggtagagatagtagggcttctagtgagtactctatcagtacccaaatcagggtcagaaacttctgacattaataaaaagacattaactgtcaccagagctattttgtatgtaatataaaatgcaatagaaagtcaatttcaatagctggttgggaaataaatgaaaacatgtctggaagttataattcttataaatttaacccattaaatccatgtgatgaatttaaaatgcaatgtctctgcaataattcaatctaaaataaatcctctttctgtttattgttgggaaataggtagtaatgacacctgaacactaaattgtgctaatcctaataaaattgagttacaccagctctggactttgggtaatagcattagttgtgtcagtggaaggcacatgacacttctgttattatgttcagtgcgagatggcttggtcttcaaagtcggaaagggtcatacattttcaaatgcatttttcagatggacatttgctgtcactgctgagaattcattcagatagttactatgtttgcagttttcttctcatttacaataatattaaaagcaagctgtaaagtccacggctttggtagacagtcggttctaaagcagtggctaattttcgttttttttttcttttttttgagatggagtctcactctgtcacccaggctggagcgcagcggcatgatttcggctcactgcaacctccgcctcctgggttcaagcgattctcctgcctccgcctcccaagtagctggactattataggcgtccaccaccatgcccggctaatttttttatttttagtagagacagggtttcgccatgttggccaggctggtctgaaactcctgacctcaggtgatccaaagtgttgggatcataggcatgagccactgcacccagccagcagtggctaattttcattagtgctcattgctaaagccagttcaaataaaatgcaactggctaaagagcaaatcccataattccactgtctagtttcctaaggcttctgaaagttgtcagaatcaaaatggagttgtggcaaaaaccctgacaagtagaactgagaaggacaggaagggagggctctcatgcacaaaaggctgcaaaaaccacaaccttgcaaaaaggccattgcaactttatacgcacacatataggcacacaatacttctgtgaggacgtctgcccaacaactgcccaacaactgtccaacctcagactggtattacccctgttattcatctttgtagccaaggataattatctgaaaacaattattgactcctcattttaaaacaaacaaacaaacaaacaaacaaaaaacttttatctccctgaatacccacagtttactatgtacaagaaccctattccaaaataagcatcattttcttttaaagtctccttctgtgtttgttatttaggttgacaggctgctgtaaccaatacacatactggggggcttaaaacaacagaagtttatgctttcacaatctggaggctagctggccaaaattaacccttggcagggttgatttcttatgggaggctctgagggaaaatctgttccttgtttctttcctagcttctggtgattgcctgctatttttggcattcttgacttgtagacacatcactccaatctctgcctccatcaacacatggcattctccttgtgtgtgtgtgtgtatgtgtttctatttgtctctgtgtccaaatttcctcttttattataaggataccagtcattgcattagggcccagactaatccagtctttgcctctgcaaatactctatttccaaataagttcacattcccaactacctgagcttaggacttcaactcttttaggggacatgattcaaccttaatacctaccttcccctgagactactacccctgggccctcctagtcagaaattccggagccatccactgtaccactacaacgtgtgtgtgggtcaggcgtgttgcccatactagctcatttaattcttacatagctcttacagtcctgggctaattgtcccaattttaagaaaacagaggctcagaaaatttagactaccagctagaaagtgtagtacagggatttcaattcagccatgccctttccatcatgccctaccattaccctcattcaaaaaaagtttgatctttgtctttggaaacaattattataacccaagtccagctctttcacaacttttcactcagagttaccaaaatagtgggtatgaaagagttggccatgacaaatgacggtgatcgattttcttcagaccttaggatacctgactattttccaccatgcaatgatggtgcttttgtgttagattacattttagccatgggaaaatcatcatctgtcaagacaacctctcacttctcccacggatgcatttctaaaacattttataaattgcatttgtgcacatccacttttttaatgcattggggcaatttgacttttaaaagaatcttatctgtctgtcgtcaagttctatttctctgctccataaataatttttaaagccactttcctcatcattatcctcaatataatagctaatatttacatttctctaacttgactattgcaatggcttccaaataggtctccttgcctccaatttcctcctataaaatccacccttgccagtgctgactcattctgatgcttaaaagtatgttttatgtatttaaaaagtgttacattaacatttaacaaatatttactgagtgtcctctgtgccaggtgtttttctaggtactgggatacagcagtaaaccaaaggaacaaaaaatcctgccctcagggagcttatattctgcaaagttcattcttgtaattatatatctttgcactacatattttgctacaaatcttggcagacaggaataatgatgatgatggtggtggtggtttccattttgttaaacttctattatgtgtcatccattatcctaagccattataacaacccatgtggaagctattattgtactgatttttgcacaggagaaaactgagactcagagagtgaagtaagtccaaaggcagagacttaaaaaaaatgaggctaggcatggtggctcacactataatctcatcactttggaaggctgaggtggatcacctgagaccaggaagttcaagaccatcctgggcaacatagcaaaaccctgcttctccaaaattaaatacaaattagctgggcatggtggcacacacctgtaattccagatacttgggaggctgaggaagatggattgcttgtgcccaggagctcgaggctgcggtgagccatgatcatgccactgcactccagcttgggtgacagagcaagaccttgtctctagaaaaactgttgagctgggcacagtggctcacgcctgtaatccaagcactttgggaagccaaggtgggtggatcacctgagaggtcaggagtgtgagaccaacctggccaacatggtgaaatcctatctttactaaaaacacaaaattagctggtgtggtggcacacacctgtaatctcagctattcaggaggctaaggcaggagaataccttgaaccctggaggcagaggttgcagtgagccgagatcgtgccattgcactccagcctgggtgacaagagtaagactctgtctcaaaaaaatgcaacacgaaaccccgtctctactaaaaatacaaaaataggccaggcgcaatggctcacgcctgtaatcccagtactttgggaggccgaggcgggtggatcacaaggtcaggagatcgagaccatcctggctaacacggtgaaacccccgtctctcctaaaaacacaaaaaaattagccaggcgtggtggcgggtgcctgtagtcccagctactcaggaggctgaggcaggagaatggcgtgaacccagaaggcagagcttgcagtgagctgagatcacgccactgcactccagcctgggtgacacagcgagactctgtctcaaaaacaaaaacaaaaaaataaataaaaatacaaaaattagctgggcgtggtggtgggcacctgtagtaccagctacttgggaggctgaggcaagagaatcgcttgaacctgggaggtggaggttgcagtgagctgagattgtgccactgcactccagcatgggcaacaagagcgagactctgtctcaaaaaacaaaacaaaacatcgaagtccagatttgaatccagtactttctttcttcaaggcgttggccacttcactacacatcctctcttagatgttcaaagggtttatgaataaataatggaactctacgaaacctctttgtaatacaaataaccactgcaataatctgtttataaaatgaaaatgtatacttacttcatctaaagcattatttaccctccaggggacatttggcaatgtctggaggcattgttgatagtcacaatgtcagcagcagggttgccactggcatctagtgcatagaggccagggtgcctttgtctgctctggctggtatgacaaaataccttagactgggtagctgacaaacaacggaaattcatttttacagttctggaggctgaaagtccaagatcaaggtgccagcaaattaggtatttactgagggcttgccctctacttcatagctaatgcctctagctgcatcctcatcaagctccttccggcctcatttataagggcactaatctaactcaggagggctctgtcctcatgacccaatctcctgctaaaggctcttaatactattccactgccgattaagtgtcaacatatgaattttggggggacagaaacattcagaccataccacaggagaacagacctctacaacgaagagaactatctgacacaaaacagcgctgagattgagaaaccctgacacatcatgaggcagttggatacactttaaaaacatttagacccttatttttcctttctatttttaacatcgctcactgaatgtactctttatgcattgaaataaaccttgtttatattttaaaggcacccgcctccatccccatctttcaatttaaatttagtaatggattttccgggaaaagtgcatatcagttgaatacttctaaaaaacatatatttctaagttttaagtaccattttacccaattgtttacagaaacattaactctaatgcttttgtataattttaaaatattattcatattctgttcttcatttataaaaatgatgccaaagagcaatgccaggggacattcttctttaaaccgatttactgtagaaatgatggatgtgcactgagtcatccactcaagcaagtcttcatcctggtagccatttggaaagcggttgactagagaccgacatgtagtctgtgactggggaacagttgctttttgtgggagactaattgatctgtgtttgattcaattctgtgatattgatcttgacggcatcatgttttcctactaagtcccaagaacattcctggtcttcataatcccacttcatggtttgaaagtcaaaaatagaaattcatatgacaaaatggaagtcatattcatttgatcatttttcttttcctttaaaaacagtccttaaaagttctttggggtagggtggaggcagcacttgaagaggtcagcagccatggcttggtataaagagctcccctgttcctcagaggcctagaatttgtttatgaagggctctgtttcttgacagacatgacaagacacagtttttgaagtcctccgcatcaaagaatgtacacttagttcagcatgaacttctgcttcaagaccagagcgaggtagctgctttactccaacttttgtaatgctccaagagattaagtgccctcatcttcagtggacatcaatgttttgattagacaactaactttcctaataaatttctgggcttcttctgaataatctttcaaaaattttagtgagatttctgtacatacactcgggagacaaaatcatgatatccctagagtttttattacatcctcattattcttacctatttcttcagcagtcctagcaatgagaaccagacaagatcatcttggccaaacgaccaatactattggtttactgccccgtttcagttggagacaagaacggtggatcctggtcacctccacggagggaacacagagaacattcactgttaaatatgacacctataattaggaaaacctatggttttaccatagcagttttacagacgaggttatttttggggtgttgaaaaaacagcaattaaaagcttccaacacagtttattcatgccccaataaattatttccccaccaagtatacgctcttaaagaaacgcctgatgtctggcctcagtgtcctcacgggctaacgtggcaattattaagggtgtagaatttgagcaaactttctaaacctctcctgcatgtcttattctaattccacagccccttaaatcgcctccctgggatccaggcggcttggaaaaaatgaagtctgaacagccagagacctaaggaatcaagtttcatttactaagaaaaactagaaggactgcgattagattaggcaaggtgggaaagggataccggcaagtaaagcgccggaaacttacaacttgggttattttctaactggcgtcttgcaaagggacaccatgtaggtatcccgctcgtcaacttgtaaatgaacttcaggttctctttggtggcaggagaattctgaatgtgagaacctggcggccgttcaacgacccgccctcggggtacccagggggcgtctaacgcaagcctgatcgtctggggccaaggcgcagggcgagcagggagggaggaggagaaccagggccgtggccccgaaagcacacacaaagcggcctgactcctttggtgggaacttccccggccgccagcggagcgggagcgggagggggcggcggagagggggggcggcggttcccctcgccgaggcgatgaacagcgctcgctaggctctgggcgggcgagcgcgccggctacctcccttccccgcctccgccggcgctgcctcctccctccgcccagctcggcctcccttgctccctcccctcctagctggcttcggcggggacggcggcggcggcggcgggcggggagggcgtgcgccggccgagaggtgtcggcggcgaggcaaaggaagtttcaagtggaaggtcgtccgtcggccggcgcgtcctcctgctctcctccgcagcatcatggcggacgagcggctcgcccgtgcacgtccagcttccccagcaggcggccccggtgacagcggcggcgcggcggcccggcgccgcgacagcagcgcggccccggcagctcccgctgcccggccccggccccggccccggcggcacaggctgtcggctggcccatctgcagggacgcgtacgagctgcatgaggttatcggtcagtgcggcgggcgcggcggggccggcacaggccgggtgccgaggccgggcgggagggggcgcgggatgctgggctagcctgcatgcacgccctggaggcagagaggccggcttcggggcctaatggcctcaacaattttttttttttttttttttttttttttaatttttaatgtatttgttcgttctatgagcgttggtgctgcaggaggcggcgcggcggatgtgactcgcactgcagacgagccgcatgctgcaaacttttatctcagggatcgccggggcgtcggagcggaggaccaggcggcccacgtcttcctccccccgcgtgccggaccgcagcccgtggcggtggcacggaacaggcagccgcgggtggggtgtggttgcgggggccccctgggtttccaggccccggggcgccgtcctgggggactctgcgggcgacgtcctctgcctcccgtcgtgaccctctcgtcgtgggtaacggggccacgtagaagccgcggaggccccagtgcttttctgaggccggggaggatgctggcctctcttcctgacagccgccactccacgcccgccttgcagcccggctctccgcgccactcggcgcgcccgggtacccgcctccctccgtgccagggtgcgccgcctgccgcccagtccggctccccggggaaagcgggtgccctggcctcctgccctgcaccgggccgatgcttccctctgtttcaggccgagctgcaagagtgaaatccgaggctgccggtgatctgctctctgcctttcgttgccttctggccggctcacaaatatcaccttatcttacatttttaaatacctggcagagtcgcagggctcggcgttacttttccttgggccaagcacttgaagggccaggagatttgttttgtcccttgacttagaaccttccctattggatcatccagtttgagagtcttgtcacttagggaagcctccaggttaagtgggccctcagcgtctaaccttactgacgcagggatgggatgttgcctttccagaatcttggtatataagtacagcgatgaaaaaggagttcagaatatttatcttaagtattttttctaactttcacttcaaaaaattcttcacctccttttaaaaaaattaaaacagatataaaaatttcactaggtgtttaaatgagcctttatcacctgctattggggaataaaacagcatagacggaaatatatatataaatatatacataaaaatatgtgagaaaatgttgggcaggtccgtaacctaggatatatacaagcttcagataacctataataggcatctgtagacaaaattctttgaaaacccagatctttcataatttttgaccaaagactctaaagggatgagtcttcatgtcactgcctgaaatagcttcaggggcttctcaaagcctggaatattccatggaaacctctttaacctggcatataggccctgtaccctcaacctgcctgcctcctcccattgtctactcttcagtgattgcttcctgaatacaccgctgtcttccgcacatctggtcttccattctttgctgccttgcagaggctcttccctcctgtgagtgcccatctttgtgtactaaatctcactccgcttccaaggtgagtgtgaatattccttgaaaagccttctgcttctttcaaggcaaaatgccgtggtttcttctgcccctctttttacagacctcatagcatgtaacctcatagttgttatttgcgcaacaagatctgaaggcctgctgtgtcccaagcattgccccacttgctagcaatatagaaattaacaaaagtgatccctgccctaagttgttaggagacatagggaaaggatcctataggatgtgatgagtaagtactgggagagcccgaaggagggagtgactgccaggaaagagaaggaagcagagtatttcttagtagaggtcgtagttgagctgggttttaagtctgagtttgtaaggtgcttaattatttccactgttgccttcactaaccagctgtgaactctgacaggaagaggtgggccataaaagttgaataatggtatctgccacataattctccatagagtccataggattgggagaagttataatcaatttatatacctacttggtcaattattagggttaaaatacaaacgttgccttttgaaaacagtatttttttgtgaactaataaaatcttagtttaagttgagtgggattaatggcaggacttctttctgtttgcagtcccagcagtgttaattatggttggtcagtttagtggaaaaaaagaaatttacctgaggaatttgagaacaaaaacacctgcttattctaccctgacttttgcgcatttgcattgtgggaagggcttttctacatttaaagtttatctcatattttcccaactaaaagagaaagagttggcctgtgtggaggccctgttattgaaaaatcaaattgctggaataggtttttcgcaagggcttaatgtttataaggaattacaaacctgtttccatttagggtttaatgctagttgagagattaagactgaacttgtggttaagcacttttgcttaaacattacacgcagaagttagcagttcaaacactgaaccagtttcaacatgaatgccagttgacagcctttgcttctacccgccatacggcaggtgtcatatgatatgactccagcagtgtgaaccgtgaccagcagcaggaggctcagatgtgcctgaacagaaaaccaaaggaggcaccgtgttttaactttccagcatggcacgggcacggaggactttttcttcatttccttctgggcagagtttggtcccccaggattaagagagaataagtttactaaaatccaaacaaagcaggttcagttgtttgacttcagttttagaaaaataaacacaggattttgcaaacctaaaaataaagttttctctttattgtattgttgttcttgtgttttaaaacgtcagtggagaaattgtaatgctcttaggagtattctggttcataagtttattcatgacctggaaatgatgtaaaatcgatgggagggagctttatatttacagaggggttaaaaatgttggaaattattaaattccttcttccagacattgatatccttgtcttagtagatttcaaatatttctgtctttttggaggctttccgacctgtttatactcttcagccttgttaatctttgttccttacctctctaaagaaggaatttgggggtgagttgagcccccaaaagtaggtacccctacctttagaagtataaggggcacttaaagctatgccagttgaaaacttagtttatttgttgggggtgttaataatattacctagatttgctaaacagggaatgaaagtgaatcatataagtgtttacttggccatccgtaatggaatggagcagcctcaatgaacttctcattcaaagaattgtagtcattgaagtactaatttctgtatttgaattaggtgattccagcaatgttgttatctttgctgaatttcttctgagaaaccctagactcctgcctcagcaggagtttgtttgattttcttagggtttttgcaggatgcacctttctttatgtagttttatactagatttctcagcattgcttcacttttgtcccgggtggtcatttagaatgacctaaaagtaacaaattgccatcttagtcaacacgaagaatttgagttctagaatcctggacatggtttgacagagggttcctttgaatgctttatttctctcctgtgaggcattgtttatccattcaggtgcgttttactcaggtccaggtaatagcacatatggccaggtctttaaggagcaacagcctctcgtaaaatgagattgtaaatagccctgggcattcccactttgctctgtgctctcagagtttctgtggatttctatggtttgggggttagaattggtttttatagatatcctagaggcagtttgaggacagtggtaccttcgctggcgctagggtaagggagccggagcactgagtgtgttctgatctcccagacctttataccaggctgccttgctgctgcagtgggttctttgatcttgattagtttgtttgttgttgtttttaaaatactaaatgatgtctgaaatgctttgtctcaagacagggctttgattttcatttcatttcactttcttttttaataaatagaaaaatgtatatagaaatgttcttttgtattttgtatttttttttttttgataaagggtctcactctgtcacccaggctagagtgcagtggtgcaatcatacctcactgcagcctcgaactcttgggctcaagtgatcttcccacatcagcctcctgagtagctgggtctataggtgcaaaccatcatgcctgcctaattttttttttctttttttatttttaagaaatgggggtctcactatgttgcccaagctgctcttgaactcctccgctcagcgatgctccggccttggcttcccaatgtgttgggattacaggcgtgagccactgtgcctggcctctttatatatatatatatatatatatatatatatatatatttttttttttttttgtaagagtcttgctctgttgcctgggctagattgcagtggcgccatctcagttcactgcagcctctgcctcctaggtccaagcagttctcctgcctcagcctcccgagtagctagtattacaggcctggctaatttttgtattttttgatagaaacagggtttcaccatgttggccaggctggtcacaaactcctggtctgaagtaacccgcctgcctcagcctcccaagttgctgggattacagcgtgagtcactgtgcccggcctcttttgtattatttttattgtggtaaaatatacacaacaaaaattgtaccattttaaccgttcttaaagtgtgcaattcagtagcattaattatatttacaagataaatactcttttaaatgtgctgtcatggggctggggggagagatctcaagatctctcttgaaactgtggtaaagtgactgcaatcctttatttatgcatttgatttttaactagtgatattatgaattcttccctgacttttatggtttattgtatagtacattttgtgatggtgtttgaaaataagttgcagcagtgccggctctggagtctgacagcctggcctgtttcatgtcctgcaatggcggtcactgacgctgcgaccttgagcaaatgacttagatgtgtctgcactcagtttcctcattggtaacatagggatgataaaaatagggttgtgaggaatgagagaatgtaaagcactgagaatcgtgcctggcacacagcatgctttcaattagtcttagccataacttctatagacttcatttgctaatcagatgcaagttatcaggagagaacacagtcctatctttggcaggattctggagtggcttgaagatttctgtgctatgtttctagcagggaggaagtgggaaagagaggttgttccctattcccactcttgtgctgggctgctggaaggggcttacaaggggagaggcccctggggatctggcttccccttgcacctccactgctgtgggaggaaactgaagagacctgtggagctcctggcaatttggacagctcaggggtttaggtgccaaatggccctctgacaagtgatgagagcatcctgcgggaaggttgctgaagaggagcagcccattatgagagggctccgagaacaacctgctaggactgcacttttcctccacctctgagtttgcccggaggctgccatgctggcaggaaatgctgctgactaaaagaaacgctctctgtgtgtcccagccagtgcgaggacagaggccttcattttcagataaagtcatcaccattgcttccctgtctccttctttccctctttgcttttccctcagtttataaatattctcaagcctgtctcttatgtttaaatgacaaaagagaacaaaacaaaacactctccctacttctttctcctctggctactcggttatctcgtttcttcctttcactgctaaattgttggaaggaacctcccattccctctcagcccactgcagtctggcttctgccctttccctaagaaacccaagttactctctgaaatcactgtgactcttctgtggccagagccagtggacactgcagtccttttctctgctctctgcagggttaggtgccatctttcattctccttttggaaaggcatttgcttgagcttccatgccatgccttccttctggacttcctgtactcccttgcctgccccagatccacatctctgtctgtctgaagcttcaattaccacatcaaatgctgagggtcttcctgactgtataccagtgtttggactacctttttaatgtcttcgtttgaatgtttcacaggaacttcatacagttaaactcattgtctctccaccctggcctcagtcctaatcttgtttcttctatattcatcatctttagagccctcaagggcaaaacctgctggccatcctatactttcctgtctttgtccatctctcacatctgtttggtcaccaagtcctaaatactccacctccttgagatcttctttgatttgactctgactcttcatgtcagccaccactggtttagttcaggcccttatcgattcttatttggattattgtaataatttcctaaccaggttccttttttccattcttgtttctggctgtagtgtgcattgctaccagaaagatactgctataccaaaattcttgatcacgttgctcccaggctgaaatgcctttagtagctctcccgtcaccctcaagacttaatttgaagcacagtgtttaaggtcttttgggaattgtctcttgcctcccttttcagccacatcttgtaatttccagtctcaggacagactctccagccagtgggaaccttttgcagttgctgaaatgcctcttctaggcaagatttccctctgcttggaacaccattccaagacccttcccttccatttttcatctatgtagcaaagagctctgtcttttcttttaaatattgcccttattgaagtataatatgcatgtggaaaagtgtacatataaaaaatgtatatcttggtgcatgttcatgaattgaacacaccatgtaaccagcaccctgactgggcctctcttctcataccctgaacaagtgatttcttgtcacacaaacaatctctgcctctagagcccccctccccccttgcccttcaggctctgttgggtctttcgctccctggcagttgtcacactatctgcaaattgtattttccttgccagcctggctctagactgttaagtcttccttgaggacagggtctctcatctccctaccctgcatgtcataatagatatttaataaatgttttctggatgaagttctgagttttggggataaatactccttcctcaccttgtggaggaggaacattgcctgacgtctaaaaatttgcctcactggatcctgaggatttgatcttgcccgtggttaatgatggggcttatttagttgcgtttgggccaatcagcttaaagggctctgtagaaattagctcattaatcctcacagatcaagagtaagcactttgagtgcgtccacctgcctgtgttgtggaggtaggcaggcagaggcctggctctcctgaggtcttaggactgagaggtggcctttctggctggattaaaggacccagagctccctgccacagttctggcatccgtagacattgtagggtggagtggggaagtcccacactgcccttcaaaagctctagagctttcttttcttttgtatatcagtgatctctctctcttgctgttcatgtatttatatataacactcaccttgaagttctgtggagcctcttcctgtgtaggaatcagggctgctggagacgatcagggatgcaggtgaaacacaggagcagaattgcagaacaagtggctttcaaaggttgttaggatggcaggagttctatttttataacttataagggactgacatgataggatggctgtggtacctgctaagaccatagaaccgggtcattctaatagatgttataattcctttacagtgtactttttgggaaagtttttttttcctatttaaataaaattctccatgtaatcatgtgaagtcatacgttttcctctaggatagttgtgtttagattataccaaaacagctcttagttgaagtgattcaagtgtttcttttttccctatctgccatcaattggccaagtttttgatactagacaagaattcaatatattaattaaaaagtcatttcagacttggcttaactgaaaagcagaagagaaaaatcctttagagaatggattggcatactttatttctagagtcgatttagataaatactttggaatccgatgtgagtaaatgatatgtttcacatttcttctcacttgccaaacagttatttgagaataaactctggcttagctttaagaaacttcttggacattgaggattgagattaattgaccttttaaactgattgtgtattttgatatatgggaaaacattttaagatagaaatggtagagacctctacattcatattatccctgactttattttcaaacttcttccaggtaagtggcatttagtataactctcagaagcctagtattgggggtgctcatgtgattcttcccttaggtaaaaaatatacattttattgacatttatgggtttaggtttctaacttttagttaccactggagctatttgtcagaaaaaactagatggaaagtagaggtggatgactttctgccctgtgaatgatagatcttcattcagggagtattttggagccagtgacctgtgacagttgtgagacttctcataatcattctgtggatggttggggtcttagaagaagtaatgattttgttttgaactggttgcatcagtttgaaccagagtttgtactaagggtattccaactgctttatttcctactctgtttagtctggggattgaaaaaggattacattttgggtgggttggtgcctattgacctatcctgtgtagcttagattttaatttgaatcatctggttctctttctttctctcaggcaatgtcactatctctgtttgtttaattatggggtgactcaagaaagcaaaggaagaggagcagcagacggggtttcctggggaaggaatggcaggtcatggctggtttttataagtgagttcctaagtgagaagtggtacaagaatatagagagaattaggaaatttaattttagaagagaccaaaggaaaaaaaatccatcccagctgctttgtcttgtaactgaaaactctctaatggccaaagttgaagaaacttgcctatggtcccaaagtccttagaatcccaggctccaacccttcatgctaaaaactctcaataaattaggtattgatgggacgtatctcaaaataataagagctatctatgacagacccacagccaatatcatactgaatgggcaaaaactggaagcattccctttgaaaactggcacaagacagggatgcactctctcaccactcctattcaacatagtgttggaagttctggccagggcaatcaggcaggagaaggaaataaagggtattcagttaggaaaagaggaagtcaaattgtccctgtttgcagatgacatgactgtgtatctagaaaannnnnnnnnnnnnnnnnnnnnnnnnnnnnnnnnnnnnnnnnnnnnnnnnnnnnnnnnnnnnnnnnnnnnnnnnnnnnnnnnnnnnnnnnnnnnnnnnnnnnnnnnnnnnnnnnnnnnnnnnnnnnnnnnnnnnnnnnnnnnnnnnnnnnnnnnnnnnnnnnnnnnnnnnnnnnnnnnnnnnnnnnnnnnnnnnnnnnnnnnnnnnnnnnnnnnnnnnnnnnnnnnnnnnnnnnnnnnnnnnnnnnnnnnnnnnnnnnnnnnnnnnnnnnnnnnnnnnnnnnnnnnnnnnnnnnnnnnnnnnnnnnnnnnnnnnnnnnnnnnnnnnnnnnnnnnnnnnnnnnnnnnnnnnnnnnnnnnnnnnnnnnnnnnnnnnnnnnnnnnnnnnnnnnnnnnnnnnnnnnnnnnnnnnnnnnnnnnnnnnnnnnnnnnnnnnnnnnnnnnnnnnnnnnnnnnnnnnnnnnnnnnnnnnnnnnnnnnnnnnnnnnnnnnnnnnnnnnnnnnnnnnnnnnnnnnnnnnnnnnnnnnnnnnnnnnnnnnnnnnnnnnnnnnnnnnnnnnnnnnnnnnnnnnnnnnnnnnnnnnnnnnnnnnnnnnnnnnnnnnnnnnnnnnnnnnnnnnnnnnnnnnnnnnnnnnnnnnnnnnnnnnnnnnnnnnnnnnnnnnnnnnnnnnnnnnnnnnnnnnnnnnnnnnnnnnnnnnnnnnnnnnnnnnnnnnnnnnnnnnnnnnnnnnnnnnnnnnnnnnnnnnnnnnnnnnnnnnnnnnnnnnnnnnnnnnnnnnnnnnnnnnnnnnnnnnnnnnnnnnnnnnnnnnnnnnnnnnnnnnnnnnnnnnnnnnnnnnnnnnnnnnnnnnnnnnnnnnnnnnnnnnnnnnnnnnnnnnnnnnnnnnnnnnnnnnnnnnnnnnnnnnnnnnnnnnnnnnnnnnnnnnnnnnnnnnnnnnnnnnnnnnnnnnnnnnnnnnnnnnnnnnnnnnnnnnnnnnnnnnnncagtatagatagtagcaaaagaccttggcaccatcccagatgtcccacaatgatagactggattaagaaatgtggcacatatacaccatggaatactatgcagtcataaaaaaggatgagttcatgtcctttgtagggacatggatgaagctggaaaccatcattctcagcaaactattgcagggacaaaaaatcaaacaccgcatgttctcactcataggtgggaattgaacaatgagaacacatggacacaggaaggggaacatcacactctggggcctgttgtggggtggggggaggggggagggatagcattaggagaaatacctaatacctaatgttaaatgacgagttactgggcgcagcacaccaacatggcacatgtatacatatgtaacctgcacattgtacacatgtaccctaaaacttaaagtataataataattaaaaaaaaaaaaatcccaggctcgtgattctgccctaattcagtattttcttccacttatatcacattgtttccttgttggtggaaaggcagatgttagaaatattattgactcgggccggccgtggtggctcagggacgcctgtagtcccagcacttcaggaggctgagacaggcagatcccaaggtcaggagttcgagaccagccttgccaatatggtgaaaccccgtctctactaaaaatacagaatgattagctgggcatggtggcacatgcctgtaatcccagctactcgggaggctgaagcagaagaattgcctgaacccgagaagcggtggttgcagtgagccaagatcacgccgctgcactccagcctgggtaacagagtgagactctgtttcaaaaaaaaaaaaaaaattattgactcaataaattttaaggtactactaaaattttttttttttttgttagagatggaatcttactatgttgcccaggctagtctgaaactcctggtctcaagtgattctcctgccttggcctcccaaggtactgggactacaggcatgagccactgcatctggcctatgactcaatagagtaaaaatatgtctgaataaataaatagagtaaaaatatgtaggaatcagtaaaaatcttatgtctttaggggcattaaaatgatttttatttacttatatttatttcttcatcagggcatgtttatgtaacatgtaaccaggttatatgtaaatatacaatgtcttcatttcagccatcaccttttgcctggtctattacagtagattatgtttttaatctttggttataatctgtcagtgaggtggaggtgggtgtgtgttgtaaagtaaggtggaggaacaggaagttgagggttgaagaaaagtacgtgaaatagacatacaccatgactgatcattagttggagagaggtggtcccttatgcggggctgatattttataacaatcagagcagcagcagtgttcccagaagaaaggggctagcaccacactgtccagcttggtagccactaaccatatgtggctatttacatttaaattaattaagtaaagttaaagaaatagggtacagtccttcggttacactggccacatttcaagtgctcaataatgaactgtggctacgactgccttacaggctagtgcagatatagactgtttccctcatcacagaaagttacatggggtggtgctggatggtaatttctcggaaatgttcaaagactggctaaatactgttatgatggctgtaagtagtgtgaggccaccttttaataacatgcaaaggtattgccactgacttagtacaaaaaggagacaggcatcacctgatttttaaaaaatgttttgttttcactctgtacctatttgcaagctagtcaattcatctcttcagaagaagagtattcttgtgtgtggtgaaacagatacccctgtcgacttaggaaaatagttttgaaatataagtttttatcttactgacttacctcattttggaaatgttcttgtgatgactaaacacagattctgtccaaatgaaacccaatattttcagaaatatcataatgtgtcatatcttaaaaaagatcattttagagtcttttggttggatatcgtagtcagaatcacttcagtttgtcttatgttatgaagaagggactgattataaggtttaaaaaatgaaattacaaagaagttctgaaattaaccctaattaggaaaaatagtaccaaaattaatttcagtcacttaaacggtgaatttgaatcatagtccctcttttcctttgagttagaaacattttgggatttgagtgagtcaaggattaatagtttatcctaagttacagatcacaaagcaagtaaaacatcatttaagccagttccttaatagaaattctaactcagcaagcactatttgggtaggatacctgctcttttgggagaaggaattaatgactgaggggtgggaaaaaaatctgtgtagggagattaagtgggtttaattttgggcaactcaggaacagtgtgtactttctcacatttagtgtcccttgagtgaccggagctgtaacagagaatgttttactatgtaatccctttaaaatttttccttgtatatgccctttcaagtttctgaagtctgaaacccagtgcctgaccttaaacacaagttgttgtggaaacatttttaatgtggcacctttcctgaggagtcgggtggctgaaataggactagggaaaagtgtttctgtgtagtttcaaaatgtgatcattaggatgaacgtaagaatagtaatatttttggcataagtcaagatcggggctagagtgtttagtaaagtaaatacccatcagttgtttaaaaagtgacgatctctgatctctagggccaagagatgatgagcctctcagttcatctatagccgtttttgtgattgtcttcataaatgctgcaagactttctgaaggctataatttcatgtcctgttctttttttttttgagacagcatctcactctgtcgcccaggctggagtgcaatggcgcgatctcggctcgctgcaacctccgcctcctgggttcaagtgattctcctgcctcagcctcctgagtagctgggattacaggcacctgccactacgtccagctaattttttgtatttttagtagagacggggtttcaccatgttggccaggctggtctgaaactcctgacctcgtgatttgcctgcctcggcttcccaaagtgctgggattacaggagtgagccactgcgcctggccttcacgtcctgttccttaaagcccattggaaatagataatataggcagctttgtaacatatttttgcttaaacagtctttatggaaaaggaggataattgaagttccagtgactaggacaggtaaaagttacagttggatgctcgttttgttcgtctatcatattaaaaaatgaaattatttttagccatatgtagttgtttaaaattaaatatttccttgtcttttggagctacctggaagaaagggagtgacaaaaataggaaagatgatctttatgaggtatgactgaccttcaattaatcatatcagaatttttatgtacagaaagtgttctttccttcagggggatgtgtgggagggtgtccatttttactttatagctacattttatattaaatgaaaacttagatcttttgccgcaagcaggcttatgttgccatcggaagactatgtgaaaaacgtgacagcaagtgtgtgatttgtgactcctgtgtgcgtccctgcactctggtgatgtgatgagtgtaactgtggatcttaccaggggcactgtgtggtctctggaggtcctggagtctctgatgcctattattgtaaggagtgcaccatccaggagaatagagatggctgccaaagattgtcaatttgaggagctctaagacagatctcttctgtgaatgcaaaaaatatggctacaagaagaggtgattggtgggtggccccttcctccccccacatcaagctgctgcagctgccagaaaagatgcctactattaccagcagagagggagcggagcccagagcatcaccaggagtgcctgctagtatactggcactttgccacccctcctctcccttcacccagacacgtggtagggatggaaaaggattcttcacagagcactctggcacactgtatcagagaaaaattgatagattagttagtggtttttcttgaattcgagaagcaaagatctgttctccatattgatatgttctccctcaaccaagatcttctaaaaagaaataatattttagtcttctgcttgaggagttgactgtgaagctacacccagtgaaaaacatgttcttgcagcagctctggtggcagctgtccttgaggaaccttcggtgtgtggtgggaagctatcagaataagaaatgtagccatttaacacttaaccatttaacatcttttaacacttgtgctggtgtcatgttattttcctcctgagaaattggaaatcctttctgttgttattatgttaacaaaggtggtggttattttctggtaaaaaacaacagcagcaaaaaacttagccatttctgtcagtcctcctatgaagaaatgagactaattttctaaagtgacattaatttgcttttaaaatacttccaaaaatgttttaagcagtggtatttgtattggaataagtatgtaaccttacaaaatgactctttagcatgacagtgctgttagttgtttaccatcagttttgtttactattatttgtagtaaattctggatcactatttcatagaagtgataagactaggacttggttggagattacagtgagctgttggcatagaggtagggattgcaaaagtaaaagctgatggtagctgagaggagtctggtagggtggtgggtgggattctgtagtcaggtctgtgaagccagggagaaaatggacgggctcattccgaagcaaagactactacacagcagcaagagacctcaaacctgagcaggtctgagaaagggggagaataagaacttgggggcatttccaagtttacaatttgcaggacttgacaaggggtcaaggcaagggacttgatagggagagtgtaatttttccaaggatgattcagcagcagcctcttgttgaggtaggtgcctcttttgaagttttgccagcgagggtgcctctgacagactgaaaggctcggttctctcatcatggattctgacattccctgtatcagctatctatagctgtgtaacaaagcatcccaaaacttagtggcttaaggtaaggaccattgtacttgcttataatacaagttagcaatttgggtttggctgggctgggcatttcttcagtttggggtcagacccatggtcagcttggctggggctcttttaagatggtctcgctcgcgtgttgggtggttggtggtggctgttggctggccctcactttccactgatttctcatcctggaagaaacttgcctgtactttgtttcttggctgcagcagtgttctaagatagtgggagtggaagctgcaaagactcttgaggcctagtcttggaaagtcacacaatgccactctgccacattccttgggttaaagcatatcacaaggccagcccaaattcaaagggaaaggagatagatttttctactttttgggaggagtggtaaaatcccatggcagagggatatatatacaaggatggaaggaattcttattgccattttgcaaattccttgccacagcagctcaatttagcacaaggaagatgaatatacaatatttgtcattcatctaacttttgtttttcacacgtattaggggaaactattacccaactacccttgtgtacactctcgttgttatagtgccattgattataggtttcatagactaatttgctgtatgaactaagcatcagagtgatttttgctgtagaagtggcttcaggagtatatcgcttgctaaacaatctaaagatgttgattccaatgtgatatttgaaggggagggagggtgtgtgtgtgtaatgctgatccttttttagccttgaggtgttttattccagactgactttcttaaaactcaacaccacattaaaaacatagattgtttgcatgcatatgtatttgtttctcctgccacctacaagtcatgagctagatttgtcacagcccgaaaaataacacgttatctgtgcatcactcaatttaaaggtagatttttgcttaattaagaaagtttctttactttgaagtcaatccagcaatattttattccccgtttcacagtttttcaaaaagaattgctagcctattaggatagaaatattagaagctttgtaatagttactgacagaattacagagtttgcctctcttcattttttttagttcttgttttagttttttttgttttgtttagaaataatagaaggaagggagatgtactgttataccttttaatttttttttttttttgagtcagagtcttgctctgtcacccaggctggaatgcaatggtgcaatgtcagcttactgcaacctccgcctcctgggttcaagcagttctcctgcctcagcctctggagtagctgggattataaggcacctgccactacacctggctaatttttgtatttttagtagagatgggtttcaccatattggccaggctgatatcttggccaggctggtctcaaactcctgaccttgtgatccacccgccttgacctcccaaagtgttgatattacaggtgtgagccaccacgcctggcctattttaccttttattaagttgtaaagtctggtaaaagcccttatcataaaatattatatgcttttagatgtgggaagagggctaaatgttatctttataaagttagagatttaaaggctaagtgacctgtttattacattggaagacaggtctggacgtgggattagaattgtggagtgtccttcctgtggctggcctgagttcctttctcatgtaaggaaaaagcactgagaaaaagatgttatctggatctctgaggttattaaaaattccaagcttatttaattaatttatttatttgagatggagtttcactcttgtccaggctggagtgcaatggcgcaatctcggctcactgcaacctctgcctcctggttcaagtgattctcctgcctcagcctcccaagcagctgagattacaggcatgtaccaccacactaggctaattttgtatttttaatagagatggggtttcaccatgttggtcaggctggtctcaaacccctgacctcaggtgatctacctgcctcagcctcccaaagtgctgggattacaggtgtgagccgctgatcctggccctattttatacttctcaaatattatacaaacaataatataaggtcattgtagaaaatttatacaacactgatgagtgaaaaggaggaaaagtaacctcatcacccaaggctagacactgtttgaattttgatgtaggagtatatatttacatggcatagaactttaaaaaaaaaagtgtaaattgatatttttagaaatgtctaccttttttgtattcccagtactttcacatttaatttgttacggcaagtaaaataaactagtcttagattaatacttgcttggcaaaagtgattttatttcttgagattttggcatacactgacaagcatgccttatgattactgcaaagtgtgttaagtgtattttttctcatacttaaatgttttcagaatcacggaatacatctaatacaatctactcttaatgtctgtgttacgacttagatttcttaggagtatctattatactttgccttttgtcttctagatactattggatcaccttattctgatatttggcacttcgttgattggtagaaaaatcgttttggccaggcgcggtggctcacgcctgtaatcccagcactttgggaggctgaggagggcggatcattaggtcaggagatcaagaccatcctggctaacacggtgaaaccccatctctactaaaaatacaaaaaattagccgagagtggtggtgggtgcctgtagtctcagctactcgggaggctgaggcaggagaatggcgtgaacctgggaggtggagcttgcagtgagctgagattgtgccactgcactgtgagactccgtctcaaaaaaataaataaataaaaaagaaaaattgttttacaaaaagttctggcacagagagaagttaagagtcagtaactttcttactgtttgtggatgtgtttgaacagagtagtgacttttggatttcatagtgacttcgtatcaaacctagagctggcagcatgaggattttctagatgaattaaatatgtggtatctttttgtagaactagctgtgtgatttcatgcggatgtgggagaaatgaataggaatttaatttgatgatatgaatgttgaattttgtggtccgctaaattttaaggattttatagtatttagaacaaaaggacaaaatagcttttggcatgactagtctttattttaaatgttttttaagttacaaatgtataatatttatgaatcaagtagatgaaaataactcccaactttcattgcccagagatggcctgtatggccagtttggtgtgtatccttgcagatgtttttctatgtatacatctacataaagatttttccaaaatgtaataattttacatgtaatgtggaaactatacgtattgttctgcaatctgtaaattttacttcttcaaagtaatatatatatattacttgggtattttacttctgtatattttctgtaaatatttttagtaaagtatacacattataaatattcacagctgtcattccaggctatttctcagagatccacctcctttaaaaatgtgtattctggatccattgctattctatgagtgcagctgaatttacttaactaattcctttattgatgaacttattgattgtttccaagtttttattatttctgtgggatagatatccagaatttcagatggccagggccagtggtattgcatttatacttttgatagatactgtgaaaatttcttccagttgtactaattaaatgctagcttatttgctcccattactgaccttaaaggtaagagggagttatagtgagaaggcatcttgccttattcccgatttgacccagacctaaaatatctaaggtcaggagaaaatggtgggtggggtgaggtggggtgggatggttgggtaattgtggattggaaaagaaaaaattattgcctcagtttagggaatgaaagttgcatcacttatggtctaaaaaatgaagtgtgatgaagtttatttgtatgagcaaatttatggaaagatttttttgagttggtgagcagtctggattatagaatataacaaaattggttaatctgccctttaggttgtaaggaacagggactcactaaaattacccaaataatggggcattctttataaaggtagatgtgggaatagggggacaggaatctcatccataatcctgggttttctagcatcctggaaaagttgagggtctcggtcttgggaattgcagtgaaatgtctgcatatggactgggaagtggataagacctcagcagcaggaaactttggatcctcactattctggatcctctaaccttagtgtaaccggccaatcagcatgtgtttgctttgctcatgcccacctgcttctctggctgtttttacctggctttcttacctactatctgtgcatgtcttctctgtcatgttgtttctacttagtcagaattttggctcactcatagctccttatggcccatccagcttctctcttctttccctgttagccgcaactatggctgctaattgctggattctgtctgtatttcccaatcttaatcccaaagattgagaatctagtttttagtgagtcccttcatagaacacctgactgccctaaactcagacaccctccttggagaagggtgtagcatcggaagttcctgcctgggaaggaatcacaagtgtggcaggcaccactagtgagtgttttatgtaatactgctcttaggtaagtaactggtcacgagacagagacgacatgtcaccctaatcagcaaaatgtaatcctgatctaatgtactttctttgttaaaatatatacttacaatgtgtttaaagagcagtttattgttttgagtcaataaataactttcttccctaggaagaacctcccttttcccttatggattgtaaattgggaaatcttatgcccagtttcagttataaattgtcttaaattctgaaataatgatacccgaatcctgagatatggtctggtcttgccttttctgctggatttaaagtactatgaagtagttcatcctgtttatgtaatggtgataaaattctgaaaaatatacctggaacctgatactctttgaggaactaactttcctatgtcaatagttttatcagcagtatcttctccatggatattgagaagagaatctgatcctcccaaattttatgatgtatttgatagttttatcagcagtatcttctccatggatattgagaagagaatctgatcctcccaaattttatgatgtatttggtggtccagtgtttcagagatgcaagtttgttaatatcccctggaagatttctcaaggttgctttgttttcctcttcagggtcactattaagtatccctttttgccctgttctcttcctcctgaaccccattctgcttcactttcaaaacgatggctagagggttggatatgtcagtgatcatgaactgctgagtcctaaactttggtgtctgtgtccctcagaacctcaaagggcagtttccctgtgactttttaaaatgagaaccatgttcatgaagtgctgtcttagtttcagatcacttgaaatgtaatctgatttgagagacagtgtttaagctcctgtttaccaaaaggctgttttgattatcattttgcaggaattgttgctgggtaaaagacaaatgaacaacgtactcagaagagatgaccaaatggtctgatttcatgttggaaagtttcttctggtggtcttgaatctgcgttttaatctccttaaaaatgcctttttagcacataagcaaaattaaacattattgttttattaaaaactatgcagtgctccttattagttaggagaaaaatctcttaaatcctttttgttaaggacatgtgtaatttaaggctttcattttgacagcctggtttcagctgacaggtatgttaatctctatttgattgctttggtgaggagttgaaaatcacctaatgcctggcttagtgtgcatttgtaaatgcgctttcttttggttttcatttcatgcaataatgaaatgaattttcctactgttattttgttatagattgatggtttatctgattaccagatttaaataaacagttgaaccatattccctttgactgtgtccccttgtttatccttttttatttgaatgctgatgggtctttataagcattattatcagcattattatcagtacatatgtatgtatagagcctcttcatcagttatcttgtagcataacagtgctctaagaaagcgatttttttttgttgtttgtttttttagtttaagaatttcctattcttttctattttggtttaattttcattactcttttctttctccccttataagtgccaaagtttatgtgaatatgattatatatagaacatatgactatatataatctttttttctttatgtttacagaggcaaaagatatatttgtgtgtttatgtgtgtaaagtaatacatgacaaaagaaaaattatgtgtaatagaagtaatttgactctggggagaattttactttacgttttgaggtagagcaacctttagaaaaaatattcaaagtcaaaattctgggagggattttttcctccataccaggaggacttttaaaagcaattcaagtcgaccagataattctgatacaaacatttatggagcacctgccgtgtgccaaggactggaccaattactcagcatacttgatgcctgatccgttcctcattcctgcgagggttggtgtgattatctcagttttacaaatcaggaggcagagacttggatgatcacagtcagttgaaggtcacgcagctggatctgaacctagtcttggctgtttgcaaagctgtcacccttgctatggtcctctttgcctccttcacttttgctgtctgacctagctttatgattctcaaacttcaggataagaagtgaattttcttttcttttttttttttttttttgagacggagtctcactctgtcacccagactggagtgcagtggcgcaatctcggctcaccacaacttctgcctcctggttcaagcaattctcctgcctcgccctcccgattagctgggattacagtcacgtgccaccacacccggctaattttttagtatttttagtaaagacggggtttcaccatgttggccaggctggtcttgaactcctgacctcaagtgatctgcctacctcagcctcccaaagtgctgagattataggcatgagccactgcgcctggccaagaagtgaatttctagaagaaaggtccctatttttaaagtagcatcacttggcaattggaggaaactccaggcagaccctggttcagagcccagtggcatcatttgctagctttatgactgagagccagttacttggctcagtgtgttttgtggtgtttcagcaccaaatctggaccatcatattggccttgcagagttgttttaaggattaaagatcatgaatgtgcaatacatagtaaatgacaatgatgattatgataatagcagttagcactgaggagttgttattacttgtcagctcctgggctaaatgcatttcatatttagctcatttagtccatacaacaacccaatggacaggtattattgtctctgttttacatggaaagaactcaatgtgtgaagtctcttgttatttatattttccacatcagtgtacccctccattggtatggctaattgagaattcactgactagagaattcaccgtcatgcaataaacattagttaagcacctcctatagggtaattaagatagataaaagttctcttttcaaaccttatattttagtgattactttttacctatttatcctctaactggttttatttgtggtgttaaaaagggattaatcttatggtagcttaagcacttaaacatttcacatacagggaaatcatgaatggaaatgcttactttccaaaccactttttatgtgtcttcaaaataattaatgctactacattggtaaaaaggctcagaagatatgaggagatgaggaatcttctaaaaataccctcttactactcctctcgttctttcttccatcacgcaaagtacctaacaatgcaattgataaaataagttgcataaagcagcaatcctcatggcctgtcatctctccagagcaatgatggggacattgggaggtttagaaaagttattagcattaatgctaaagtgctgacagctgaaaagagcacagaggaattctggcagtggactcacagttcattatagcagggagagagattcctacaccaagtgaaaacactgtagggtttcgctcatgtgctccccaccattgaaaccagactggaatattcagccaaaacagcagactgttagatatttaaaagaaggaaaaaagatgcaaatacactactctataaacatgcctgtcatctcctggctggtagttcaaggtgccatgtgggttaggaaagttcttccttccatgttagagaaagtggaaccatacttattaaatcgtgaaacagggtgggaagagtggagagtctattctttagaaagacctgagcaactgtgagctggctgaaggtcagaatttaaatctccctgctttttcttgatcagacgatgggttaattatcctccatctctttattcggtctttgttgcgccccggtgagtgccagcgttgctacatcttggtgatccaaagaagaagtgccctttacggtctgaccttgaggaacttggaaagtctgcaggagagaaacaaacagggaaatgattataccctttgaggtaattctctggtggaggtgtggtaactaatcgttccatctccaaagtcctcctgtctttcatcagtagcatgttatatagttgtactgttgatcctaaaggaagggatttcaattccaacttggaaattccagccatctattctgtcttgcggactagttgtcttgttccaagatagactagtagtgagagacaggactaatgttttcatacaactttgccattttgttcataaaaagtttttgaagtttagtgctgcctatacaaacatgggttaaatgctaacactaactgaatatacatgtaagtgtgtgtgtatttgttttttgacacgcatgtattaacataatgttctagcttgtatgtaaactctggactctgagacaatcaatgtttaaactttcaacaaggaagagaaataacgaaaagaaacaatggtttttttgttgtacccagcaactaaatttaccattgttctaagaactcgacaaatgaccacaggatgtgaacttaatcgagttgtgcctttgaacaaaggtatcctagtgatagtggaattttttacttcctatcatcctgctcatgtgttcacttgcctgcctcttctgaaatcaccagcagttcagtatgacttaaccaagtaaatgaattactgcaatgcaaaagaaaccaacccaggaaacaagaggaatcaccattatttctgactctgtctcctagatcagcattcgaagccaaagatttccaccttttactggaaaaatactaaatgaagtgactcacttttaaaaaaatgacccctgcaatgcagcctagatttaattgaaggtggtatttaactgaaagtgagggcagtgtgtataatcttaatctcctcagtcggacacatgttcaattgtattatctttgagaaaaagtttttattgcatccagaagaaactaagcaagcatttaatggagaactgttaggaaccaaaatttccctagaaatattgcctttgattttatggaatatttttcttgatgcaattgaaatgacttgcctttgattttgacatctcttttggcgttgactatacatgtcatctctttgggagaggagagctgtatccatgttagtcatctctttcacctatcagtgctctattaatcgctgctctgccaagtactttttacatgcacatctcatttaagattgatatcaagccaatgaagaaaatgaagccaaagatttaaaatatttgctagggtcaaattgagtttctcactctccagagtctgtaaatcccctcttaaccattatgctgtgctgcttagagtggttttctctttgccccaggagaactctcactagataaaccaacagcatattcagtacatgtgtgttgcttctcagcagagaagttctcagctttgttgggcatttgttgctgttgcgaattgagttgtttagtttcctttcattattggcacatgcttgtgatcccagcacttcggaggctgaggcaggaggattgcttgaggtcagcagtttaagaccagcctaggcaacatagtgagacctttatctctatttataaatgtatatattattcacattaaaatttgttaaagaacaactttgattatcatcattattcaaatactcaagcaaaggaaggctctccatctctttccttggacagtacctcatagcataccattatgtttcaaggtgcattctatagtaagatgagcagataatgcttggatgataaagtttaaagtaaacttgtaaatcaaaatttgcaaaaagaaaaaaaaaaagcaagaaaagtaggttaaaggaacttgacgtctcctttttaatatcaaggtaacttgtcagggcctggaaggcatctatcaagttgtgaacactgtctcgtctttttaaatggtgattctaataaatggcttttttagtttctaaacctggaccattagacaacactgagattggtaggagagcaattgtgagaccagagttttgttgcattgagaggagtgcttgcttgccccagaccacttggagaaaaagtcaggaatgggttagatatgttttctttttctttagctaagggcatctgtctgactggcattgggtttggacagtagagggatagaggagacctacacacaactctctatgatttagtaggaggcaaggaagtaaaagaagtcacagaaaagcctccttctccctgaggaagtggacagagatagagacctcttccgtccagggtaggaagtccccatagtgcctgacttatctgtattctgctaggcttttgagcaataaattgagagttaagtgtatgtggaaagtatctgaacacaccgaaaatatctgaagattttttttttttttgaaacaagagtctcactctgtcacccaggctggagtgcagtggctcaatcttggctcactgcaacctccacctcctgagttcaagcgattctcctgcctcagcctcccgagtagctgggattacaggcatgagccaccgcgcctgaccctctgcctactttttagagtgctatcatctcactttttcttccttaatatacaaattatgtgaatctttcaaggttccacctaaatgcccaccccaaattcttgattcatatgattcttagggaaaatgacctgtagctgtgtaatgtagcagcttgggcataattatagcttatttcgtctggtagctttttaagttcctgaagaataaaaagcatgcctgtcctgagttttatgtagtaagatttaacacggttcgtaccactagttgggagctggttgttatttgttgaatggatgcatgaacttctgtcaatcttttgattctcctaatagctttctctgtgtttaattgaggctttccccacgtctttttcagagtctagagcttttggaatctgcttttatttcttaacacttgatttttttgggggtggaggaggagtgtattctgtgttcttctgtttgttctctatggctggaattacttttggaaagatgtgacactgtttcgattttgtctctgagcctttttactcagacaaaatcacaggagtttctctcaggacagtcatgttctttaggtgacttggcccttgctctagcaagcctaccttggttgagcgtttggctaggagaagtgggagagcagttgacgcaaataccgctgtcctatgacctgaccctggtatgcatggtgctgtgccctacggtcactatttttgatgataggactttgtccagtcagcttagcggaaaagatcatacatgttgaacactgcgaaagtgaactttcccaagatattcttttggggaattttctgagcttttgtggttctttacaagttacttgtctaatttgtacattcacctctgctgtcccatgggccttggcaagtgacagctgcagtgccgatgtttcagagtagagaagctttgttagagtgtggggttatctgggaactctcttccaatttatgtggtctagttctgtttaaattctttctccattacaattccctttagcaaaagttatgccagtaatttccatttattgcctccttaatgatgacatggtgttaaaagatgtttatatgatcctacatatcttagtactttcaaaataaagagacttttagtgatttactgctaggaggctatttctgtctaaatcatgataacatggacgtgatcttagaattagtagttatgcttttttcttcctcccctccataggagactatgtttctagggctggctttgactattaaatatgtctacagtcagtcctccatgtccatggcttctgcatttgtggattcagttaaatgtagattgaaaatacttggaaaaaaatggatgattgcatctgtactgaacatgtacagactttttttcttgccattatttcctaaatgttatagtataacatctgtttacatagcatttactttgtcttaggtattactctagacatgattaaagtatacaggaagatatacataggttatatgcaaatactacatcattttatacagggttcttgagcatccatgaattttggtaccaatcccccacgaatactgaggggcaactgtatatcttttttcttttgtgggaagtggggccaaggatcggataatctgtgatcctcacataaaaatattctgaaatgtcagtttatatgattctttgatttttccagatctatatttctgtggtataggaaggtaataaaggttacgataaagaaacagagtattccccgtcctgcatccggatactggcctttttctgattgatagaaattggggttttctaattcatgctgaatctgaatctcctcctccaataatgaaggtccataggaaattctaccaggtggatctgtaatggaacatgttccctgtgtgacttaaggaattcagactcattactttctaggcacccttggtggaatgttcttcaataacatgggagagtgggatgcttttgaagacacaggtagagctgcagagaaacacgtaatcactgattttcgtgttgtgagtttattcacatcataggataatggcttgtggaaatacaaccctggcaggtctgagcagtcttcttttcccaacagagcatgtctgcttctgctgagaacctaggactagagctcaccatattccaaccagcgcccctctgggctcctgggctggcttttaaaaaagccttgttcctagcgggttggttgggtaaagcttcctggtatgggaaaggggcaggtatgcaggtagtcaccaagctggggagtgcctggcacagagccggtgaccaagacctctcaggagatgaaagtccgctgctgttcatgagatcatccatgcctaagaggtgtggcggtggcattagccttggctttagaaagttgaaagcacacgaataatgtcttcttttgaaggtggcttataacaacgtttctttgcctaaaaactcgtatttctgtcaggtttgctcaagctgaggatggcgatttgccacttcattagatgactcacgtcactgaaaaaagacatttagccccttctcctggactgtccaaacctaggaatttcctgcaggaatgccaaggagatcttcaaacagccaaacacaacttttgccttggtgtgcaggcgtgcttctgtttctgtcaaaataaattaggctgctaagtcgtaaattaggaaaatattttgctacttgtgtttcttatttagcaagtagaataaatagctggcctcaaaacaaaacaaaaacccaaaccaacctcaagtcgattgacagaagatgattctgcctttgccaagagtgaggacgtaccttctctgggagacaggaagccttcatctgtctccctctgatttgactcagtccttaccttccatgtacctctggtcaggtcaccttgcccatttctcccattgcccttcatattgggttggggtttgcaggcctaaggaggaagcacgggaggcctatccatatctgaactctgtttcctgtctctcttccaccaatgtgaggtttctcctcacattgcttttacccaatacatgaaagatttcctttgtcaagcttattggaatgccctgtgggagggatgctatgcaaaaacataaatgtattgcataactgcccagtccttagagatgctagagcatccttggcaccttcacagaccccactctctggtcagtccctagagagcagggtgaggtgcacttgagaggtggctttgtcctctaccccagtaccatggtccatggtgatgacctttatcccagctctgataaaaggctattttaggttttctaaaatacagttcctcacctagcccagaaaggaatatttccattttttccccctttcctcttgtctgattatttccagctgctgttcctttacacgtcagatttgtttctcctgtgtcaccttgaggcaactgacattcgtgactaattattagaaagggcagccttttagtttattttgatgaaaaagtctcagagaactctgttagatacactgtatttgagcaggtgacatgttgatgtttgggatttgggaaacagatccagcaaaagtagagtttttagcatggtagctggaggagtcagaaggtccaaggagagcttcatgaacttatttattgctaacgccctgtgtattctctgaactaattccaggcttttaaacttaataccaaacagccaggccaggtggtcacggggcttacggaagggtcatcttggagcaaagaaccacacaatgaactcttatccagctaacgttttttttctcccctgtaaaatcaaattaaatcaacctcagtttggaggatgtggaaatggggggagagtatgattggagtcctggccatttggtaatgccagtggtttgtgggagcagtctggctatgaaggatgcataaaaaacaactctacaatttaaacttatttcagaaaagggctttttgtttggcacacactgttgcaagccatttttgatccttcattgtgaaaccttcattcgttggcatattatataaggtcagcgcaaatacggtgttgaaaacacatggatcatggtacatccctagagctgtaaaagagactgataaaagatggtatgtactaacatgaagagagctccaagagatatactactgggtaaaaacagcaaatgacaaaatgaagaatagagttgctaccaaaaaggggcagcaaaccaatacactcttttggatttccagtgtagaggaaaatcttacctcagttcgtggcacacagttatcagtggtctgggcaggacctttttcagaattaccctgtacaacattatttcttgactttcttttatccttattcccttactcgtgcctttcccccttagtcaaccttttgaatatttatgtatatcctttgtatatattcttgtaaaacatgttattattttacatgcttctttttctgaggtgtaatccacataacataaaattatccgtttaagattaacaattcagtggcatttagtacattcacgacgttgtttaaccatcacctctgtctagttccaaaacatttccaccattccccataccatgaaacagttactttccattttcccttctcccagcccctggcgaccacctgttctggatatacgtcatatccagaatacaaatggaattaaacagtatgtgatttacctattctggatacactatccagaatataaatggaattaaacaatatgtgatctttcgcatgcatgtattttcaaatcaatctttattgagatctaatttacgtagataaaatgtacccactttttagtggaccttgtgtttttttttttgttgttgttgttgttatttttgacatctttcacatttgcttacagcaaccccactaggcaggcaccgtcatcaccctgttctgcagatgaggcttgaggctcagggatgccgagtgacttgcctgggattgcatgacagcttaggatgtggaggtgggcaggctggctctagagtccatgctgctccaccactgttgtccaccggcctctcaggtcttcacgtgggcgatttcagagcctgcctttttccacacaacattatactgtttatcaggttgataaaaagtggctatagaatattctactattcgtatataccataattgaactacttagcctttgatggatttttaggatgtttctaatttttgtttgtcagaaaccatattgaaaggaacattaaggattaaagaaaattctaaagtcatatatattcattatagaaatatgagcaagcaaggaaaataaactaaaaacatataaacattccccccaaggttaactgctctatgcagtttttcacatggtgttccagtttgtcttacacttttttttttttttttttttaaatatggctggcttttgtcacccaggctaagctggagtgcagtggtgtgatcttggctcactgcaacctccacctcctgggctcaggtgatcctcccacctcagcctcccgagtagctgggaatacaggcacacatcacgatgcccgcctaatgtttttgttttttgtagagacagggttttgctattttgcccaggctggtcctctatatatttttttttaataggaaaaaagcacttgagaaaggacgatatcataaatgaagttttgtaatagaaagtttatagtatactgtgaacatctttttatctaacaatagtgaatatttactaagtgcttaacacatgacagggactattttcatgttttaccctactcatggcaatcatttgaggtatgtggttattatggcagatgagatttgtgtgtttttaaatctacacaaatagttttgtgctctagcacttagtatttctcactttctaaattcagcgctatgttcttatgattaatccatctatctaccttgttagacatttgctgtcaccatgggtttccttatctcttcttgcaactcccagtttccacacacagcgttgcagggaacatctgtgaacatgcactcatggatctgtgggtcgagtcactgggagacacatccaacaggatgaatggatcatgggatatttatgtacttaatatgactaaatattggcagaggcagattctcctccataatggctatcctggagtctatactcttctgctttatcttttttgtggtttcaaggatgtatgtataaatggctaggaaaaaggaccagaaagagatataccaaaccagtaacactgggaacatttacaaggaacccaggagggagaggatgatcggaggacccttaggctgtactggtcatgatatgatgtgttgtaaggacagtgtcttcacgtgtaacttactattataatttactgtttacaaaaaaggtctgaaatgtgacctttacctgaagtttacagggctatgctatgaacacatttcaagttgtgaatgcctggtttaaggttagtcatggagcatggaatgagttcttctttgcaacttagtgctctttgaggcatgctctaaacagttatcaggttataccagtgagcccttttcagacatttaactgaggtttttcacatctcacatggctcagagaggttgagtaattttcccaggagcacagggtcaggagagttggccaaggcaatgtggagaggtgggtcagaacagacaacttcatgaatgaaggcttgttcaggagggcttattggtctgtacttaaggttagggaggaagtcggtgctctttccctgcaggtgagatggggaggaaacattctcaagaacagtaagtttcagtagcttccttacgcaaacactccactgaacgaatatattcgtctggtctgtttgttaagcacaaggtattcagataatctttgcctgacaagctgcttttgtttctgtaaaaggaaggtaacaggaaggtcttcaatttacgactcaagctttcttctttcacctcttctaaagtgagagaaacaaaggttctggatgactggatgagatattttttaaaggtgccattcaggttccttttgggtattagtttcaactgagatgtctcattctttctgtggaactaaaacgaataatgatcagtaagtcatttttgaaagtaactgtgacagagtggggcagttaaccaccacctctccattcccagcagctggtatgcacaccctgattatggtatagacttagttaataagagaaccagtgagtgtttgtgtcagaattttgctttcagaaccaggcataggaatttatacatgaacgccctgtgcagaaagaggaggtgtttgcacacagctacactgacagattattttccactcttgcacagtgactagtacagattcctctcatgagctcctcagagacgtaagacagggcgttgatgatgctttatcaagtagacagtatgtttgctacccacaactaagtaaaattaaaatataagaataaattggaaggcagatgcagatataaagtcccatctttaaggcaggaatacttcctatcatcaaatattacccagaactcactggtttagaggttgaaggcacaaagcatggttgagaaggctgaactcctggcctgtctcttcacagggttggtgaactctggtaaactctagaacagaaatgacccttataaacaggtgcacatatgtggtgagtacctgatgaatgtgtgctgaccaataaataattactactacttcctcttgactcatgtgtttgaaatgaagaacagtcactctagttgcagtctatacttgtgtggagcagggaagttgagcaatacatccatatttagtaacactcttgagatgagatagatggggtgggagagataacagtcattctttgccttttgggtggatctaagttaaaatatttttattgtctagatttatagctaattaataattttttttgccctagaatattgagggtgcaagattttaaagttggatttagaggaactgaagtttcagtttgttcattgtgattacgtaaatagagaaaacggactaatacgttatactttctctttttaaccatataatgactactcaccattgaaatgttgatgagcattttttttgccttatttcagagaaagacaagtgaaattataattaagttgtatattattttgtgtagattgtctcttctctagtgttcctgctgaaaacaaagaggagattaaagattttcctgttcagattttaaatccgttattcaaagtttgaggctgggcgcagtggctcacgtctgtaatttcagcacttagggaggctgaggtgagaggatcatttgaggtcgggggtttgagaccagcctggctgacatggcaaaaccacatctgtactaaaaatataaaaattagccgggtgtggtggcaggtgcctgtggtcccagttcctagggaggctgaggcaggagaatcgcttgaacccaggaggcggaggttgcagggagctaagatcatgccactgcactcctgcctggacgacagagcaagacttcgtctcaaaacaaaacaaaacaacaaagtttgatagtttgcttaactaatgggagtaggtgtcttgatgtgtgtgcagcttgtatgatccagtaactgataatgaagtttgcaacatctctaagttagaaattttaatgaaaccacaacatattttctttcatagcaattctctgagccagcatttcaagaaggggtgggaaaaaaatggtgataaatgacctttgaggtgaacttttgatatttgcattgcaattctttgggtttacacttttaatttttaaaattgcaggtgatatttgtgaaaagtgtcagtttccaatatgttcacagtagtgatagtatgactcaaaagaagtaagcacatatatgcctattttatcaatggatgtcttcagagttggtgtgccatttttgcagcatgggtgagaattgaggtttttctaattacatgagtttctttcttccttccttccttccttccttccttccttccttccttccttccttcctttctttcctttctttcctattttttttttttttttgagatagagtctcactttgtcacccaagctggaatgtaatggtgatcttggctcattgcaacctctgcctcccaggctcaagcaattctcttgcttcagcctcctggatagctgggattatagacgcctgccaccacgcctgattagtttttgtatttttaatagagactgggtttcaccatgttggccaggctggtctcgaactcctgaccttaagtgatctgcctgcctcggcctcccaaactgttgggattacaggcgtgagcctccgcacccagcctaattacattagtttctttcttttcgtttgtttctgagacagagttttgctcttgtcgccccaggctggagtgcagtggtgcgatctcggctcactccaacctctgcctcctgggttcaagtgattcttctgccccagccaaccgagtaagtagctgggattacgggcatgtgccactgtgcccggctaattttgtatttttagtagagatggggtttctccatgttggtcaggctagtctcaaactcctgacctcaggggatctgcccacctccgcctcccaaagtgctgggattacaggcgtgagccaccgcgccaggccttacattagtttcttatagtaagagaaaggtttcaaagttatatatatctaagaatacacctaccttcatagttgagcttttttccccaaaatacatgtttttctggtggtctctgtattttccatcactttaaaaaaatctaacttattaaaagttatttgattttgcttaagactttcatcatcatcagtaaaaatttatgagactgcttctgtgcatttgcttcctacgggcctaggggtgcaaaggaaaggggtagaatctaagattctagggttaaccaaaatcgaaggtttgtaggcttctctgaatttaggtggaagaaggtggagaatgtgattctgggtggtattgtgctatccttgggatagccactaagcttgttctaccagtcaggctgggctgagctatggtatggtagcaaacaaccccacatcacaggagattagcacaacacaagtgtatttcttgctcttgcacttccctgtgactgtgggagatatcttaagtcagctgtccttcctgcagcaactcagtcagcttcagtcttgtggctccatcctctgttatctctagcagcaggaggggaagagtcatgggagcactgctcaggggcttccccgcctcagtgatggagaggtgctcatcattgctcacatttcactggccagaacaagtcacgtggtcctgcctatttcagggtagtgcagtgcttttgtgctcaagaaggagacatttgtaagccctagtaatgtctatcacacgtgtctaaatgagaattggaatcttggagaagacattggaactagagatgagaatgtgaaagatgttatgtacagaaaagaaaatggtggagtggattcataagggaaagcacataattacggagggtacagttttccataatggtgtctctgcatgtatctttattcacaacccaagcaatatgctaccctggactaaaaatataaggatagtcgtagccactgtcagaaaagtcagaaagtttctgttggttctgttgttgatttgtgtgctatgtggacattgtctgcctccaaaagtgtactttcacttgatcattttagggttatatagtccaataggttagcagatccttaaatcttgttggtgacaggttgtattggccagagcttaggtgataagctggtgaaaatgcctaattttaaatctcaatgggattaggagagagtttatatatcttcttatacatattaaacattatgaggacactttctattacgttttttctcaggagtgttcattacatgaccttgacattggaatgtatgaccatatttctgctcctatccccagaacatctccggagaaggagcctgctgagtcaaataatgagccagtttctgtgggttttactgccttggttcttcctctctgatcttgcctttcccactactgttcttccttctcagctattcttccagtttactcttccctccacttttgcttattaaggtgtggactttgggagtagaccgacctcagttgggatctcattcctgtgattagctctttgacgttggaaaaatcactgtccaaacctcactgtccttatctgtaacacaggctaaatacttgtaatttatgcaaaaacaacagacacggtacctggtatgtttttattgctcagtaaattttagttaaccattagcatcattgtcatgttcatttcaaggctcatctcaaataattttttcatgatagctttaaaattttttttgtatttcaccaaggctgtggatatgatttactccatggaactcagaaatcactttatatctcctctgacatttcgtattctttgtgtgtgaatatacttgagtacatcccatagggcagtggatatcctttcttcattgctgtatcttctgcattgccttcatttaggtggtgcaaataatatgtactcaaagttgaattgagtcaaaatgagacataagggtggaggcctatcgtatatttataaagcagtccacctggttgagtgaattctcataagctggaaatataactaccctcggaatagtattcagttacttccctcgttagggtgtgtgtatgtttctcaatgtttatgtaattgaaactgtaatgcaacaacaaaaaaggagaattaaagaaataataaaaataatgcaaatgttataaaagacagtcactatcatagggtagcagtttaccagaactcagaggagaccttagtgtgatcttggtcatttatactgctgaaaaggtagctttcatatctttatgctcagctgcttgcaaggttcacaactttaggattggttctgcatgtgtaaagctatgcctgataaggcaaaagaggggtataaatgaatctcacctgaaattggagtcttgtacagtgaatgggtttacctggagttgtgttcatattgtgaacccagcttgttttaatggaggtttccattagtcttcctgcctgtgttctcagggtattataagaagcatgaagatgtgtgtgagctttctcttccttaatcacttgaaattgatcactgtctttgaataccggacccgtaaaaatacccttttaagaagtccttattttttcatttctttaattctctgccagaagtgagtggaatattgggtgtctgttttctagatccataacaccataaaatgttaaaggatgtactatgctgagaaaagtactcccattttatatttagggattatgtgatctgcccaaagtcacacagggaatcaagagtctagatctcagccgggcgtggtggctcatgcctgtaatcccagcactttgggaggccgaggcaggcagatcacctgagctcgggagttggaaccagcctggccaacatggcaaaaccccgtctctaataaaaataacgaaaattagctgggtgtggtggcggacgcttgtaatcccaatgacttgggaggctgaggcaggagaatcacttgaatccaggaggcgcaggttgcggtgagctgagatcgcgccattgcactccagcctgggcaacaagaaagaaaccccgtctcaaaaaaaaaaaaaaagaaagaaaagaaaaagagtctggatcttgtttctgctgcaacacttgactcatcaggtgtttttctgtgcttgtgctagaagggtaggaattgtactgtatgcactggatgtggatagatatgccagctgtgggcctatgtggaggcaaaaggaggccctcatgaggacattgctgtcagcgattgtggtaactacagagaatatgctatgctttggtggtagaccagatgaatattataggactagtagagttatatgaattgggggctttgatttgaaaatctgtttaaagggaactgattgctaaaacacatttcgttgtttttcttgccttaattgccaagataagggattataggattgtgttctactgagacactttttcaaaaatttgccactaagggagttgaattcatatacaaaaaattcgttataatgtattataattgatataattttctttatttttaaattattttttattttgttgagacagggtcttgccatcttgcccaggttggagtgtaccatcatggcttactgcagccttgaactcctgggctcaagctattctcccaccttagcctcccgagtacttgagactacagagacgtgccaccacacccggctaattttattttattttttgtagagttgaggtcttgctatactgaccaggctggtcttgaactcctggcctcaagcaatccccgtccctccccaccttcctcagcctcccaaagtgttgggattataggcatgagccactgtgccagcccatatataaaataattttccatagcaagtaatttagatttggcttcagaaattttatttttttaagatttaatattataaagtaattttttagttgcaattcaatatatgctcattgaagaaaaattggaaaatacagaaaaggacaaagaagaaagtaaaagtcactcatagtggtatcttcaaaagataaccacacttaatattttggtgtttcctgtatactcacaaatttgcaattaagttgtacataatgttttataactggttttaatttaatatattattcattttctcattctaaaatgaatgcagtgttatttaaaaattgctttcaacattttcattaaaaattttcaaacatgcagcaaagttaaaattggtactgaatacccatctctccatcacctatattctaccattaatatttaccatacttgctttatcacttacctgttcatctctccaccccctctattcatccattgatccatcttgtttgtttttccgtacatttcaaagtaaatttcaatgcagtgtattatgtttaaccaagctggtttgccttcttaattgtttttggtttacaccagtatacaaaggaattcgtattctctgaggatatacaactgacagcccagggaacttgcggagagtattttgttgggtgtagtgaaaaaggacatccagggatttaaaatttgccttggaatagagttaaatgtatgcattattagcatttgagatagcacaaaagaaccattaaaaacgatcatctcctttttacctgctgttatgcctaattcagactctagcatggggacaaggaaaatctttagagggaaagaaaaagctgcagaaagaaaatcatactttctgtagctttcctcactgctagagacctcaatgcttggtaggttgtgaacatggattgacttgttggcaggaaaagcacttcagaatcgtttcctccagcctaccagtgggacagttcagtcctaaatgtcctgtggatccaggtcttgccttccctgggcaggggttgagggactgttggtctcgtctgtaacttgactcttgtttctgatgtggctagatttcccgccagtttaccgggtcttcctatgtgaatgacagattctttcctttgtattggcaatggttggtggaggatggggagtgaggtggtgggataaccttggtgggctgaggaaacccgtgcttgtatctctctaccacctccttttaaaggtgccttaaggtgcctgtcccacggggtgcggcaaggtagggtgacctcgctttatgtgcagttcccagcatagcaccttgtgtatttaggcatttagtaaatgtcccttgacaagtagactgtccctgttaaaccctcagaatccctgtagttgttctactttgccagctagcacctggtgcctttcacaaacatttcaagaacacatatccattcttcaaaccttataatcttaactgtgttttcaagtggctggaggcccttaagatagaggagcctctgtgtttttccccctttcttttcccatgtttcacattccagggtgttcagtctcagtatcacgtcaacaccattttaagtgataagacgactcagctctggctgggtgcggtggctcacgcctgtaatcccagcacttcgggaggccgaggtgggtggatcacctgaggtcaagagttcaagaccagcctgaccagtatggtgaaaccccgtctctactaaaaatacaaaaaattagtggggcacggtggctggctcctgtagtcccagctacttgggaggctgagacaggagaattgcttgaacccaggaggcggaggttgcagagagccgagattgtaccactgtactccagcctgggtgacagagcgagactccgtctcaaaaaaaacaagactcatctctgacgctggtgacaactctgacatgttctttctcgtaaactctaccttggataaagcaccttcctaggagtgggtgtctgtggagccccaactttatatgaccaaggcaaaatgatcctgttttttttttcttttgtcttcatcttttcttttttttcttttcctgagggcagttgattcttggacattttaggcagattattttgtttttggataatccatgttcttccatgtttccttcaggcagttttagttctccatgactgagctagccaggaccttaatgggtcgaaaggatgtctggttcttcctttaccccactcccctttctctttcttctttcaggcagaacccctctaactcttagagctgtggtcctcagctgagggagattttttcctctcttccctgagcctctgaaacagtttccagtgtctggagacatttttggttactgcgcctggggagatgtggggaaatgctacggccggggatgctctaaacatcttcaggacacaggacagtacctcacaacgaagaattatcctgctcaaaatgtccgtattgccaaggtggagaaacgctgttgtactgatagaggtgctctgttgaaagtcttcctgtcaatagcattctgtaacctccatggcagcattgcactcatcagtatatctgacttgagtcctgcatgcttccgtttgttgctcttaagggcaaatggaaatgcacacttaccatactctgcatatgatcatactctcccagcttcgtctcagttcacttttaaaatttattgttttacagcctctttactctctttttttttttaatctctctagatgtttcccagattcttcacatattatgtttctgaagttgtagtgatccaatccaggcacagcattctagcagtttggtcgctgctgcaaatgagggaagtcgttatctttgggctggggttggacagagcatcatgaccaaccatctgtaaatgaccacttggaaagcaagaagcagttatgtctcctgcttgttagagggagtcatgtggaagtaaaactttttcatgtcagagagacctggaaacaaatctttcttctgccacttaagaaaagtgtgactttgggccttagttttctcagacataaaatggggttaaaatacttcatagggttgtcaggagtataaagtgaatgtgtctgtactaacaataagtagcacgtgtaagaagggactttgtgttttactgtactgtagccatgatttctgttggagaaaatagaactctgggaaatataaaagtatagtttgaatttgatgatggtttttcaaatgttactgtgcagaagagttcctgggagcttgttatacttgtatgtcctcaggttgcatccctagacattctgtttaggaagtttggctgagtctgggaatttgtctttgtcacagtaacccagttggttctgatgcaggtggtccacagataacacttggagaaatcctggccttatggcaaccaggtgagcatgtagcgggggcggggggcccaaacttctcaggaagccccagctctggctcgttgttttctgtttctctgggctcactgacagagaataatctttcagagctctttcaagcaggacaaagctgttctttgttcttgcttttaatgacaactagagatatctttttattggattgtctccttcaacattattttgactcagtgtcctaagaagtcttttgggaaccagcttaggaactcagggtagagaaatctccttgttcattggctgagggaattgtgacttggggtgaggaagggcagattagaaggggggtggttttgattctcagtgggtcttggaagggtttgggaaccagaagtgaaacatggacaggatccctcctagctctaaactgaattcctttaggaatgggatgaaaaatggccgcattccttctactcgtaaattatttgtgtctagtttatctcttctttcattgaattatgcctggcaatctataatattgactgctttgtgattttaaggagtttctttttgcagctgtggtttgaggggtgtgaggccggctcactgacccatgatggccagagcttgctagctcctgaaatgaatgtttgtaatttcctgacatagggacaaaataaatggcccaggcctgcccataaatatgcatcagtgcttctctatgctgggtctgcgtgtgttctcagaggtctttttctgtgggacatgctctacccacacctttctgccagacacagtgtctcactgccagctatggtttggcctctgcagcgtgggctgcgaatttaaatatttaaaaagaaaatctcggaaggaatgtcccatcatatacttaataaatgaaagtgtgaggcagaaattaaaagtccactggggagtgtagttggaaaatgtaaaccatatgagatgtgcctttaagtttgaactccttgttggcaattttctgccatgagaacttcctttaaagtcctgtcggttgaatttaatgagttctaagctgtgaatgtaaaccttagatgaaaaatgtgaacccaagagctaggttgttctgggttgctgatttttccacccctgcatttaagatgtctgtcaaataagtcttaatgtacctgagttaataataggagagtgttctgtctgatgatgatgggcccctgagcccattggcaggtggacatttctgtggatttcataaaaataaaactaaagaccatataattctttataaactgaaacaaaaataaaaggtaaacatgtaatggttaaatggtagtgaaaaatgagaacgtgtttaacagaatagatttttaagttcccattttattttattttattttattttattttatttttatgttttgagacagagtcttgctctgttttccgggctggagtacagtggtatgatcttggctcactgcaacctctgcctcctgggttcaaatgattctggtgcctcagcctcccaagtagctggggttacaggcgcatgccaccacacctggctaattttttatttttttttgtatttttagtagagatggggtttcaccatgctgggcaggctggtcttgaactcctggtttcaagcaatccacctgcctcagcctcccaaagtgccgggattacagttgtgagtcaccatgcccagcttaagtttcaattttaactggtggtttccttggaatatgcttcttttagggttgagagtgaagtaagatagtagtttggcatgtatgtgtcttgtaagtttaacatgtgctgatccctaaggctaatttcatggcatttaatatttccatggatgtttttgtctaatcactcgtagcctttcccacttctcatgtgttttgatgtataggttttgatgcatagattttaaaagttcatgaaaatgttactttaatgttcaagagagagatgaaggtgaatggaaaacggaacattattttgttggccctatttggtcgttctggttgttgctggagaatgtgagagattgtgattcaggtcagatactatcttgaaatcaaatatgagttccagatactcttatagcccagatatttccaaggctttgctgacagcttaattatttcaagcaatatttgatatggctgaagacctgttgtccaaagaatttggatgtccttttgggctcttttttcaatgtaagccttgccaaaagatgtgaaaatctgcatgatataaatgttaaaatatggccaggcacggtggctcacgcctgtaatcccagcactttgggaggccgaggtgggcggatcacaaggtcaggagtttgagaccagcctgatcaacatggtgaaaccccatctctactaaaaacacaaaaattatctgggcatggtggcgtgtacctgtaatcccagctactcggcagaatcgcttgaacctgggaggcaaaggttgcagtgagccgagatcgtgccactgcactccagtctcggcaacagagcgagactctgtctaaaaaaaaaaaaaaagttaaaatgcaggattaccatttccttttacaaagtaaattatcatggaattccttgaagtggcacttcttcatttgtggctgtgaaatacaatacaattttgcaaaacggaacgattttcccagttttccaggatggagtccagtttctcctgtgatggtgtctgatctgtagatagccacttctttttcttcttcagatgttctcctaaaaggttgggactcacaagttaaggttagcaaataaaaacagggaagaggtgacgtgctgctccagggctgtttgagagttttcatagagaggctgctgctggctttcttttgaagctgagagcaaacctcagtggttttaactcatgtccaccgaatggtgtaaccccctaagtatcagggtataaggaatataggatttttcttttaaacattgcctgaagcctgaagtccctgaagtttcccccgccccctgctacttttagcattgcccaaaatatgatgccatagcaaagaatctggagacatcagggaaactagcaattgcataagcatatgaaacttttttagatgtgcattgaggagttagcaagccttaaatgaaagacacctttagaatacagtatagtaatctctctccctgtaacatttatctgtatgttatagatacagttctaaatttactcaaacatgtttaaatatagtaaactgttttaatgtaaaactatccttaaaacattcagagagttgtctcttgaagtgtttcatctgtgaactcttgccaatagcacttagccacctagtgaacgctgagtcttcggtgaagttacagtgccagtgagtgcgatgtgctaagtccgtatttgatttgccagtgaggacaaatgcacacactctggtttagatcagattcagatgatttcctactgtgctttgtgagtcattctagtatcatcggtaaataattcctaaatgaaatctatgtatttcttttttacttacttggtttgggaagtcattgacaggtgaatgattttataagcaatgtaatgagttgccaaatacagcaacttttcaagacacttgaagcttacaaacttgacattgttttagctttaatttacaccaaagttgggttatccctttgaaattattacacgacactgagataaaggagaattcaagtgctcagtcttagggctaaaggcaatagtttatggttcaataacatgttgggatgttgtaccacaattaatgtaattattaataggttttagaaacatgaaaagtgtttgggatctaattctcagtgacaatagcagaattgaaagtcataattattgtggctataaatgtgagtacattcatgtgcgtgtgtgtgtgagtaaagattgcaatggaatatgcatcatgaaaatagttgtgtttgggcaatgggatttctaatacactttttgtcattgttgtttagtatggttttatttttacttttttttttttttttgagaccgagtttcgttctttttgcccaggctggagtgcaatggcacagtctcggctcactgcaccctctacctcctgggttcaagtgattctcctgcctcagcctcccaagtagatgggattacaggcacccaccaccatgcctggctaatttttttgtatttttagtagagatggggtttcaccatgttggccagggtggtctcaaactcctgacctcaggtgatccggccacctcagcctcccaaagtgctgggattataggcgtgagccattgcacccggccagtatggtttaattttaaggaacaagttaattatttcttttaagcctttacaaggaaaagagttgaatggaaagaatacctacaaatactggatatttacatatatattttttagttatacgtaacatttctttataggagggcagtacacatgaatacccatttgtaagatatgattggacagttctttccccctgaaatatctcttgaacacgggaagcacatccccttctcggtttttattgttccttcccctgcatcctcacctttccttgttcctgatgttggaggttcattgaacaatatgtggcagcccaaggctttcaaattgacatctggagcatgcagaacatattctggtggatgggccagcgttggcagggttttgggatggatgaagagagaatcaaggccgttcattataaaatggagtgatgattatagtagaggcgattacatatttagtttcagtacctaaatgtctcctcctttgcatttaacttccaatctatcagcaagtcctgtggctctacgtccaaatatattctcaaatccagccactttacttttcttcttctctactttgtctaccctagcacttgccatcgttgattcatgcccgcacatctacagcaacaccctaaccaaccaggctgtacctgctcttgccctgcgtacaatcttatctacacatagcagccagagtgacctttgtacaatgtaagccagattctgtaattctttttttcaaaatcctttcaagtactcaccttggtctacaggactctttccctgtgtttagtctcctgccaacctgccctaccacctctttccacctgcctcttagctgacaagcaccagccacaccgcctctgtctttgtcccttgagctctccaaaatcattcctatctgaggccttttgcccattctgcccttcatcttagaatgctcagatctttgcatggtcagccccttcttgtcagcccacatgtcaccacctgagagaggcttctctgaccaccatagctcaagtattgtccccaccaattttatttttgtcatagcacttaactgcaatctgaaattatttatattacccttttgtttttgagacagagtcttgctctggagtgcagtggcatgatcacaggtcactgcaacctctgcctcccaggttcaagcaattcttctgcctcagcctcccgagtagctgggattacaggcatccgccctgctaattttttgtatttttagtagagatggtgtttcaccatgttggccagcctggtcttgaactcctgacctcaggtgattcacctgccttggcctcccaaagtgttgggattacaggcgtgagccaccacacccagccatttatgatacttttaaatccatatcccctctcacataaaatgtaaactctaggaaggcagatactttttgctctgagcttcctttctaccaccctaaatagcacatggcacatactagaagctcagtgaaatatgttcaatgaataaacaagtacatattcttcattattgtataagatgtaaattgaggtgatcatgtaaaccataaattgaggttctttgcaactccaagatgctattattcttagtgtgaggaaggcattattataattattacacataatcagtagatcatatgtgtttgataacttcttcccactccattcccatttatagtggtagaattcctttcttttccttttgaaatggagttttgctcttgtagcccaggctggagtgcaatggcacgatcttggcccactgcaatctccacctcccaggttcaagcaattctcctgcctcagcctcctgagtagctgggattacaggtgcccgccaccacgcccatctaattttttgatttttagtagagatggggttttgccgtgttggccaggctggtcttgaactcttgacctcagatgatctaccgacctaggcctcccaaagtgctgagattacaggcgtgagccacctcgcgcagccaatagtggtggaattcttacactcatccattcattttgttcttgttactctaactggatggacttaagtattatctttggcatgtaacaaagtgcagctaattgacacatcaggagactgaatctgaatcttgggcttttacagagattgaatctgaattttgggcttttacaggattttcattcacatactgtagctagtaggctacagcttagagttgaaactgaaaagcatggccaccgaccagactttattaaattatgtgcaggagaattatcttggcagcaaatgaggcaaatcaatggtaggtaactgtcttttggtggttttgttttgagacatggtcttgctctgttgcccaggctggagtgcagtagtgccatcgtggctcactgcaacctcaacttcctctgctcaagcgatcttcccaccacagccttccaagtagctaggactacaggtatgtgccaccatgcctggctaattttttaaaaaatttttgtagggacggggtctcattttgttgcccaggttatgtcttctgagagcttagagttcaaggtagaaacgttagttacaaaaacttgacaacgaggatgtaaaagtgaatacttcctatcatttgagtaaatgaaagagagaggaaataaagttcatctgtgaaaatgtcaatttaacaagtacttatcaatctaatcagcctagctgttaaaaaaaatgtaaatgtgtgactgtaagtcatattgaaactcatgctatcctaagcagctctccatctgcttctagttagagatgtgtcatacatctggggacctgggcctcaggctgtgagaaagtagtttcaattaaaaaaaaatcaatacttgtaatggttttctttcttataatatcatacccagtaacttgtataggttgaatttagacatagcgttataaagtttatttaatgtgagtatgactggaggctcaacataagttgaataacagcagatgcaatcagctggctgttcagctttgtttatatctttacccataatgtttgaggtatcatgttttctggattaataaaataaatttccagataaataaagtccaacttaatttcaatcctaggtgctggaaataattctgaaatttaattatgccttttgtactaatttctactaaggcaggcattgtcttcatctttcatttgtagtgaatttctgaaaaacccacccaaaaaatcaaataataaacttacatgttatgagatagagggaatgttgaatcttcatttttgtttttattttactttaattaattaatttattttgagacagagtctcgctctgttgcccaggctggagtgcagtggcgtgatcttggctcactgcaacctctgccacccaagttcaagctatcctcccacctctgccttccgagtagctgagactacatgcctgcaccaccatgcccagctaatttttatttttattttttaaatagagaaggggtttcgctgtattggccaggctggtcttgaactcctgacctcaagtgatctgcctatgtcggcctcccaaagtgctgggattacaggcatgagtcaccatgctaggccaaatcttcatttttgaatagcccgatacacatacatttctgaattattattctttggagtggatctgctccttctggatgcttgcaggcgggcgagacccttcccaggctggcacctcttgtccctgacgccgaggcatctgcttttccatgcttcaggcctcctttccagttccttccatgggggcctaaactcgattcccttattaggaggtgggtacctggccccttcggggataatttagggaagttatgccacctctgtggtagcaactgaaaatgtggcccatggaccagcagcatcacatcacctgggagcttgagaaatgtagaactcacccctgtcccatactaactaaataagcagcaacgttttcacagcacacccaggtgaccccttatgttgtctccacatctttcaatacaacacagtcctaacaccttagcccccagccccaagactaaaggagggaacattctcctgatgtcctgccaggctccgactcatggtattgtgggatctgcaggtggcctcacttaggagaaactctgggctggggctgctggaggcagagactgcagcatgctgctgcttccaccggggcttagcaggtgttccgtgcccttcatgagggtgtgtcttaattttccttctcactcaatgatgttctcagggccccctggggttgccaagacactacttttcactgcactggacatttgtgttcctgcagttcatatcctcttcccttgtggctcttattttctgccatcatttcagactatggcatcatgcccctgcttctgggtgagagtgtgtgaagaggggggggaagaaagacttctaccatgcagagggtgacctgacttcctgtattgcggttgtaacttaggggagggcctcaggttgtcagaggagacaggaaaagcaggagttgggttataagtgcaatcagatcagatggagaggtggcattaaagtgaatggattttcttttcctgtgtctgtgagtaggagaaatgttttagttacttgctgcatcatggatgtggtagccagggctgtttaattacctgagaagtggggctaattgtatcttgaacagtgagtcactttcctggcataattttctctgtgcccaatcattaccatataaaagttgtcagtgctggccctcaggagtgggatttgaagagggggagttaataggaagctggcaggagctggggctgagtgggagcagagctgatcatagggaggtggggataagtaggcattttctcaaaaggttgtagtggacctggttctagtttctatccaggtgtctgggataatcatgtggatactattaaccccaacagtcaacattcttaaacacttcagtgctagacatgtacatttatattattatgtttacatgtatagtctcatttaatatttacagccctcctgtgaggtagatgctattgtcatttgctttttgtagttgagcaatgtgcagcacaaagcacacaggcagcttgcccaaggtcacatagcttggggctgtgtgaccccagaccctccgtcataaccatcactcaatccagaggaagtagattggggtggaatggggcggggtttggaagtacagagcgaacatttggaaagtgttagatattaaaaaggatcattttaggaattgtgttggaaaacagagtgaaatgagaattttttttaaaagcctggctattgttaatggagcttggaaaagccccagcctcgttttggagctggtggaggtcacactcccttggctccttattaagtgatttcctctaagctccagatagaccttcctagaatctgcttgtggtgttgggttggtagtcagcagacctccttccatgttccttctttgcctgctgtttccctgttaagctgtgctaatgggggcaccaggggaattttggaaggctgtgggagggagaagggacacgcttcatcctgttactgttcttgtcagcttagcttcggaaagggtctttccctctgccagcagtaattggtttccatttccagtttccttctacctcttggaaccagccttctgccaccccctgagatgccatcccagtcccatgtagaccttcagaaagggctcctcttcagaggtcagggtcccagccctgtaggtttcctcctaaatgtgtagagtctaataaccaccacctcctccctttgattcctacagtcctacccaaggagtggtagctgcttcctacagcttcctgagtaactctgtgttaactcagtcttttccattctctagcacctgttgaataagatcttcgtattaaataatatgtcgcattacatagtattgcttccattttcctaatagcccctgactgattaatttccccaagccctagaatcctggcagaggtgtggcgagagaagctgatacgcaggagggaaccatggttctcaaatctaaggatatgggtgaattgctggagaagctaattaaaaatgcagatcccaggcctccagttgcaataattgtgattcagtaggttggatatagggttaagaatctgctttttaaacagacatcttaggtgtggctgatgtgtagttatcctcttcctgaggctttgaaaaaatctgcccaaatccagggccttcccatggggttatttcttgactctggagttgttgtactggggcttagacaccaattttaattttttttttaatagggcgtgggctgtggatatgctaataacctttgattgaagaccaccaaggttgtatattgcccctggaggctgaaaatccaacccttgtttagcccacaaactctgatgcaattagctgggagaaaagagcttttccccctaactgggtattgtccgcatgtcaggccctgcactccgttgtgtccagtcagagggattcctttttcttatttatgcaaagccaacgtgcctatagctgcaaagaagggatggagtgggactgacctggaagtagggactggctcttctttttgcatatagagcccttcccatttacaggtggcttgaggttgaagcagtaaggaatcagaagccaccaccacagcatacatattcaaaccaggacacttgtgccttttggccttgccagtgggtgtatccgtttatctgtgtgaatagcaatagacatttctttgtggaatgtttggcttccatttggttgatttaatcagtaaaacaagtgggttttgctgggaggaggtggattatcccttccaagcagaacaggaagtttttcaatattgccagatcgttggactttgagtttgcaaggggcaaggacttcaaagtgaccgtttactgactataaaagtcagattttctcagtaggagtgtgtccagcctacagtctagtgcctgatgcagtgttccctgacatggatttcgagggctgttgtgggctcttgtctgtccttcatgttgttgtttagtgttttatatcatctctctatgctcacatagaattattgaagtccctagtttatattagcctgccacatttcgtgtggccctacatgctgagcaggggccagtggattcagtttttaaaaattgaaattcggatggaacattgctcttcagaatgagctctcctatgagacctgactttagaattgaactggatgttctgcaaatcagaaatgcctgaaggcagagagcttccctaggcttgtaccttgaagttaactgccacatcccccacagcgacctacttagagataacacattgaataaaagtgctcttccccttgctttaggttatatagcccaccagtgcctgctctcctctgtgtagacccaacttggagcacacttcatctgccttgtctgcgggtgtcttccccagtgatgggctgatgtgcattccattcacttagccaacactcttggaggcctcctgtgttccaggcagtggtctaggtggaagggctgattctaggaataataaggccggaggagaccgctccacaagcatagaagttctaggatgaagtaggtagagagtccctgcctgggaatggtgaggaagtgactaattctccttggagttgttcaagaaggcaacatctcaagtgattcattcatagctcgggcgggctaggttgtcctctcttctccctatactccccatcaaaatgaagtaatctttttcttagaaggtaaacagcttcactggcagaaaggttatgtgttttactccaggttgcatgttcgtcagtatcaatattaggactaaaatcctacaatagagttttagctttgaggggctgaacctctgagtaagtgctcttgagactaatgttaaatgtttttgtttttaaaccggcaagcaatcatattcccagagtgatttttaaaaaaatctattgtgtttcattaagaaaacaaaaatgcctagaagtaaattccaatattaatcacgttgaattagatggaaattagagtctgttcttttttagctccttatctcacacatgcaactcatctggtggctggcttgaatttacctagactccctaataataattttcattatcattgaaagttattacaatttgtaaattattgaatttctttatattaggtatcccaatccacatactttctgcatgttcagtaagtgtactcactgtagggttttttggttttttttttttagttgttgcttgagatgtagcttgtggtccaaggtgagtttatttacatttgttctggtttgattcctctatctcttttaaaatcagaaccgaggactactttttatttttctgtggtattatcagatggttcttgatgagttatatacaagggctgcttgtcttcagtgaggtctgagacctctaaatgttttaacaggctttctcaggtaagatagtttatccaggtcagtggtgaaacataagtacatttcactgagtggccattaatccacctcatcctactgtttgctttttatgttttattttattttatttttttggtaagctctaaatcttttccagcaaccctggaaggaggctctactaacttgttcttttgacggaggcagaaggacaaaactcagtcagcttggtggtgacacaagccaggtcacttaggagggtcaccagtttgtagctgccttgagaaacatggtcttgctgcactgggctcagtggaggcgagcggtttgtgcactgttatccagacaggccagcaggagcgtctgttttataaattaatgcgtagggcaagttgtgtgtgtctcaccgttactgttctttgtctttgacttgagattgcactgtgcacatgttcctgccacatagaatgcaccagatgacagaagagtcgctgtgataaggttttctttctgtgtgaaatagtaagacgaggaggatggtgacatgtagcagatcagtttgggtcaatgtgccgagtacatgctcatactatgttgaaccatatgacatgaacatttttgatgtagaaaaatggcaatttcacacttgcaatctaataacttaaaattgggaccatcaagtaaggaagggtgtacctttgaaggcgaatagcagtaacacactcaggcaaaataacagtctgtggtgaacttttattagactcacaatgcttttataattaaaaaattaatcgtcaaccttattgtattaggagatgtcacacagaattctggattttcagcctttctgcaaaattctgactgtcttgctatgccaggtcagcgatctcagatggtgacagttggctgaagcagagtggcacttgtactcctgtagagctcacatgtgtgtccattcatccaagtcctctcctggccagcttctggtcctcatgtgactgactggcctgtgggctttgaggttggacacatgatataaatagagctcaaagagtaagctggggaaaggcaggattagaataaatcagctgaaccaaagccatttgttttgtttactatccatcaccagctagcacctctaaaaagaaagcctgagcccactcttgactctgttcactggcaaaggacagctgagcatacttaaggagttcttgcacgtgctaagagatggtcaaactcttattaaagttccaactttgtgcttctcatttaaatataatatggtgattagaacttccttccaggggccataactaatgttacaggctaatgtgatgccttgaaaaaaatcttgccatttatgggaaggggttactggacaattgacgtcttaactttaacgtaaagttcttatggactaatttttttaaaaaaagtactagatgtttattgctacattgttcatatggggatgaaaactagaaataaaggggatactcatcaacagaaggagggctgaataaattatggtacattaatactatgaaatattacgtggtattaaaatgacagattgacaggacaccagttgacctggggggatttccctaaggagcaacgctagctaagatttaattagtgcttactatgtgctaggcacagtttcaaagactttttttgtgttaactcatttaatcctcacaaccactctatgagtgaagtagcattattgccgtcttaccaatgaggaaactgaggcatgaagaagttaggcaagtcatccaagcataagcagttagtatgtggcaggtctgggatatgaacccatgcaatctggattgacatagatattttaaaataactttttttttttttgagatggagtctcactctgtcacccaggctggagtgcagtggcatgatctcagctcactgcagcctctaccttccgggttcaagtgattctcccacctcaccctcctgagtagctgggattacaggtatgcaccaccatgcctggctaatttttgtatttttagtagagacggggtttcaccatgctggtcaggctggtctcaaattcctgaccttgtgatccacctgccttggcctcccaaagtgctgggattacaggcgtgagccaccatgcccggccttaaaataactttttaaggttagatatcaaagtgcattatacatgacaatctttgctatggaatattaattcacagctgtttctgaattggattgtctcttatattttaaactcttatgctcatcatgctgtatcagactttagaaatcatttagttctttggtttccaaatttagctctcctagcctctcttttaaaccagtctaatcttcctggtgctaagcaaaatgaaactcagttctgaccctgagccactttgccctcttttcccttgggtgccatataaacagtagatatagtttacctcctttatgtcacagatggagaaatgagtcccagagagagagcctaacatttattgagttgatgttttccagggatgtgaaatatattatgttatgaagccttaaaggtgtattttattatgcccattaaggaagctgaagtctagatagcagttaggtcgaaagtcacagagggaatcaataccacgtttggatagaatccctgtctaaccttcttttcaaggctcctactaacctaagatgggaactacaatgagctaccagaggcctttcagttgaatcttgccatttgctgttgacttaatcaggaagcttctaagaacttctaattagtatggcattctctgccataggtgttagtggaagaatgactttgaacagacatttcaaggcttttgtattagtctgcttgggctgttgtaacaaaataccatacactgagtggcttaaacaacagaaatgtatttctcacagttctggagtctaggaagtccagatcaatgtgctgaccacttcagtttctggtgggctctcttgctggcttgtaaacaggcaccttcttgctgtgtcctcataggacagagagggaaagtaagctctctattgtctctttttgtaaggatactaatcctattggaccagggctctgtcctgatgacctcatttaacctttaattacctccataaaggtggtaattatctgttaactgtatctctaaatatagtcacattggggattagggcttcaacaaagacattttaggggaacacagacattcagtccacaacagcattttagtcatccctgttaacttctgcagaggaagtgatcctatagaaggatttattccacttgaagcaggaatggtcacctttggcactttattatctagtgaactgcctgctacatggcagggatttaattactgtttgttgatgaattaatataagcaaatatctttttgctgcttttttgcactaaatgcactaaatgcaaagaggaagttattgtgtgagtcatgggagtagggactttgaacatactgttgaaactgcatttgacaatagtagtgatttttgcaaaataaacactgtagtttttcatgttaatttcacatagaccttagtgaaatgcaaagttagaatactaaattatatttccatgaaatatttctttggataactgaaagtataaaatgcaggtatgcagtgttctggttatttaccttaataccagcagcagtacagaggggaaaatgagaagaggtgtcaactaaaggaaaaatctgcatcatggtaatgaacgtgagcaatctcttacctctgattgccattgacataatcactatctaaaacttccaagtagctgttcttagtcgggaattacttagcaaaagtgaattgagatagagtgacttaaaagagtgaactgaaaagatttaaagccgtgcccacttaacttgtgcatatgtgcatacaggccataatcctattgaatgatttattgcacttgaaataggagtcaggaataaaatgagaaattcataaaatgttaagaactcttattccaaaaggggtgcatgatacttcattgaaaatatgctactaatgttaatgagtcatgtgtcagtatcatatattgttcaaaataaatacaaggtgctgttcagcatagtaattgctcttattttatttcatgttgctaacacttgtccagttcctgtatttacaagccccacattttttagcttcctcttaaactaatcagcaaagtgcataaaaacccttaaagcaagacagtgttggtattatttctaaatgtcctttagaattatgcagttaggtcacctcctttcctttcaaagcatggatttactctaatcctgggaatcctaatctagtactagcagactccaaacttttgatcatcacttacagtaaaacatgtcatactaaagcttgggcgtaagtgaaacaaaagtttcataaagcagtttttacccttattacattctgatgcttcccttaaacaatgctggcctccacccagttagttgattttgtgaccagtggatcctcactggcaatttgaaaaaacaccaacctggtgcacagaatggtagataaggaataagtatgcctagggtcctaatcctgtgctttccaattgctgcaggaaacacatccctatccttcacaggaccctgttttctcattcataaagtgagggggtgggttggacttgatgctctctaaggtgcctttccacctttaactttgttcttggtctcttctatagttgaagggaaatctttggatttagagtagaatctcccaaactgtttaatgaatggttaaatccatccatgttgtgacaatgatctcaggtcacaaagcttcataattctgtctagagatgagaagtagccagtcgttccttagttagctgtagttgtaaagcagtaacaattctctagctgtaaagctttaataaaagatttttctcaccacctacccctccatgtttttagaattcttattttttgttccttggaggttaggagacttttactgtcaaggacttaactatgagaggtatctctgtattacatacgcttgttttgtcctttctgggaattaatttattctttcctgtttttgaaactccttgatttgtgaatgttctggaatgtagattaaggatggagaagctgagctggggggagatttattgcaggtagagctgaggatggtttcccaccagcagctaaagatgttagttgatttctctgctgggtaccaggcccagtgctaaccagctgcatagcactttctctgtggctcccttcagtgatagtgtcttgttccggagactggaaaatatactttgctatcagcagactttttgtattgtttggctctgccatctggaccattctggattgaacccagtgggctgtgatctgcagggccagtgaagccaaactagtgggacctggagtagcagccaatggggtagcagctgatggatgagcagtgagattagggagaggaaggccctttgaagcaacctgtccatagcactctcttcccaaacagctctagcaaatgaggctcatgcagaccctggtctgggttgtttgtcttctgttgaaccatataggatggaagaaagttttttcctagcaaggccaaaacaagtgaggaagggaagcatgtgctctggcttgtgggaagtagaacaaaagcacacatctcggagtctggcaggcgtgatgctgatactggctcaggtacttattagctctatgtgaccttgggcaagttttctgagtcccggttttctcccatgtaaaatgaggctagtaataaaaatgtacaggctcataaggagtcaagtgtctactgtgcagtgggtggtcagtatgtgtgtgtggattttctttcccagtgaacacaaattgggcttccctggaatggtagtctttaagttggagacctgggtttggaggagtagggtgatctgctggggttgccaagtcgggggccaaacctgatgatgaggccacagggcggaagaaagggcagagcttcacccctgtaaacacccatttgggcccttccttggggtgggaaagccctgattcgcactagaaatgtcatgcctttctatcacataaattaggaaggctaatactgatctctcttgttgccaaatactcccctgctttcccttttatgatgctatttgatgaatcatttgagaagtattacctgaagaaaaactttagggagaaagattgtcacctctgaccacctttgcacaatcctgagtgcaggctgtttctgttgttggctatcttgcagtggtagaggatttatgtgatgagaatggcagttttggtattatttgcagaattgagatgccttaacctgaaaacctttttgcccctatggagtataaagccgattaggagttcttttgtgctctgccgcaaatcattacatgtctacattttgctgttataaaatatggataatgacatgactctgtctcttaggagtctgagtgcattagctaatgatcatgaaaccttagaaatagaaaatttatatgaatgtcaagagcttttgtaattacacatttgcatcattttgcttggcatccttgaaagttgtgctttcaacatgagaatactagggttgattcttgtttttctcattgtggagcaagctctgaagaaataagcccaaagagtgttcaaacatcaattatctcagcttctcatgaaagccttgaagtagcttagaccagagtggtttggtttgggctgaggtggaagaagagcttgagatattttaaaggcactcaagctagaaaataccaggaactgaggatggaaatggctttcatgcaaggttgtatgtagatgctcatgtcccttgtcccctgtgtcctcagacatacattgtctggaaaatgcagttttttttttctcctccagataattattttaggatttaagaaactctttaaaaaaaagatgtcaaatggtaatgttctgaatacgctgagtagaagagtttaaaaaaattgatctttaggaaaatagttacagatagtaacctcacagtgtgccatttgatcgctgatgttgtttttatttcattgcaggcagtggagctactgctgtggttcaggcagccctatgcaaacccaggcaagaacgtgtagcaataaaacggatcaacttggaaaaatgccagaccagtatggatgaactattagtaagtaacagtgcagggaatacctgctggttgcttttcttaatctatgggtatatggggatggttgggagaagagcaaggtgttatctccagttttgacatatgcatttcttggaaagcagcccctaccacttcctgctccccagattaatgggactgtaccttatgattgtgttgtataatgaacaccttcccttgctttgagaaacagtattttgctcagttcgaataatcccaaggtgagaatggcctcagcgttggcactccacttgctgtatcaagggcacacactgtggcgtgacctaacatgacaggattactgactgcagttttggatggtgagcttctggccctccatctagaatgtgtgacacaaatggaagttgtcccccaaactatttgttggtcattttagctttcataaattatagcatcacacaaatttgagttatttttttttaaatgctctgtagcttgcatttggctaatgagaggagtttgtttttcttaacgtggcaatttgtacttcttattctaaatgagtactttatataaataattggagcttgtcagtgtggatatgactatagtagcaatggttggttgaaggaacatttgcttttggcttagctgactcattattaaatgaacagcttggcaaatggttattagttgcccggcaaactgtgaagggtttgagggtttaatctcataaatatcgttgttgttctaccggccaattttctttttttcccttttggccatttatttgaggataatagaaaactgcagtggaggagttaactgattggttatccccacactaatcccagtacaaatattagtccagtagctccatacaagctacaaagtataatgacagttggctgcaaatgaagaagccttttgttacagtctacattgagaatggaatgtcattaacaacagctttttgtctttactcagaatatagcttttattttaggcttaattacagtacactatagtataaattaagtacaaggataaagctgtacttttccagatctgtttggccttacattttaaattaggctacacaatgcatagatttcattgggttttattgaagcaatggattgccggctaaaactcagaagagaaccagggcttccacaatttaatgttaatttttgaaatttgcatacattcaaggcttttaacggccttgaaatttcagctgtgctttgctcttactgaaattcctgctgcatgctacttgtctgttgcttgctatcttagtgaccagtaatattgtgcctttgtcacccaaccagttttcaaggtcactttctctgagttggaaaacgcattttataaactgtggggagagttgggtcctgcttctgccactaaacttgttttcactttagtagagttacacaacagctctgcgcgatttaaaaagagttgaattggaagttttcttctaagatccctttaggaatcctgaaattctgtggctatgcataagtgtactttaacatttaaaaaaaaaatttggagtgtgcatttaaatatatgtactgtttggatgtatcactcaagaatttgccagtgatagttgtgtttttgttttttgtatttttttgagacagagtctcactctgttgcccaggctggggtgtagcagtgtggttttggctcactgcaacctccgcctcctgggttcaagcgattctcctgctttagcctcccgagtagctgggattacaggcatgcaccaccacgcccggctaatttttgtatttttagtagagacagagtttcgccatgttggccaggctggtctcgaacccctgacctcaggtgatctgtccgcctcggcctcccaaagtgctgggattacagatgtgagccaccgcacctggctgatacttgtgtttgattgtggtattctgttagaggtctcagccatttttttgccattagcagaatattgatacagaatatgtgtaaggcttgcgtgtacttgtgcctgacagttctggagcctgccttctggtttgatgctatggtctctggtttctaccaagccctcagttgcccacagccttcacgtttccctctgctagtgtttcctccacagtgtccagtgatggtaaccgtgtaagcttctgggtggaggtcagcagggaggctggtcattctggtttctttcctttgttttcctggaaccagtaagcatagcagtgtcatttggagctacttgtaacttaggtagagctgtctatctaaggactggtgcttttgtggctttgtgctttgctccattcgtctgaggtcttaggatttatgagtttgcttatgaggagttaatttattttctcattcttattttctttccttaatgcccgtgttgcaatagagtataatatatttgcattatttatttttcattttatattgatttattgctttgatgtttccttacccttgaatctttgaccttttggtgtgttgatatatttagagaggggggaaatggctatggttctttaggatgtacaactcccaggtcgttttcaaacaaaaataaatagaatttacagagtatagcctgcctgatttgccaggcttctgtggcccagttattggcacatgagatcgtgtggagcacagttgctgtcatcttttcaatgtctaatactgctgttgcttgcacttttattatttcagagggctcacattttggcagtgtttggacatctggtatcctaataatcctttaattccatgagtgtgtattatatacaggtcagtgcactgcatcgtctcacagactgtgccatgtgttaactggaaaccattgttcctagaagaaacaatggccactgggatctcttcttgtgagagtgttatgtcatagaaatcacaattatcaactatttgttggccactgggacatgtttctcccttgatgaaactgtaacacctcctgaccccgactcccagctcagcccccactgactacctatccccgtcctgtccccactccctttgtcccataataaagggggatttacacacacaggtcagaattgatggcacacaacagttttagacaactggtccagaactcgacttctttatgtggtaggggctgtcagttgagtttcctgtaggtcacagagctggatccagggtttgctgaagaaggagtcaagcagtcatcatttctgaagggaagtgctaattacagtgtcagcttctttgtgaatgaggagaggaaaagaagtgttagatgagctcattggtgctaaataattgatgattcagatttatactgttgaaatgagtactgtaatattctgtaaagataagttagttacagatcaaataggcatttatttatttatttggtaaatacttactgagtttctgtattatgcttaagcccatcaaaaggatgacttttgggtgtgtatatgagagtacaaggctttatgcccactaaaaattcattttagtttaacagcaattagattagaacactcccaaataaatgtttttcttggtatgatatgaatagcaattaatctaatccttttttatttattcttttgaattttcatgtatgttttggagtttggccttttaactgtactctgatctctgaaggtataatgatcttagtgtttagttttccaggagccaaggatatgttctggtttgttctgtattccttactgtgccaacatagatgctttggtaatttctgaaatttgttaaccccacatttgttgttaactgcacatttgtcaagcccatcatggtgtaaatgactaattataactagtttaatgctctctaggagatacttacagttttagagcagaacttgttaacaccagaattatcaaacccccttagatgctaggcactgactttggtgatgggaaaacagaatggattccta[450 bp omitted]tatttaccctaaccccactttttgtgatgttcaggttactctactttattcagggattgatgaacattttggttcatcaccttatttgactttatgacttttagactttaaatagatccctttcaattttttcctattgcctcaagttctcatatttctagtctgcctttggtacccattcacagaaaattcagcctcatttgctcattcctacacatacatcaatgccatcaaaatttacagtttaattctcaggggcaggagagtcataggagaaatcatggcccggggacgaggcaaagcatttgtgtcattaaaaaaatgaaagaaataattaagtgattacgttatgaaattatggaatgctcattccataatttccatatgtgaattccatatgtgaacaaagtcatttcaagaaaaccatggctataaaaaagtgatgaatgttgatcctttgatagaaggaaaggaactccctgggtcaggggacttgctttctttgcttgactcccctacagaactgctcattctggaaaaatcagtttcaccactggtccttatttgtgtgatgacaaattctggcaaaattttatttttattacccaagtgctatgaatctatgtatttaaaagtatattaacaaaacccccttttcaattcacttaaataaaaatactaattactagcaaatcatgcatggtaattcaggatagagtcaagtcactttagcattacggtatgatagcagaaatctactgtaaattcatagatttgggtacacagtgtatcatttttttctcctatgaacataatgaaagagtttctctgtcattcagtagtcttcaactggcatctgcttttttcttcctgtatcatctttctctagggattttggtctaactcactgacaatatttatagataaaatcaagaactttttcctcagaacaaagccactgccctcattttgctttctgctgtagcgttgttttgttgtttttcctttctcttgatctactgttcactccctccgtcacctccctctccttagaaaaatgagttagctatgatttgtgggttattggagaataaagctctagatatcttcgtggcttgatgatcatttgagaagaactgttattcctaaccattatctgatgcaggttgctctcatcatttttaaattaaaagatttggtgacctctgagcagttcctccagtcagaaggttttttttttctcttccttttaattgaggtttaagggggggagaaactctcaaaaccttgtttgcagtgttttagcaaatttatggaattatgttaatacttttgcaaagcttgtttattctagaaagatagtgattaaaaaacttccatctttttaatttgaccctaaaacagtataattttgtatgtgtgtgttttctttatcgcatcaacgaaagtatgtttccattctttttgaagttaagaattttctaattagtaaattaataattcatatcccagctcattcatcgtatgtggtaacaaattgcatttagctatttgttgtagagttttttatattaaggatatagcattagcatgcaagcctacttcactgaatatagtatagttttgagcatttcaggtttcaaccattaagttttgttctgtcatctgtctcttgccacttagttttgtaattattttaatatattttgtagtactatttcgagcatttcaagtctcggccattaaattttgtactgttatctttttcttgcaacttagctttgtaactattttcacataatttggtgtttatgtttatccaggtatagtccaaatgagggcaggattggaaatagaaaatttttgtttattttgaaagcacaaaaacattcttaacgaattggagaataaatactatactgtatatgcaaaactaacatttttagagcactaaagttgtattagcttaggaacatgtataatttggttggagaaaacaacttttatttttggaacatcaaatttaaaagttatgtagcttattcggatactaattaaatatactaattgaatttacttttaattgttttctacatttgttagaaatagctcattaaaatgtctaacctctcatgcttttttttcagaaagtaagcaaaaattaacattgcaaaaacacttatgttttggggcttatatgttttcagtaacagggacccagcacatactcattttcagtgtaggagaaaatggggaaaacatgcccagattgaatataattttagttacatctcactttttaaatatctcacttttgccattcttctagacttcaggaaaatgttgcttaggttgagacaaatgctttagttctttcctatgttattgtcgttcttattttggtttcgttatttccataattaattaagctgttgctgaaaaaggagggctgtggaatcctcaggaggaaggttggagagtattaagaggaggctgcaggagggttgttccctggcagaaccccagatggcacacagtatccagggtgccacaggcgataccacaaaaagaagacacattacaccctacattgtcactgtgtggtggtgaacccaaatacagcagcagtggtaaaagttggcctctaggtttccagcagtacaatttggctgacaagaaaagttcttcctgtttctgtttctggtttcttgggtgttttttttttttttttttttaagagatgaagtcttgctatgttgcccaggctgccctcgaactcctgggctcaagtgatccttctacctcagcttggtgagtagttgtcattacaggtgcatgctaccaggccggccatctatttctgtttttaatgacatcttcaatttgaattttttcagtattcccagtcacaatttaatggtcaaaaagcgattgttcatacctgagtgtgagtctgattccactgtggcaccctcagcacttttagagcccaaaagacatcattattgtttgttgaataacttttttagctaactataaaagaaaatggcatcttcctattgagttttcatatagtatttcaatatcactactgtattttttgctttctcccccttgtttcatttgaaaaaaataagtggcttcttcacttccaagcgaattttaattttttaggacagtttttgcagagcacgcaatttcatgacattataacgaagcaagtaggccttgggatattcattctgttccgttagcaagtagacgtttgcccatcgggatttctctgctacttctgagagattttccagaccttcaattgccctgacactttacactttttataactgcttctccctagttttaaaaacttctctacaaacaccaattaaggctatcacaaaatttatgctttccttttcctgatttcttaaaaatgtttctatttcttaaaaatgtttctctttcttcaaaatacctagttcccatttgtaaacctgccttccattggactatacttggttaaactcagataccaaatcacatgaaaataattgtaaagttaagtggcaaaggacattcgttgattgatttgtaagtggtacaagacaaaatgtttgacttccttgaataggtttttctctgctggtacttttcttataaaggaggcaagagtttgctgtataaatggtatatcattttttgcaattaaaagaattcatgactgggtgcggtggctcacgcctgtaatcccagcactttgggaggctgaggcaggtggatcacctgaggtcaggagttcaagaccagcctggccaaaatggtgaaaccctatctctactaaaactacaaaaattaggtggcacacacctgtaattccagctactcaggaggctgaggcaggagaatcgcttgaacccaggaggcaggggttgcagtgagccgagatttcaccattgcattctagcctgggcaacaaggagcaaaactccatctcaaaatgaataaataatataaatataaatataaataaaaaaattcacaatgacattttcatgattgaaaatgacagtccagaaaaatacattgctcttctaagaccttgttaatcctgttcttccatgccttggttgacgtttgaaatcactgaaatttgtttttggttaaacctgctacttaacagtattcggttatttgtgaatattgattaggttacctttcataatgctgctaaaagaagtgcatgctggagaaagactttctgaaaagtgtttttatttaacaagattactcctataccatttaaagaattctttaaatgtttcgagggtattgcatacattttacagatgtatttggtcatctcttgcatttggaagtagatgttttatttgataatatttgtacatcatacatagattacattgcagtggggaaacgtgcctgggagctacatgtttctctcaccatttcattgaaagaaaaatacatttcagcacttagctcgcaagtaggggttctaagctgtggctgcacattagaaccacctgggagcttctgaaaattttcattcccaggctgtctcctaaaccaatttacagcagcctccctggggccgggactcaggtgtgggtatttgtcaaagctccccaggtgatttcaatatgcagccaaggttgcgatccattgctttagaataaagttagaagcatctcctcagatttaactgcatacaattttggagcttgagtaagtttgatttcttaactaagtacttgagtaggatattttgccatcattatcagataaagaataatttatttaggatttacataagttgtaaaatacgcaaatttggttaagtatagtttaatattttgaattcagaatcatttaaactcttccctttcagtaacaaaatctctttccttttagtgttttatgaatctcacggtcttaggaacaaaagaaatcaggttttaactttttcctaattcttatatctttaaacttgtactatttctctttgttctgaaccctttgcataagtatctatttagataacttattccgaaagagtttgaggcagtttaccaggatacatgaagtatgacaaggtggtataaattaaatacagggtgaaattaggaaaaacatgggttgagacaatgtagaggttaaaaattcatgaccaaatgacctatccatgcattacagcaaactccttgagccagtggggccaacagatgtgtcctgtgacatttctgttggaaaaagtgacggctgctgccatggtctgtctctgtgcctttgaggcttagtcaggaattgggacacttgagattagggcgatgctcacacgcaacgaagaaactgagacattgaacagactgaattaactttgaacatttgtgttatgtgctaggcattctgcaaggagttttatacatctcatttcccctacctcacaataatctcatgtagatagtagtaatctccttttacagaaaaggaaactgaggctcaaagttgttggataacccgcctaggtaatcaagccagtaaatggcaaggccaagcttccaagccagctgtgacatagagtgcggcccttcagtagtagatcctggaggatcagatccttgctagtcacagttcctgattggcctcagtactatttgtaggagaaataatgttttgtgtgtgggggggaggggggagtggggggggcgtggaaatgaaaggccatatagcaatatgagaaaatctcttattatatttagttatggcagggtacagtggctcacagctgtaatttcagcactttgggagaccaaggaggaggattgcttgagcctgggagctcgagaccagcctgggcaacacagtgagaccctgtctctacaaaaaatttttaaaaattagctggatgtgatagcatgtgctcatcccccctgctactcaggaggcttgaagtgtgaagattgctcgagccaggaaggttaaagcttctgtgagctatgattgcgccattgcactccagcctggacaacagaatgagattgtctaaaaaaaaaaaaattaagtttttttttccctttttttattttcagttctgttattttttgggggaaggggaagttttttcctcccaactcctcatatttgtagggtaggatactttattttgtattcctcaccacacctagcatgacgcgcgtaatgtctggtttggcaaattttgcagggctggcataacagcagtgtgtgggtgtccttctttgatatgtctttcttgcacatggctccctgcagaggggtgctgctgtggctgccacttcagttctagcaggtggataggggatcttccatgctaccccattttaaggttggtcttcccactcttgtgaaatttcacttgtgatacatttcagatggagctgcatgaacagctctgtcagcctcagagaagattaactactgtgccatagcttggtttggcgcttgtgacatgtctaagtctcatttcctcggtttccaagggagccactgtgttcaattccttgactatatttttggcaaatgtgttgcctgcatttcagagttctgtagtttctcccatctttgacctcgtgggatttttgtttgtttgtttgcttgcgtttcttttttaaatctcaatgaagtttttacccttttctgtccttgtgaaattcacaccactttagtacaacagtctcccttatttccagctttgcttcttacccctctcctccagttagactctcctccagttagactcagccaggcagtactgtcggccagacccactactgggcacttttgacactgtcggcttccttgcagtcgtctgtgtccctcctctcacatcccccaaccttcctctctgccttctttcaaagctcagtctaccactttgccactcaaagtctggtttctggacccacagcatcagcatcacatggaagcctgctagaaatgcagattctcaggccgcactgcagcccttccgaatgggagtctgcatcttagcaaattgctgaggtgatctgcatgcccatccaaattagggaagcaccgctttaactcacgcttctgccttgggttgtgacctaattaagagaataggatgttagaacccattcattctgtcgaaagaatcagctaaaacatttttatattttcaaattgttcatctttaggcaatagttttgtcatttttagggatagggacaaacaaatatgcttggtaatgaatgtcttttcctaaccatatgaatgcggttagggcattaggagaagcttagataatttaaccaatagattgttaccaagggagctttcaaataacacccatcattgttttgaaaagaatggaggggatagttttgtggaaagatttctagttttcaggtttttaactttcttctatgtggaaatattacttatcctggggatcagtgatagcacaggtcatatctcaagacagagcgacatatgtttctccctaagacgagtttcatcatgtccttaagcattaatgcttgtggaaaagctgctgtgcaggacaatggatggtgcaggagttggggacatggaccccctagccaagaagtgaagagggatggctcagctgcatggaagaagaatgtgaggttgagtgatcaaactgatggaaagccactcttgggccccctgccccttcttttacctgtccttatactgctcctgtggttgtgttggtgtggcagtatctgtgacccctcatcccccactcatttaaattctggaaccttttaatgtccagatggtgtctctaagactcagagttttgaaggaatagaatttgctaagttatatctataggttctacaggttttctaaaggagttacacacacacacacacacacacacacacacgctcactgcaaagtcagagaacctgatactttgggtgggaagtgatactggccatctaaaagcaaagggctaaaaagtgtgtttttctagactgactcaaccttgccttcaatgtaaaagaatttccttttgtatgaccattagttgttttgtgcattttgataaattatttaaaagtttggagttacagcactagaaaagcattcacttacatttagagtgcagctgcatttaagagacattgttctcgtttctttgaacactaggcatctgtttaaactggaccctacctaatgctacagaccttcagtgtgggccatccccgcactgagcagatgctattgacttgaaataggagtggccagggcagtgttccatttctccttcagaagtgtcttatggcatcagaacctaataccggaaacagatggaaactgaacctcaggtttcagatcttattcaaaggataagagttgctgaattgaaaagtgtcagatttagaaaacctgtaatcagtcaaatggatgaggggaatgatgaaggaaaatcattgttatatactgagaagaaaaaagaaaaattagtagtttctaaggagtttatctttggttaaaagcacttcatttttattattttttaatttttttttgagacagaatcttgctttgtcactcaggctggagtccagtggcacgatctcagctcactgcaacctccacttcccgggtttgagtgattctcgttcctcagcttcctcagtcattgggactacaggcgcacaccaccacactcagctaatttttttgtagagacaatgtttctcatgttggctgggctggtcttgaactcctgacctcgggtgatccgcctgctgcggcctcccaaagtgttgggattacatgtatgagccactgcccccagccaaaagcactttaaataaacatatatgttaaggaacgtatgagtgttacatattacagaattttggccaagttgtcggatatataggatctttttagtagtatgaggattaggcagtactggacaagcaaagataacgtccaaattgagatgttcttcttgggtaactttgagttaatgtgaagctcattattattgaatatattcataggatgcataaatgtacccttctttcatcaatacataatggcaaaaatgaggtttctttgatcatttaggttattcttgtcctttttatggcaccttgaaagtgagttacactggtctggtacctttgattgagagttacattagactgaagcttttatgggagtcatccgacaataacttaaaatgagaaactgaaatcaatatgaaactgaatattccagaaaaatgtgatttattgaaagtttccttttgttttatttctcagctttgttgttttatgtctttatataaaacaacaaagaataaaatatattttattctctacagcagtgtttccaagatgtgacccacaaagcattcttttcctgctctgttaatatggattaaactatggcagtttatctactgcaggacttctcagagcctttgacagtactaatattccctgtgattcttttagaatgagatatattatctgatctttcccaagcttattttacttcgcctgccgctctcttccctgccacctcctttttttagttaatggaatatctactgtggcagatagctgggaaataatactgtagcattttcaaatgtattttctcatttaccatcacagcagtcctgagaaacagggacagttttgttgtcgttttttggatgagggaggagctaagatccaccagagttcaggctggcaccaggatgcaggtgtcctagtaactcacccagtcttttatctccctgtcaagccttcggttcaggtatgaggctcttagtcctatgtggcagggctctctgctggcagagttggggggtcatctgggtgataacagtgatctgaagttcctgtgtctggtagctggtccacagggctctgtggtctcctgtagagaactttctaatctgagttgataatgtgggtgagagaattggtccttatataccttctttgaagtaatggcttaggcagcccctcaggtaggctttcgagtaggaaagttacccaggtactcaactgtgattcacttgtgttttgcttgccaattttcaccccatggtactatgtcatgttttgctctttttatagaaagaaattcaagccatgagtcagtgcagccatcccaacgtagtgacctattacacctcttttgtggtcaaagatgaactttggctggtcatgaaattactaagtggaggtaagtggattttgttgttgttatttatttgcttgttttctctccttttgttggaaccagcatattggagaagactttagattgaatcctttctctcctgtgtttgaaagtttgtttggtttctcattgcctagaggataacgtccagattgcttcacattgaccttcaaagcttttcataattttgcttaacttccgagaatgtgtatgtcctcttctccaggtatgaaatgcccgaccttctaggctgagaggcagctcccggaatgtattatgtgctctcatgcctttgcccctgacctgtcctctttctcagccttgcatctctccttcgttttccatgtgctcaggcctaaaaggtcacattctctccacagtcaccgcttactcttcaaaaaagttagccagtcctttctccttgagtcctttctttttaacattgttcaggtccttaacacattgcagtttgctgaattatctcagtgccatttatcagaatgttctgtgatgatggaaatgttctgaggtgctgctatctactttttactaatcccatgtgactcttaagcacttgacatgtggctagtgtgactgagggactgagtattcaattttaattaacttacatttaaatcaccttgtatggctccagtattggacagtgcatatttaggttgtggactttgtgaagattgtctaatgcactttgaattcattgaacttggcgcccagtaggtgctcactaaatgtggtttcagttgacatggggagaaatgtgtgctacatattcacttgcagtgttgatcagaaatggcactattgtcatcctattgttgcatttgggaagggaaagtcacttcctctctctagcttcagatccctgcagtgatgcaagccattgacaatttaatttacaaggtgctttcacatcctgtattttatttcttttaatcttctaacatcactatcagagagggaatgataatgataaccgttgccttttttgaacacttactctgtggctagatcctgtccaaggcaatttactgaccttatcccatttaatcttcacagtgtccctgaatggcctgtgtcaccatccctgtttttcagaaattacaccaaatttcaagggagtttagcaacttgcccaaggtcacacacatagtaaatgttggtgctggaatttgtgactttaacatctgttgacttaaaaatttgtatgctgtgctgcaagtatttacaccttcgttttgcagacatgggcactgaagcttagaaagcccaagtgatttccttgggaacacccagcatacccacatctctggtgtgttctctttcgagggcttgattctctgggtatctttctgagacatgaagtatggtttaggatcagaggagaacattttgctgtgcctggacaacccaaaactagcatagcagaatttatatgatagagcctattttaatctgcagatgtcgagggaggtgttttaatgttttccttttttaaaaaggaaactctcttggatcaagcagaagcccaaaaatgagatgacgaaggcattgtaattggcttgggtctgcttgtgtaggtctcggtggggagccctggggagcttagttctgttctgttttcagtcttcctcagtcttattagtcattgtttccttgagtgcctacttcagtttttaattaaaaagaaaaaaagaaaaaggaaaagaaaaaggaagcctgccagagctggactgcagtattgagtgctgggactgcccctttattcagcagaggaacttgcgctttgccaacaagatgatcttaaggcattctctttttgtggggttccaccaactctgaggaaatgagaaattctgatgacttgagaccctgaatagtcccaaatgctctgctcaagctgaagattttaccttttgctttatgaagctgagaatcttctgttttctgaggaggatctgacagaaaatttctttgtctttttgagtccaatttagcctctctgggctttaggtaagaacagattttaaacaggtttccacaggtaaggacgtgggcagacgtggactcttgttcatttttcttttagcaggacagaaatgcatgcatgcctggtatggtatatccttatacaataaaaagaaaatgtttttggaattatcattttttaaatgacacaaaaatctaagagtcaacaaataaacagaggtttttttttcctctggggaaaaatatgcatttgttttcttctatttcattacattgaatctcttaatgaggggcaggcagctgtatctgatggggaagctcaatcctcttagttaattataaagagcctagagccaaattcaggtcctgaggtaagccgtttgttaactcttcagaaatgtcaaacccccaggtaattttggcttttaaactgacccaggggtttggaatactaattaatatgtgttgaaacatgaattcacagtgccaaggatactaatctgtatatggtaacaaagtactaggtatctgtttgtttattgtaagtgttagtgcctcaaatatatcaggtaaatgaaataaagatcagccaggctcagtggcttatgcctataagcccagcactttgggaggccaaaggtgggcagatcacttaagcccagaagttcaagaccggcatgggcaacgtggtaagaccccatctctacaaaaaatacaaaaattagccaggcgtggtggcacgtacttgtagtcccagctacttgggaggctgaggtgggaggatcgcttgagcctgggaagttgaggctgcagtgagctgtgattgctccactgcactccagcttatatgacagaggcagactctgtctcaaataaaaaaagaaaaagaaggaaagaaaataaagatcaggtagtgtcacaggaaggaatcttccggttataagcagaggtctagaaacaacatacttctttccccctcccacctgtgatttaggtcctcaaagagtgtgttttttttctctcagcagttcacttctgccttttctcctggcctcatactcctttctttgtcagttcagactttttgcaccctctttggagggttgctcttaggaatttttgtgagaaatactgtaaccagaaaaggaaccagccatggaacggccatgaacagccttctggtccctgacccagaatccttctcgttaaattcacactgaaagtgctcttgcaaacttggatttagtgtttttggtcatggggcccccattcaattgtttgtttgccttgggaatatttgcattaaataaagcccatattttgatgtttctattaaattttatacataatggagtcttgttctgaaaaggtgatgaaggtgcttatgttttaattcttctgtttgtctacttaggttcaatgttggatatcataaaatacattgtcaaccgaggagaacacaagaatggagttctggaagaggcaataatagcaacaattcttaaagaggttttggaaggcttagactatctacacagaaacggtcagattcacaggtatgacctctgcagagatgtttaaattcagatgttcatatcttaaagaggttttggaaggcttagactgtctacacagaaacggtcagattcacaggtgtgacctctgcagagatgtttaaattcagatgttcatatcttcagccctagtttgtaaagaatgttaaggaaacacatgttgcaggcaggtattgacattactttaacttagtctaaatagatgggaaaaaagtacttaagaaagaaacaagagaataaattttgatgaattatattggtatccttgggattgcttcagttgctttcactgaaataagagtggaatctaaaaaggactacatggactcatttaaaaagatcagttttggtaactactcttgaattatactagttgaactagacagcatctctatctttctaatacaagcaagactatccaaacattgtactatgtgaattatttttgatgtggtggtgagagggaaggaagaggtactcatcttcttttgtgacataaaatgttaattctttacatagtcaaatcacatagaatatgagtgcttgatgtttcaagtgagtgagtgctacttgggctcttaggaattattgcaagtaaatagccatttaccagtaatactaataatgtaattctcctaccctgaaatttatatttaattatttctactatatttttctttttctttttttttttgagacagagtcttgctctgttgcccaggctggagtgcaatggtgtgatctcagctcactgcaacctctgcctcccgagttcaagcaattctcctgtctcagcctcccgagtagctgggattacaggcatgcggcaccatgcctggctaatttttgtatttttagtagagatggggttcaccatgttggccaggctggactgacactcttgatcccagatgatctgcccaccttagcctcccaaagtgctaggattacaggcgtgagccactgtggctggcctatatttttcaataattagaaaaaagttactttagaaatcaaatttataaattgcaagttgtcatttttcaaagtactaagattacacaggttttatacggtgaagaaatataatatctattattataattagtatttataatcagtctctcaccagagagaagttcatttttcagaaagataattaagttggaattgcatcccaaatttaagtggaagtagaggagctttacatagactgggctttaatacttggtagaatgacagtagtgtgagtttatgggcagtgtctaactctgaagcataaaatagagagtctatttactgatgatttaattaaatttggataattatttcatagaaaatatttctttctaaaatcctaactctcccccacgagtaaactataaagtgacaggtggatccttataccttttttttttttttttttttttttttgagaccaagtttcactcttgttgcccaggctggagtgcagtggcacggtgttggctcactgcagcctccacctcccaggttcaagtgattcttctgcctcagcctcccaagtagctgggattacaggcacctgccaccatgcccaactaatttttatatttttagtagagatggggtttcaccattttttccaggctggtctcgaactcctgacctcaggtgctccacccaccttggcctcccaaagtgctgggattacaggcgtgagccactgtgcccagcctatccttataacttttaaaatctgtgctattatcttaatatttatgaaattattatgtcaaagagctgcgttgtatgatatgttttaaaatcttcctgagtgaatcaatacactataaagtctgtaccctacaatttattttctatttttttttctaatagggatttgaaagctggtaatattcttctgggtgaggatggttcagtacaaatagcaggtaaagctgataaatagaaaaattttttacttgattacggaagtgttacagtttcaaggaatgtagaatcattcctgagaaatgaataaatgcatgtaatctcttttcagaatgatatttacagaatgtttgggtccgaaggataacatattttccttattgttttgataagtcattagatcatcctgtgaaaaatgccattttagtacatagctttttgataaagaataattttattttcaattttattatgttttctacctttcacattttataatggtaatactcatataacttcaagaaatgcacttgtaaaaacatttttcgataggtttgaaaatttaaaacatcatacacatcaattaaaaactaatttatttcttaagaggtatctgaaagaattgtgaacattaaaaatctgggccttattttgtttttaactctgacccaacatggctattcttgacaaagctggtaggctggggatgcaatgaatgtcttttacatgaacacacaatatcaggtgagcacctttcgtgttcaaagcctctattttgttattggccctagagtaaccttaaaggcctgggataagatgtagccacgcccatattaactcttgctttacccatgtcgttgaaagtctgtctcagcaatccttttagctttcatggtttcttgggggagtgttcttggcattttttggctagacagtcattccctctactggagtgaccctgtcattgcagagacgcgtaagatgagcccacttgtacccatcacctagtttcaataattatcaatctttggcaattcttgattcatctgctgccccccacccccaccccccgactctggtgtctctcctcatcgtggaggctggattttgttgttgagccatctgagttagtgctttgtgtgtgcatatcttgtcctcatgagtggaccttatcccataggctaaggacagtttgaaaaagtacttcagttaaacaagtaacagctaagagacatctgtgggcaaagatttcaaactgtccagccccaagcagtctagttgttcagagtgcaggctctggtgtcagctgacttgatcgaaattctgaggccaccacttagtagctgtaccaccttgggcaagttaccaaaccttcttaagactcagtttccttaaagaagggtaaaaatataaactacttcatcttctttcatgaaatcaaggtccagtgatcttaacagtggccaacacataataggcaagcagtaaatatcaataactgctgttctaccatggctgctgctgctactgctgttgctactattactagtattacttctgttactacgactaacaggatcacagtgatactcccttgcactgactggagatcatgtgaccctcaaattgtcctgcaagagcttcagctctgaggagagtttatgacttatcaaaaggtaatacttattaattatggaatttggaagctaacttgccattaatcttgctctaagatgataaggaagtacaactaattttctgttttatgatgaaatgatgatttctcactaaaagggtcaaaatagcagtgaactgcctttgaaatgtgaaggctggtcagcccctgccttattctgttacttggtcctctgccagtcatctcatcccattattcttgtcagattaatgatccgagcctctccctgagccttctggaacacattgtccttttctttttcccagtaagaatccccgaggtaagatttcctggctttttccttccatcacaggcctttgggtttttcctcactgccgaggagtctgttgtgacccagtacgtgcctgcactgtgcgggctgctgagttcagaagggctcaggcaggaagcccctgcacagggtaggtgtgggaattaagtgaattgatgtgtagagagggctgtgccttttctatgcctggcatgtgctgaggactttgtgttccagccatccgggacttccttggtatctttttgagtatgcgacttcatgcttgtgtaataacacaaactggaatggccatttcccagatgtatggtggctgcttgacaggcacctaaatgtacagcttctgcatctctggaactgtcgctttctagaattcacatttaatttctcccatattctctgacctgatcataacatccaactaatacagtatttaaagtttgaatttttaaagtgttcactataatataaggttattgccttaaagcatttttaatgtctccttggaaaggtagatgttactgctgtcctcattttataggagattgactttcttggtcaggtacttggttgctgcctgaacaaaaatgaggaccaggagtctctgggtcttttactggcatccttgtcggtgggtgaaacaggcgagatcggggggaagagtggaatgtggagactcagcaacggcaggggtgagacggtccctttttgttgctacctggacaaataatacattgtttttacccagtctgtttttgctctttcccctttgtatctttatgcctctgaggccctgtagtttgaaataaaagttaagcaggggagaagttaagtttgcatttatttctttgagtgtaatatacattgcccaccttgagaatattattgtgtgcactgtttttaagaaagggcatttttgctatcctaatagaaaacataatgatttttgtttttttttaggggaaacactcacttttacatatgtataaattccctttttcagaactttttatcagaaaacagaagattaaagggcctgatttagaccatgagaaaccctcactttattatgcagctagaagtgtggtggataggataatgagcctggttctgttgaacacagtccaaattctctgggaagaatgtacatttctattgaacgtgggtataaaatcaggaactaatgtgtcttgagtgcttcctgtgtgtcaggctaggttttggattctgaatgctttgagtctcattcagtcctcagcacaactccatgaggaaggtactattgcatccattttacataggagaaactaaattacagtggggaagtcagttgcccaggtcacacgtagaataagcggtgtagccatgctttgggtttggacagtctgactctagaaactgtcaactcacatctgtgggatttccaggaggaggaccttaaatctggatttaaatgacctcactttcagatggaatataccccagcgatcactagctcttctgtgtctctgcataaatcgattcccctttgggccagggaacatattcagcaccttcttcctccttgctccttcaggctgaaacacaagggtgtccctggtaaggtttcagggcataggagaagcagccatctaagcgtcatttggtatagaattaagctcaataatgacaccacactcttttcagactggaaaacttcaggtttgatgtagtgaattagaacctgaggacagcctactcagggtttaagagaaaatgctttccttcttactgtaccttctatgcttagaggtccagtgtgtgtaacttcctgataatcaacttggatgccttggaaaatgtaataggttttgctgcactgtgtgatagaagggggagtggctactcgaaagtcatgttcttcccacggcatagcattttatcttccaatttgatgccctgtcatattgtcaggaagagcttagtgctttggcaaatgactaagcctgtttgtccagaattaatgagagacactattttgagcaaacagaaattcatatgaaacagatcactttgaggtggtttctgctaatctttttaatctaagatttaaaaaaaatagtggctactcttgatgttctataaaaatgttgatttcaacacctttgatttataaagaactttgtagaagcttactactacattatgtaaggtagatctcatgctcattttcacttacgtttgccttttaggtgtgtgtgtgctgtggtttgaattttgtgtgccctccaaattcatatgttgaaccctaattaccaatgtgatggtgttaggaggtggggcctttgggaggtaataagatcatgaggcctaaaccctcatgagtagggccagtgcctttataaagaggccccagagagctgccgtgcccttctaccatgtgaggacacgaacagaaggcaccatctataaacaagaaggcgggtccttactagatagtgaatctgccgatgccataatcttggacttcccagcctgcagaactgtgataaataagattttgttgtttttaagtcacccagtctaaggtattttgttatagtaggcccaatacacaaagacagtgcttatgtgtgtgaatgtgaatttcccttccctggttttacataacagaaataaaaactggtactgagcgaaagcagcctggaactctagaaagttaccatcaaaatgcctcacgtatgtgcatccattcaaatcaagcttatgccctgggtttttcactgtccaaggtacattggtagaactttgggtagcatctcttatttactgggagggagataatatccttatcagccttgaatacatcttcattttaaatctgcatcttgaacactgaaaaccccatgactaaaagtgctaggaaaacatgcaatgaaacttaacttgcttctgtcacttaggcgttatccattaaggagctagaggaagatgggcaaggtggttgagtttttacacccatagctgctaggttctttcattttccttctgtggcctttggccctcataaagtgcactttgatggggagggtaggggtttaagagttattttttgtgttgtagggaagagaggctgctgctttgagcaaggcacccgagcagcgctggagtcagcttctgattagtgtgggaaagcgctgaaagccccggaggcatccaatcaggaaatgatgtcatcacatttatgagcaccttggcccagagcatgggctctgacaccagacagccatagttcagtcctggcattgctccttctagctgtgtaaccaagttatagctttagcttctctgtgcctcattttgcacgtttgtgtaatgagaatatactgcggcattaaaggagttaaaacacattttattttagaatttgctaactcattgctttcgtattgaaattgggatggtgtcctctaattacttagggtgtggtaagctcacggtggctagggaggtgcgaggccttaggcactccatctgacctcctgccgtgttattttgctcttttctttttcccatcagtttcctcaatatcaccagagtgaagaatctgcagtgtagatctgactgtatcttcctcttgcataaagtttataagcattgttgatggaataaagcattgttgatggaataaagctccagcttcctactaatggcagatgagggacctgcctgtttttctggtcatgtctgcaagtgctttctgctgtgacttgaaatgcttatagcttcttgttcagggttcccctttcttacctgagtaacttcttttcatgacttattcatgaagaattctttccttgagaaacctttcatgatcatttcctccaccatgcccacctgcaccaggttaagcccctcaccctggtggtttgcaagggttctggccatactctagctagcctatgacacagcactgacattgggcctttactttcccatcttcccttcagactggatacttcccagagggagaaactgtgttgttcatcgcggcattcccagatggtacctgatacatggcaggtgttcctgaactttgggtcagtgcactctgcctagaggcacgggagacaccctgtctcagcagcaggttatgcaagtacatgtgcctgttggtggcaaagagaacagatgtaaggcatagctgagagttgaaatgagtaagaatatatcagcttagcagggagggaggcagaaatattttaaatatttaggtatgtatactactgcatattttaaaggctgaaaatagtttttaatggggaatatcacttctgattttggacaagcactgccctagcctgcaagccatgaggctaaagttaaggaagagtgaagcagagaacatgaatgaagaggcaactggttatactcagaaaatagaatacacatgaaaattaaaatctgttggggtggggggggtgcaagtgctttatagtgaaccgaaatatttgttttgagtttcaggaacagtttataactatgtgaattatggtttgatgaattacgacaaaattctcatacatgaatttttttttggcataagtgaataaggacagtaaattaatgtggctccctgatttttggtatctcgacaaatggtaacatttgataagagctctagaatgaaccaagaatgtactcagttctggaaactgagtttttcattccagctgcacaccatcagtgagaaatacttggggagattgtaagcagcttctcatgctttaacagctgctagcagttgtttgagcagcagcttaaggaaatgttactgggtgaacccggtggaggagaaccactttgctctactctcctgctggaatttttgctcagctctgcacgtttagctgcaggggggacagggttgagcttcacagaagagtgtctaggggggcatgaggcagatgggactcagtctccctccttccctctcttttttccttcctgtaagggcctgcaattcattattaaattaaatttcacatattaccaaatactatggaggtctgcctaaaataagagtttttagacttgaaagcagagcaattcggtcctttgcttattttttcgtttatttttctttttcccagaacctccatttgtatagcctgctccttctgtgggagaaaaggtaaacattagatgtttggtttcagtgtatcctcagtggttagttgacaggtatttattgagcatttgctatgttctaggcacagtcctctcagctgacacagtggtaagcaatggagacattgtgtctactgtcatggagtttaggtgacacattaaacagtcaactatataaatttaaaaaatgtgttaagtgtgaagggaatgcctatacctgggtaacttaagttatccacattaggactagttgaataggttgtaatggggataaattttaaatatgtattgtaaataggttttggtcaataacatcttataagttactgcatgtatcatatgttgattacagatttttaggacatttaaatagtgttaacctgtgtttacattctgtggaatatgatttaacacttgattgtatgtagtacacttgaggacacagtagccagtctaggcccccagtggtcattaacttactgtccttaccctttgctggccatagtttgtatcacctgtaaaatgatgtgcttaggctctcaaatttccttgcaactctaacaagtggataactttaatagagaactctatgacccctgtgctcctgaactgtgcttctcacagtctttcccagttcttttagtgggagaaccattcttctattgaatgggccagaaatcttgatattcctcgatccttgtcgttctcttggaccctacatcctatccaatatgttagtaaatcctatggttgaccatatttcatcagctccctgctgtcatcctggtccacagacccatcagttcttgtttggattattatggtggtctcctaaaaggacctcttcttctgcctttgcccctctgtggtctgttctctacacggcatctggattaatgctgttaaactaagttgacttgtattatgcctttcctcaaaaccctccaaccccttgccatttcagagtgaaagtcaaaatccttaaggtggctcgtgaggccttacaagatctggcccctcattatgtcattgatttcaactcttacatcttcctcttcagtcaaatcggcctccttaccttgcatgctgctgccccgggatctttgcatgggccgttccttctttctggaatactcttttccttacctccttcagatcttggctcaagtgtcacatcagtgagacttccaggcctcatattgtaacccccccccaccccatattttgtattccctgccctgctctgttttctttattgtacacatcagcgtactctctatcagtggctctctcaaggtgtgctcctagagcagcagcagcagcataaacttgataaaaatgcaaactcttgtgttctcctaccctagaccttctgaatcggaaactctagaggtagggcccagcaatctgtgttttaagaagccctctaagggttctgaagcaggctgaagtctgagaactactactatgtattatattttgtaattttgcttttatctgtatttacctctcccccttactcctgccccaacttaaaagtcagctccgtgagagcaggggtttctggtctacagtcccagtacttagaactggaagtggcacttagtaagatcttggcaaatagttgtcaaatgaattaataaacatctgactatatagtaaatttagattaaaagaatattgagcaatagttcagtgactctttaatgttaggagttttcagtgtgaggttttcttttatcacagatttggaaatctgcagattctttgaagattcaactaatccttctgaaaactttgtaaaacaatggtgtgcattgtttccttaaatacttgtagcaactggagttgtgttattttaatcttctcccatagggatcatatttttaacatgtacagatgggctattgtggcttaatggaagcttctgatagtagtgctggttgagtgaagatttgtttaaaaaagatcacctgcaggtatatgaatattgcattggaaatttagacttattaatatttgatctaagttgttcatgcctgtctctgcggatatggccggccaggagccctcgctgactttagaagcttgcctttggcttgggaaacaataatacctgtataatatacttacctggtgctctccttacagcaactctgtcagttcagcacaatagttccttcagatgaagcatctgaggactgctgagcaattgtggacttgtttaaggtcattctgaaagtcataaaagcacttcactctcaaatctcctcagacttcacttttgcttcttgccattaggtttcacccctaccccaccaatatacttcttaactctatgccttttgacggttgaggagcgccggggctcagttccttccgttgtaaagtaaggaagattgacaagatgttctccaaggacctatcttgcatcaaaatgttcaaataacccttcattagctgcagtcacttaaagacattctcagtactgttttgaagaattcaaatcagaggattgtcttgggtgtagagaggagagtaagccaagcctctgtcctgtggctgcttttaccagagcatctttaaaaatagtcctcccaccccacattggggatccagggaagaatggatatgtggtgtgggaattatctgtgtttttcctttgttcagtgtaattatcttatttaatagaaagttgaccactagtgaactcttgaaaaagctgtctcttggcctggaaccttcagcacatctgggctgggactcctgctccagccttcccttctgttgctgctccaggtgtgaccagtgactctacttcttactgaaaattcacctgctttggggcaagggttctgtagctctgacatagatgggcagattatctgtggtttgccattttgttcaactggtcctctccactgctgtggctaattgactgtatcagtcaactgaactttgagccaaatataattggcattgaccaccacttattctttttgtcccttttaagcctgtggtgtcttgattgagagaatggctgaggaattggggagggagtagcagcttctgtgtttttaccaagaatcctgttgaattttttttttttttttgagaccgagtctcactctgtcgcccaggctggagtgcagtggtgtgatctcggctcactgcaacctccacctcctgggttcaagcgattctcctgcctcagcctcacgagtagctgggactataggcatgtgccaccaccacacctggctaattttttgtgtttttagtagagatggggtttcaccgtgttagctaggatggtctcgatctcctgaccttgcaatctgactgcctcggcctcccaaaatgctgggattacaggagtgagccaccgtccctggcctgaatttttctttcaatttttctatcgtgaattgatttgattccttgtagaaggtgcaaaggatgtagcctatttgaaggaaactggttgatggcaatgtcaagagtctacatatgagaccccagtcatgggaaggcttgcttctttgtgtttcttttattttaaaagatgaaactctacctttatggactgtcttatgatttcttcttttgttgtcagaaaaggctgtgaaactgtcattctctgatgtttcaaagaaggttatgactactgctccctcattaatagatagggaagatggatttgataagtgactagagcatttgataagtgactctctagggcctagactcaggaaatactgtaggattatgtttttttgactgtgaatgacttggacaccatgccatggttggggcccatggcatatagagccaaacaaggccattgagcaccatttgctttcaagaaggaataaatagaaatgaaaaccaggagcctgatgtggggtgaggggaagggattgggtgggagtgagggtgtcagaagaacctctttggttctacatggttcctcttggggtaccaggttctctcccaagcaagatgggtggtgtgtcccaatatgtagtggtgtgtgaataactgattactaatagtaaagtgccaacatatttattgacttgcttaaaaggtaagcagattcaaggttatcactctaataatatgatatcaggttggtgcaaaggtaatgtggttattgccattgcttttaatttaaaaccgcaattacctttgcaccaacctgatatcacccttacacaattcattagaggttttcacaaatgagagagaaaggagtagtgccacataaatctgtgcaaagaatcatgtttacctatagcctctctcccagtaccatcacacctgcagtgagcaactgttactgataaactgttagtaagtattgtgattataaattattttcatgcacttaacaaagatttcataaaaatctgtgtattcccaaagaggtgtgccatgtatatgaatttattctactgcacatatgagacatagttgagaatcgctgggttagacaattctgtgtgggatatgatttatgtttttagaattgcccttggactaactgtgtcataagatacatgaacatgcacacttaactacttttttcctgctacgcttcctcgactgccatggttctcttcatctgagaggtgaaagaggaacctgtggagttggctgtgcattgagatcttccagtcccactgaatcacgccatagtgcctgctaggaggacagtaatctagagtagtgcttctcttcttcgatgtgcgttcaagtcagctggggatcttgctgcaatgcagattctgattcagtaggtctagagtgggactcaagattctgcatttaaagcctcacaggtaatgctggtctggtttatggaccccactttgaattacaagggtctagactaggatgtcgaacttacttctgtttcctattttcctagaagtgtgctattttctttggtgtaggtttatgtaaatatagccccagcagcaactactggcaaaaaagcgaattagattcttcttgcagtatgttttcttcccccttgagatgcctctgcatttacttattttaatttgtgcttctggcatgaaaagccatgcttgatactggagctgttttaaaatccaaaattgcactgtgtgctaaacggttttcttgctaattttttaccaagtccttttggggattgcagtgactttggcctctgatgcaatggttaacccttagcagtcaggaagtgtgaatcagtgtggctagactgaggaaaggcaggagactgtaagagttaagaaggctttgggtacaaataacagagtactggtctgaaaggagattaagcagcagaaacgttaattatctcacgtagcaagaagtctgggcatttggtttcatagttggtgcaggggacctagagatgtcacagaggtcatggactctttccttcttccacttctgcactgccagtggggattgggcagcacctgccagcatgggctgtatcactcccatacatcacatcttcatgggctgtcatcactgccagcatcacctcttcacatgaccattctcaaacaggaaggagaatggggagcaaaggagccctgtaggatggttattttattcaggagaaaaacttcactgcaagggcctgtactgtattactacctttggatcttacaggtcaggactagggcagagccacagaccattcactggtgaaaaagaaccatatgccattattggcttatatcaataaggtgaatctcccaaggcctggcaaacaaaatcaagattctggtaggaaagaacaggatatggatgttgggtagtcagccaacagtgtgtgctccaagaactgatactgagaagttatcatattctaagctcctcatggtaaagcttgaggacctgttgctcaaagaaggaaacgagcagggagtgtcattgggacttaacattcaggcctgttcaattttaaagcacctctttggagcggaaacatggctcctttgtatgcactgtgtcttcccttgcagcctgtcttctttctgttagttttagggattattgatggcagacttactagaatcaggatcccacagtatgcctctgaataggggccacatatgttacatcacacacgttgctatctggcctctttggccgtgggtgtgctggaataccactataataatagaaggaaaactactcctatgtgcaaagtggcattatttcaagaaggaagccagctcagtgagtgtgggtggctgctgctgcaggtcttgttgcatcttgacttgtcctgctgagctttctgctcttcttcttgctctgagctatgctgtgttctgctgagcacagcgcaggtgcccagaagcgcaacgtccacctggaagacttaagttatccctctgcctcctttgagtcaggacagcagaaagctttctcctgctttggattgcagggtttcctagtaggttggagggaaggggtggccctcccagtttgcactcagagttggctttcagtgcccagaggtctggtgacattctgatgatggtcaggctccaggaaaaaagttgtgcctatttcctctataaacaaaaagaaaacaaacagaagtattagtatccaaaggctggatttaattatacataaacttaaagcagaaatggtgatttggtcagttaagggagcgaaagcactttgctaaagtataccataattgaataagcattgcaatcagaaggaaacaatactagaatcctgttggcttccatataaatgctgaattatggcctaggatgagctttcttgttattctcaaatgccctggagggagaaggattttgaccagagagtgctatgatcagaaactgcactttaggaagattaatctggatgtaataagtaagtctggattgcagttggaagaggcatgcctctgattctgtaactgctaactgctaaagccctgactttccctggtctgtgtttttcttctttcaccaagaaaatcgggtgaaagggccctgggaattagcagcagaagatggtgcttttagtgctgagtgtagtatactgggcccattagcatgtttcttgtatttatgttgtttaggtcatgtcatagtcattctattttagttaatatattcccccatgttagctctcactgcaaggccaggattatgtctaaatcaaaactctgttagcctgtggtatctaaacccactccgtgcatgtacacaattgtgcacacccatgtgtaccgggcataagtaggtgctgcaccactgacacacatcctagtacaaaaataatatgaaaataaggaaatacatggttaaaaaaaatgctctctttagtctgttcccaacagaattaagaaaatatttgcttctgttttctactcattattatacagtttgcataactgaagtcacaatgtacttctttaatcatccaacgttggtggtataacattttaaggaaacctgtgggactcgggaaggccggatgctggcagccctgaaaatgttcccgggtgtttagaagaacatttcaattttgtcagtcaagtcttgagagtctctcatgagaaaaaaacaacaactgggaatcaaaccaaattataaagagataggttttcatgatataaatatgacatttaggattaaccagtgaacctcaaaccagtttttctgtgttgggtaatcacaacttgatctttactcagagaagagcttaggagttgcggaatcttaaccccattattgcattttgcatttccttctcaataaagaaaaatacactgaactttccggaagaggagactagggctaagtggctgactcctttctgaaggactgtgaattttattcagaccttcgataacttgctgtgtgttccttggcaagtcatctaatctttttattccttcctcttttcttaattccaatatctactaaatcatcgtattttcttaagaattggtctaatcctctccatttccaacctctctattcatatacaggctctgttgattttgctcctgggctatggttgtggtcttctctgcttctagtctttttcctttcttgaacatccctgcatggtcactttttccaaatgttgttcttctctaacgagagagggaacaacagctgttaattgaatcaggtacaaattcccttacctggtgctcagactctgtggttggttgggcccctcaacaatctcacccagtacttccctgcttttaaaaataatggcctctgtggaaaagaagctgcttgtaggaaagaactctcagggtcccctgaagctatgggggctcctattgctccagactcccacccagccacttaggcatcagtgtctcttttaactcattgtagctacattttaggaagctctgaactctcaaacattgatcccgttactctctgatcaaagagagtcaatgttgttcatgcacaactcaggttccttttcaaagagaatagcagatactgtagaagtttgaggtaggtgaggcttgggtactcacccacagcttcccttacaggttttagagaaatcaactttcagaccaaattttgcccttcattagcaagcaagcccctaaacagttctcacaatttgttctgtaagctcaaggaaatcccagttctttttcctcataggtgaatgaaaaattcattagaggcagacatgccaagattccagatgcagtttttgctttatccttatgcttgctactaggaatccaaccatccacagaactggctagggtatagtctacagttggactggactggattgttttattctgttcatgcaagagtaaggagtatatctaaaatattttagccactctctggtgctaagaacctttattttcagcagtgaaagcccatttctaacatgtatcatacctctcaacaggtcactgttttccctaataataacccctttggacaatcagtcacctggcttatgctcatctatatttagatttggataatagaaatacttccagcagctgcctctggcatcctgagtcgagtgctatcagaacccccccagcactggacattcttggttagaatgccagctgaccacctaggttgtggtatcacaaacataatatcacatggcatatgttgaagtattttaggtacattttagacatcataaccacacagttggcagactttagttttgcggactaaattaggcaggagaaatcgcttttctatttttttaaaaatgaatttgttgccaactacagtaagaaagggagctttttcataaagattccaatgtttggcttttttgggaaaactgggatatccagcaatcctgggtctacatttctctatggcaactttcttctggtgccaagcagcaggggcctgccttggaccttggtgggagggtgctgacagtgggctccagggcttcacacagggcccagcactcctaaagtctcccgtcacagagactgagcatcaagggcccttgtcactgagactgtagctgttgtttttcaggaccctcttttctccattgtattcctgcctggctgctgtaggtgttttgagtttttgacccttgcagctgtcagtttttcttcttggctccacacttgtgctttgctcatgccgtttctttgtctggaatttgtttcctgttggacttgctcatccaagtcttcacctcatcttgaaggctggctccaagacccactttggagatagtcttctatgaccattatggttatagctcctctgcttctacacagacaatatagtatttgattttatacatcttatcctacttaggtgggaatattcttttttttttttttctgagacgggctcactctgttgcctagactggagtgcagtggcatgatcatggcttactgcgtcctcgacctcctgggctcaagcgattctcccatttcatcctcctgagtagctgaaattacagttgcatgccaccgcacccacctaatgaactatcatgcccgacaaatattgttgaagtcaagaaacatgtcttctcctattttatctctgccactgtaaaatatttatgcttatcccctcagcctgcttgccttgcttatgaaaaggcagtgagtagcttatcgatctacctaacagttgttataaagaatagtcatacatggtaaaaaaaaaaatgagtcttataaatatgaaagtaatatagaaattgaggctcggcatggtggctcatgcttataattccagcacgttgggaggctgagacaggaggatcgcttgagctcaacagtttgagaacaccttgggcaacatagagagaccccatatctacaaaaaataaaaataaattagatgggcatggtagcacatgcctgtagtcatagctgcttgggaggctgaggtaggaggatcgcttgagcatgggaggttgaggctgcagtgagccatgatcatgccactatgttccaccttgggcgacagagcgagactctgtttcaaaaaaataaaataaataaataaaaataggcctaaataagaagcccaataaggcccagaaagtttaagtccctttcgggagtcatacagttgggtaatagtctagccttaggcctaatcactgttaacactcagatcttgcccattagtcctgtaatgtttcctagtagatctgccactctccaaatcagataaccatacctgcagatcctcctcaaggcttagtagcattcacacatcaaaactagaccatgaccaatgttactgaaatcaaattacgcaaaggtgatgaatgcacatcaaattactcaccaagagccagggtgccggagatgctgtgtcattaacaaggtcatgcagaaagccttctgctggtgcacctgttcagcatggagggttgatgtacctagacgacaaagcatcatgtgcaagggcaatgctggtgaggccaaggaggtgatgggatcagggaataaaaagtaagtcattcagtaggctggagcttactgtctgaatctgagagtagtgatataggtttacgtgttatgctgaaggattttgactttttcctgaggggacagggagccttgaaagacttttttttttttttgagacaaagtcttgctctcttgccaggccagagtggagtggcatgatctcagctcactgcaacctccgcctcctgggttcaagcgattcccccgcctcagcctccagagttgctgggactacaggcgcgtgccaccaggcccagctgattttttgtatttttttagtagagatggggtttcaccatgttggcctggatggtcttgaactcctgacctcgtgatccacttgcattggcctcccaaagtgctggggttacaggcatgagccaccgctcctggcctgaaagtcttttaaggagggctcaggcctgtgacatagaaaggcctggttgctggagcctggatctggggaaagaagggagatgggaacttaggaggctgctgcagaaatcttagcaagaagtagtggtggattaaatgaaggcagtggctgtggaggagcaaagaagtggatggattcagaaggtcttagaccctttttgttattaggatgacagcattatttgttgttgttgttgtttttcttaaagcagcatttacccatatcctccagttattcctggaggcagggagatggactggctaactttatgtgtagcctttgattctgtgtttctagagaaatgtctgtggttttgtacccaagtgaatctggctgcattccctttggctgtatagatgtaccccttaggaaacaaggacagcttttcactgttacagttctgccaccttgttctaactgtcatatgcaagctatctcaatataatataccaattttttgtgtatataacataagcacactatgtactttgctcaaaatgttctgttactgagtacatataatctgtatacacatcagccgtacataggagcaaattgtatatttcttctgtagtcatagagggagtagatattaggattgttgttttctgctcctgaaatttttgttctgagttttaaagacatttagccatctgtttatgactttaaagtgagtgttcaaagtggaggctctgaatgtatgtatcattacagatatattgaaagggtattgtcaataataaatggctactatacatctttttcggctgttttctaactttttaaaatgtgtaatgtaagcaggtagtatttttaaggaagtggaaatatatctaatgttaactatggatttttacctggattatgtcttttaggaagagactttagggtgcagagttgcttcaattgcatttaaaataatcaatttttccttaaagcagcttttacctgtatccttaatttatagatgatatgtatttatttcatattatattataaaatcattttaataaaaatgaaatgttggattcatcgttgaacttctttttagaaatataaattaagttgaaattagtagctttcaaagttttatcatatatattttttccagcagatatagtagatgcttacaaatattttaattcacctaactcttctctaagagaatgaattgtatcttctcccacccacaggagactgactggttccagagatttcttttcacaagacttcagttttctggctgcagtataagaattaaaagggctttagagttggaaacatatatgcatattaagttatttagcagtttaaacatatatacttttattcaatatgaacatgagagtagcagttggaacaaagactccatttgtcaattttcattccttttatttgtagttgaaatcctgttgggagtatgagtaaatttaaatataaataaaatgcaacattcaatgtatttctactcaggaaaccagttacaatgttattaagtcacaattgcataaactaaccttataggcctacagcaaatgctaatacattttgaccttggtttgtacttgagggtgttttttggtaattgctgtcaccctgacagccaacaagggggactcgcaaaggaaaagcgtatgagagcgatttgcaggggctcagactgcacattgcgctgtggtgttttgatgtgttgcctacctgtttttattactacccaccagctcgctatcaagtagtccttgacctggctatcattgataggtacactagtcttgagtaattggtactttaacttatcaactacttttaaccactgtgtaaaaatgaaagcaagaatagtacgttaataattgccaggcattcccttctgtactgtacatacaaatagaatttttacacatgtgcctgtatgtatatataggttgagtatccctaaatcagaatatgtgaaatctcaaatgttccaaattctgaaactttttgaatgtgaggtgacattcaaaggaaatgttcacgggtacatttcagatttctggttttcgaatgaggggtacttaactagtttagtatataatgcaagtattttaaaatgagaaaaaatccaaaatctaaaacatttctggtcgcaagcatttccggatgctcaatctgtacagtatgcctaattaattcatcttcttataaaattaacttctatatataatgagttaaagttaagaaaaatattatttacttgtacaatccattgcctctgtacttatgaaaattgtccagaaaatcagtctttgctgactaagcttttttgcatatggacatactcgggcatgttggctttatatatcttatctttatatacctcagctaaaagctaacaccctttatatttaatttggtatgctaagcttttggaccggcaggcttgtggcccattaccagcgatggtattctccaaggtgtaggggatagcagagggcaggtcttccttttttttcctgagagagcaccgtagacatgtttggaatagttcatcaccactgtaaagctcacaaagaagagacatgctcaaaaaatcacaatttataagcaataatgtcttacataaaataaaggtgatttttttttccctttcagattttggggtaagtgcgttcctagcaacagggggtgatgttacccgaaataaagtaagaaaaacattcgttggcaccccatgttggatggctcctgaagtcatggaacaggtaaaaaaacaaaaaaagtgactttttgatggacatagtacaatcgtacagatcattaatatgctaacatttcatttgtatctagcattttagtagaatgcataatgtaactaagatttaattctcaattgctagctaattagcaaactaacgtgaaagttatacatcaacagctgtggatttctgacatgacatggacttgatgatgtgtaacatgcctgctgtatgattgtgtttttttcctgctttctttcttaggtgagaggctatgacttcaaggctgacatgtggagttttggaataactgccattgaattagcaacaggagcagcgccttatcacaaatatcctcccatgaaagtaattacaattggaaatactacatcggggttgaaatgtgattggacggaatctgttttctaattctcttcaacatcttcattcttctcttagacccgaggagaattaatggaggaacgcagccaagttgaacattgtctgattttctcagtggacagaataggacaaaagtagcataattcccagctttgaagcttgctttatagtctcagcacagagttaagaaaataatgttatcagattggttgatggaggttgatagctatgacaaatgctggtcattactcttttgatagcagaacaacgccaggttcccagagaatatctcaaaatagattatagtgatgtcatctctgcaaatgggtttcccagattttcagagcttttttttttctttctttttaagtggactacaacatttttacccctgctcttatagtgtaatgttggcaactgatctgatataagtgagccacagtgtttttaggatgctattttcacgtttctgctcttcttttaactggtttatacctcattatttctcttagttctgagatagtggtatcagggcttatttacccaactggattttgttttgaggctgaaatagtttagtgaaattataatgctattttacatagagtatggtctatgattgtttcatggttactggaaaaatttgggaggatttattttaaaaacccaagaataaaaagtgagttttactgattaaaagaagtagtatactcatattgtagaaagtttggatgtgcaactcagactaaagaagaaaaacaatcatccgtaatctcatcaaccagacaatctctactaaggtttcagtgtaattcattttattgtttttatatatatatatataaattttttttaacatagttaggattttagtgtatttgtgtgtgtgtgggtacatataccggattttgctagcagaaaatttaaaattgaagcgtaaacaattgaagtgacctcttggagaaaaagcactgaagtaatgctgaaggattttttcttttattcagtttttctttcttcattttctttcttttgcctcttctcagtgtttcccacctgaattcaaagtcgcacttgcttgtcccagcctgacgtcctctaggacttttcttcagagttcccagtctcccgctttctcctgtgggctattatcctccacaaacaataagccgtcactttcacgcttcatctattcacacatctgaaagtgtttgaaaagaggcttgacatgtatagcatttgcataaattaaggctgaattatgcattaatgagttttattgattgtacaggctagtagttttctacactttccactttttttttaaagcaaatacttttgaagttagtatgaaagagtggaatttttaccgttttgatttaaagttgtattttattttgttttgtccccctccgaaagcagcaaggactttggatttgatgacagtttttagcaactcagttatattctggctatccttcagtgtcctgctctctcagctttgccaagccttttagcaattttctgtatgttttctcatttttttaaaggaaatcatgttacctcctgggatgttgtggttttatttttagggctagtaatgtgttacagaagccttgagtacaggcagttccttacttatgaatgacctgtatacatgaacagtcactgcctcgctggccctctctcttctcctccacccgctttcccaactagcctgtgctggagctacgtgctcctcaaggcagtacacgagccagttcccagaaagctctgtccgggatcattcttaacacatagagcaagttttgtaagttctgtcaatggaataacaaaaaggttaaagggggcatgaacacatttgcagtggtaatgaatactttaaatacacaatttctgcaaagttaaaatcatgggaaagcactttgtatctaatcaaggatggttttttacacttttatgaaaaattcaaaactagattgtagcaattgctatactgagattctgtcttcatgtttgtttctgctgcaggtgttaatgttgactttgcaaaatgatccacccactttggaaacaggggtagaggataaagaaatgatgaaaaagtacggcaagtcctttagaaaattactttcactgtgtcttcagaaagatccttccaaaaggtaagtgaaacttagtggatgagttaatgacctggtttgagccatgacaaagctttgtttgtagatggggaaaggctttgtgaggacactggaaaggtatttcttgtctgggaaaccctgctgtggtccccagatttccaacctgttagtgaaagacggtgtgggtccaagagggaaagaagtgggtgaagaacgaaggagaggcagaggaaaaattgtggtgttaacaagattcactgtgcttgttaagtgtgggctctgtcatcaaaggaaatgaagtaaaacagaaatcaaaagaaattggcagtgctgcattcagaagctgagctaatattcttcactgtgtaggttgaactgacctctcaggatttgaatatcctgctagctccagtctaaactaggcagagctattgaattttgcatgagcttcctgttagttgcagaacaagttgttggtgctgtttaaaagattatcagtaaagaagattaaggagattttttaccttaaaaagattaatcatgtaaacagaagcaaatggctttaaattaacattagtgtttcctatttattcttgggttattgccctgcactgtagtgtgtctgttttctgagttccttttcttccttcttaatttctgtgactttgaaatatcctggttagtgatcatggagcccactgttctttgtcacctagaggagattgttaattatgtgaatggccttgcctgggtaaggtccctttgtgggttcttggttgtatgtggtgttatcctagcatagaccaggagaggcctctgagaagttcctatctatcctaatccacctgaggatccaatttgatccttatattttaaaacataataactgacttctcttctgaaactttctttttcagggaaggactctgctgttagaaatgattcctttattttgatcttaaatttttatgaaacttgttaagcctttacacagtaacttacagtttgagtaggcaagccttctctagtttaaacacagtttccataattgtacccattctttgtagctgctcacttcattcctttacatttgctgaatttgccttgaatcttttccatatcaatcacttttctcatggagccaggaatgaagactgctattagccatcttgaattatttattgtaaaagggatgattattttgtcatacctgtgtactatttctatgtaaacatctcatttgttatttatatttgattcatagggcttgttttccttccaaaattttttaatctttcattgagattatttcttcaacctccatttgggtgaaatgctcttagattctaattttgttttccaacatttgcttatcttccccttgaatttggtgtcatctccagtaaaattttttgacatcttcaagaaaacagaatttgatccttcatagcccagcaagagaagttcttgtctttccagttagtactaggttattatagatggtcttcctgattcttgaacgacagtaattgagattccacctagtggttgtgatttgtaatgtcacacaattccagttttttaagaaaattgttctgtagggtagaatcgttagtgtacttaatgatataatagtgtatttctttaggagatttgtatgtgatttggtcaaaacaaattagattgacatacattatatttaacaaaccctttttatttcttttcttttttttttttttttgagacggagtcttgctctgtcactgggctagagtgcagtggcgcgatcttggctcactgcaacctctacctcccgggttcaagtgattctcctgcctcactctcccgagtagttgggactacaggcgtgtgtcaccacgccaggctaattttttttgtattttagtagagacggggtttcactctgttggccaagatgatctcgatctcctgacctcgtgattcgcccgccttggcctcccaaagtgctgggattacaggcatgagctaccgcacccggtccatttttatttcttaataatcttgaaagtctttccggattttattcattatatgagcttaaatatcaggttccttctattccaccaaaaaaaaaaaaaatcctttagaagagcgtcatataacatatattcaaaatcttcaaatctttccttcagagaccactctcttaaaaacactgttgatgtacaaagtattaatcttttaaggtcttcttttagatattttctccgtaacttaatttgttctcactattgtgcaattgttctctataccaagcagctatagactgttagtggcacatcaccttcccaggtagctctttcttataatgaaaagacacgtaggttgagtttgcggggggaaaaatctatgcaatgtaagaatggaaaaaagcaacattgttgaattactttttagataggatgcaatttcaacatatgaattcatgactaatttgataagtaaacattgaatttcctgcacaataataaaagaaaccaggaatattttctgcctttgcttttgtcattggagagttcttgcccttcctctgtcccctttctatccctctttttgtgcttggttcagatgccacatcctcctagagttacatacctgtgggtgggattcctagctctactttatcaacatctgcatggcttagctttcttgtctgtacagtgggccttaaaatacccacttcataggatcgctgtgaggatgggaagagagaatgtgctgtgggcacttcaaactcatagcacagtgcccagggagtctctaagtactcacaagattaagattgccattcgttatttgccttttttttttttctgaccaagtggagttgttgaaacttttatgcaataactacagtatgttgaaaatatgtcttttgtagcacttattacactgtgtactcttattgatttacacaccccaattcctcaaaagtttataagtgtttttgggagaacctgtgccacttatccttatatccagtgtctggtttgtattatatactcagtaccatttcttgaacaactggagattgggagcttgcaatttgggggtgatttggacccgttgaagaatgtttcataaacagaaatcagatttgagtaggttgaagagtgaatgcaaaatttttgccaatttttattatttctcttgcctaaatgtagatcatctacctgtaacctgaaagtttactggtgccaaagccctggtattgctgagtacctcatgagcaatgagtgaaaaaatattgcgagaaaacagtgaccaggacagattcactcatatgcatcaactctcaggccgctgagagtaggctgtgtttttttgtcaacgatgagagctcatgggactttcctcataaaagggagctggggtgttgcagacctttggttcgtctgagtctgtgttctgcattgacgtagacagagagttgcttatatttgcataccagaacatcttgctattccttaaaaataaaagagccttaatcttgtagactacatgctttgtatggctagcaactgtaaaaagaaccaacttttttttttttttttgcaacaagggggatgatgttgcattgataaatccttaagaaaggaatatgacttgaatatttcttttgtggggagtggtgtggggaggaaagcagctctgcttgaggtcaaagggctgttggaacttattaatgcaaattgttagaactatttaaactatatcatattcatcttgaatcttttgaaaattattttaagtctcagtggactttggttcatccatatgcattagctgaatcctttaagagattttcttctgagaatgttgttacttgcagactgctgcattgtttttaaggatttaaaattgaatcattgttcaaagcctggaccattattttggttgctggtaacattttagcatttctcataaaactgtttgtacttacattatgctgaattgtttgatgtttgctagtggccatgtaagacgtgactgtgcttgcagaattttcttctgtagtactcagctaaaaggtaggctgtactggtggttccacattagccaggcattggcagttgctatggcataaaataaaaatagataaatgagaaaataaaaaccaaaaaaaccctaaaatcaaatgggcagcaggacctcagcttttctcacacttcctatcactgtcttccctctgtcattttcttttttttttagacagagtctcgctttgtcacccaggctggagtggaatggcatgatctcggctcactgcaacctccgcctcctgggttcaagtgattctcctgcctcagcctcctgagtagctgggattacaggtgcccgccatcacgcctggctaatttttgtatttttaacagagatggggtttcaccatgttggccaggctgttcttgaactcctgacctcaagtgatctggcctcccaaagtgctgggattacaggtgtgagccaccgctcctggcccctctgtcattttcttaatttcttccagttccattctttcattctttctcatggagatagtttggcatatgtaggattttatcccaaagtgataaacacttcagctgatttgagcaaagagaaacctctaatctgctatttagttattctctgtgtaaagttggaattacctattacttaacaattaagccaataaaaaaagaaggcgggttgtttaaaccaattctattttgttaccttattgtgtttttgtacttactgatgaaggctgagagtggagtggagtgcagagaaaggagttttctttgcagcatgcttttcccttttacatttttggttaccatggcaatgaccttgctggagaaggcaaagtattttcccagccccgtatctcaaggtatccctggtacttcccagctttctctctacagcatcctacacttgacccttcctgtgtggggaggaggatttttggtggggggatggtgcagaggagacagggaggcactttgcctccttacgttggcacttcctctgtcctctttttttgctagcacgagtctcattttcattaagtctttctcctgttccccgctgtattgaacagatgcatagattttggtgctaactgaatctagctccaggagttgtagtgctgtgtccaaatgtgtagcagcatcactttcccccatatttgattatagtatgaaattgagctgtagcagtttctgttctgtgctaggtattggaaacatacaaaggaattctatgaggtccctgccttggaagggctcatatcctagtggagtgaggcagggagacataggaacagaaaaatacatgatgggaatgtgggtagcatggtgcatgagtgccactagggagcaatgccttctacttgcaggagctaggagaggtatctttgaagatgacatttaaattggctcttgactgatgagcgagggtgtgccagttggttatgaaaaatttggaagcaagaaaagcagtgtgtgctttgtcacgaaagatcaagagatgagtgagaacatcgttgcagttgaagggtggcatctccggcgggtgtggggagatgaggatggaggagtcagggcctagaatacttgcttctgtctcaggccactgaaatgcatcaggatagataaaagaggatcagattttttttttaagacgctaatttgcgaagcagtggggttggtggatgatgggttggaaatagcaagggagaagtagtgagacactagctgaggggctgttttatttaactatattagccagagatgatgagggcttcaaacagaaccagggccttgagttttttcatcattctgattttcttagggttcttttcacattaaaaaaattaaaatccaagttattttctatgcttcttagtttttaaaatgttgtttcatgttgtgaggttcccaaacatgacattttggtccatttctgagtccaatgtaaagtgtttctactacatgttccctcaggagcccttctccttccaaggtgtttgaatgtgctgctgcccctcttgccgttgagcagcacactgctcttacctgctagattgtgacttgttggaggattatttatgtctgccatcttcattatagtatgcctagcacctagcataatgcctgacaaacagtgggtccttagttaatatttactgagagagtgaaaggatgaatttggaatagctagaggcaaaaacatctgctggtgatcaggaagagtatacattaaaataacaactaaagttgaatcatttgaaagagttatactgtagtgtttagttctagggcctatttaacaaggtgcagattcatggcctacctgttgtttagacccttagttactcaaagcaattagcaggtagatacggagatccagggttctttgtcatgtacctacccataaccagtgttccacttgaaatctgaggaaaaaagcagtaatgatttacacagaaaatttctttgcacagaaatagtttctggggcccctgtagacttacacagtttgtgtactgatgcacgtaatgacattttctaattctttctatgcttgggtttgatccctgggaatattttagtggagcttcctgattccaaagcagcagtttccaattttgtcaagcatgaggattccttttcaacttgccccgccccaccccctgctacaatattatttgtgcgtttggtaattgttgcctaagataatacctaatgatattcaataatgcatccctcctcctttctctcccaatatcttattatgaaacatttaaaacatatggaaaagatgaaaaagtagtgcattgtttacttctataccatcacccagattaaacaagtattcacattttctataattgtgatatctatgttttatttgctgaactctgaaagtaaaagacttaatactttagcttgcatttcttataaacaaggacatgttcctacacaactacagtaattttccacacctaagaaaatgaagagcacgttcctaaaattatctaatatttagcagattcacacatctctaatgattcccaaatgtcctttatagcctctgtggcttctttctcaagcccaggatccagtccagggctgtgtgttacatttggttttaatgttttgtaaagtctgttgagtctagaacagttccttcagtccccctgaaagagatcaggccagttgtcttgctgagcaaccctatactcccattatttgattctttctcatggctgcctttttggaaggaactattgatgaaggaagctattctttgtgtaagaatgtcagtcagtaaacaaggaagatagaagtaggaactcagtattctgctacttcctatgaaataactattgaaggcaaagatatgaacacaattagcagaaaggttttcaggaacaggatattcataaaatgtcaaagtattacccaacagaacacttgctaattgcagtgggggaaaacatgacctttgcaagggagagatttggtgcctggggactgatggttaaatttagcatcactaacagtggaatgacctaacaggacctgcctctgaggtgctgctgtaagaagtgtgtgccatcatctatgaagtattcttgccccaaatgcttaattaaatctctttgaagccttcagacctcacttagagtttacaggaaatatgggctagagaagcaagttgaatgacaccatgaggaaataatcacaccatctggtaatgcttctaaatgaatttgcattttattaatcacgatcgcatttaccttcacctggcaaacagcagtccatatgcacttgagacaggtttattgagcaggcaaacagagcgtggacacgatgtgtggaccccttgcagtacctgctgctcttggggaagcatagagcatagtagagtatactttctttgacagggtcatatggtagcttgtatggtttcttaataaatatagaaatttagctcacagatgtgtcagtctgcccccttttagaaacactaaattcacttagttaagtgtaaggatgaaggatggaaaattgattacgccccaagcacttaatgtacaggagtttatgtgttttgcagtagaggtatttggaaagaactggaaaattggcactattttatttggtgccagcctatgattaatttggttcccagttttgctattactaaaattggtcttccagaaatactcttaaggttaagttgtttcatcaaggcagtgcatttattaagtggtcattgtttcaactctaatttattattgatctttcaggcccacagcagcagaacttttaaaatgcaaattcttccagaaagccaaggtaacatgcttaaaaacccaagtaaatctgctatttttgaaatcactgtgtatttatgtgtatcatatttgatgttaaactgttgggaatatttgttttgcagaacagagagtacctgattgagaagctgcttacaagaacaccagacatagcccaaagagccaaaaaggtaagtgccattagccttcatgaccctgtaggaaccaatccccagggaaatgaaacccatagaaaaattggaaaaagatttccacatatgcaggatatactattcagacgctatatctcattagtgattactcagataactgcatttgccttttcgttatctcagctggttgttatacatttgggtgtggaaacaatttgaatctcaaatgatttcatttttccctttatcagctttgcttaaagaaggtcagaaaggaggggatgtgatgaggtttaaatactggagaggtaaaatatccttgaacgtctttcctttgggttttacagaagaggcatgctcactttttagataaagtttgtaacgatgaagataaaaaacacaacttttaatggtttgaatagctgtgagatagcattctttcctcatgaaagacctatggtcccttttttagtttaccttatgttaactgaattatggtaatgattagctgaacaatcttccattttaggttttagatttctaaaatggcatgtatgtatgtatttatttatttatgtatttttccagagacttatttatttgtaattacagatttcattgtggtatgaaacctaatacaatttaacctctggtttggtttagtttggtttttaaattatattagatatttataattaaaaatatgtatatagtcacatattttaaaaaggaggttcttcacccccatttacagttacagagaaagctgacatgaatctgtgttgtctgtgctgtaaataaaaatggcaaagaaatgtgctttagggattgtatctcatcttgccaaggtatacatagctgaatattaaattccagatactgccttttctaaaatattctgtagaaaatgcattagctgatgctttagaattgttttaaacagattttcaagtggactttaagaaatgtcccattctgtgaaggtatctgagcttctctcctggaccagaagaattatgtggggtgggctggtttctgcgctgtggctggggaggattgatgtgttgactttggagatatgagcccagttggtctctgaggggacagggagcgctgagcagacagtccatcagagtggaatatctgaaggggaagcacagaaaagctaaatcttcagtttgagggcaccagagtttgaggactcctatcagaagactgaaagagatgcctggagagattcccaggagtgttggagtctggcgtggggtcttttgatcaagtatttaaaatgtcagccagagttgagaaagctgttcaaaagccattagcttatatagtacatgtcctcaaaggactttttctttttcttatttttgggcccacacttcttttgctggaagtgtcatctgatcccatcctgttagctggtccctgagaggtgttttctaggctgctttctctctgcagctttggcctcacactccagctccttgttaagtggcctgccagcctccctatcacagtgactccacagggcccaccttccctcccaagcctaaccttcctgtgctctgtatttctttccgagccccccagcctcagaaccctgggactatatgtgagccctccttccctaccttgtcttccccatctaaccactctccacatcttccctatgattccttctgcaattttggttgaaacctttttctccactatttttaactggacaattgcaataaatttctaactgttctccctccattccccgtttctattctttcttaggcatttctaacaagatttaactttctggtcttagttgctcaaaagtggtttccaaaattaaacaaaaacaaccagaagagcaaataaatgaaaaaatagaaatttaaaaaatggttcctgtctaataaagaccaagatccttagcctcgaatttatggcactatttcaacttccagtcttatattctaacctccagccaaactgaaccatctgtgcttcccactgtgtaacccatactttcctttggagctttttgaaatttgaaaaaatgaagaatctgttcaggctgtaaccttcatttctttgaagaaaaaaattacttggccgggtgtggtggctcacacctgtaatcctagtactttgggaggccgaggcaggtgaatcacaaggtcgggagatcgagaccatcccggccaatgtggtgaaaccccatctctactaaaaacacaaaaattagctgggcgtggtggtaggcacctgtagtcccagctactcgggaggctgaggcaggagaatcacttgaaccagggaatcagaggttgcagtgagccgagattgtgccactgcactccagcctagcggcagagcaagaccccgtctcaaaacaacaacaacaacaaacaacaacaaaaaacttattacatattagtgtgctgtgcattccaaaccccagtttgcatctatcttaaacaataagcaactagagtttcgtgagatgtgatttttcaaccatgtcttctgccatttacttgctctttgcttttagatgaacctcaggtcttgttccatcatccatcccttcaaatgcaaggtggccgcacagctcagtgtcacataggagtgaagggagaatgcaaattagttctttaagcatcctagagaaaagagagtggcctgttttgctgttatcctggctctctagtttcataatattggctgttttccgatcataattctaattttaatgagcaattgggttatcagctatactccacccctcacctgtaggttctttgacatactctgcccgggacagcatcgatcatggctcatttctcattcatagtaagtgcccacaaatgtttactgaccaaatgatcacatgccaaggaaaagccctttgaaactgttttccactcatttgaacccccacaatgcttggcatacacgtgttcctaggattcctgttaatagtgggtagtctccccgcaagccccgctctggcttgtgattctgataaacaaccatgatcatccttatgggaaacttcgtgtagacgtggctgctggaaagtaaatgtgattttaatcaccctgtgcaatgaaatgaaaacgtttattgtaggattctctgcttgtcttaggttgttccagtgtttaagtaacttctgtttaagaattggttcaggggagtcgttaatttatttgttcttagactgtcttgattgagatctcagccattctcctcttcactgtggcgcctcccagttgatcttgctctggcttctgtggtatagattgctcctcagaggctactcgttgatgttgatccattgatttttgtcttatcagttcgctgtttttcaaagagaaacagacagtccattgacacatgagtgtttaaatgatacctgggcctgtgggcagggctcttgggcatggaggcaaccatgttgattagaaatttgctgtcataaacagcattctcttctcctctcttctgctaaccaacattaagagataattttcaatgtgcatttttctttaatgtgaacaattttcatatttaaaggagaagaggggctggtattgtggctgttcttagaaagccccatggagcccaccagtgctgccctttagcaggagagaagcagaggcccgtcatactcatgtttggccaaaatgtgatgtttttgttgggagccacataattccacgagggtaggtgatcttgtcttcatccggattgactcctctaaatcacgaaaaaatagaaaatggaaaaagatcgacatggcctctttggtaatttagtatgcaaaacattttttttgggtgtgtggtaattgtagaaactgaggatatttattttcttcctacaggcagaatatttggtccattctgggttcttttgctgacagtgttgtttagggatcatcttgattttctttggctctagtctgaggggcccaggcatgtggtgaagggtaatataagattggatgttcctggacctcaagacactctatatattctaaatgagaacatgctagtaatgacccatgagaacagagctaagtgcagctgtataacttttttttcaagttttcactatctttgtgcatgagaataaaaggctttgtagccatcgctgcctctcctgtgactttctgagggacctgtctccagccatgtcttggggtttgaaagcttaaccacgtggtgttccatcttttactgtactgaattcattaggtggggaagggagtcaatggttcagttaaaattgaatgtagatgcttagggctgtgtgcatcttctttttttttttgattatcaaaatcagttcttattatatccttttctttgtattacagacagtatcttgctatttttacccatgtttcacatcaactcttttgttttattattatactttaagttctgggatacatgtgcagaacgtgcaggtttgttacataggtatacatgtgccatggtggtttgctgcacccatcaacccatcatctacattaggtatttctcctaatgctgtcccttccctagtcccccacccccctacagaccccagtatgtgatgttcccctccctgtctccatgtgttctcattgttcaactcccactcatgagtgaacatgcagtgtttggttttctgttgctgtgttagtttgctgagaatgatggtctcataatctgtgtgcatcttctacaggaacatttaaccctcagaattggctgatgtctaagttttatgttagtgataacatacttgaggcaccacactcacactcatattcatatgctttctgtggctttctaaaaccaacatatgggttgggcgcagtggctcacacctgtaatcccagcactttgggaggccgaggtgggaggatcacttgaggtcaggagttcaagaccagcctggctaacatggtgaaaccctgtctctactaaaaatacaaaattagccaggcgtggtgacacttgcctgtaaacccagctactcgggaggctgagcaggagaatcatttgaatccgggaggcagaggttgcagtgagccaggatcgtgacactgcactctatcctgggcaacagatcgagactccgcctcaaaaaaatagaaataaaaaatataacccacatatggcaggacagagggcaaggggctcgtagctatgcaaatgtctgaatgctcactgctcatccaaaaaacatattggccataggagggaatgaagaggaaacatgtaataggcagttctttcccttcttatggttgcctgtgttttcactggaagtagatttactggagggttattgcttgaactttcttaatcatgaaattaagtaagcaattaactaaacagtacaatgtttagtcattatcagaaggaggtaaagggtatcacatcgctgctgtctttggatggaaccgctgtgaagtggaaagactgggatgttatttgtgggtcccagaatttctaatattaggctatgagattggtttcatgccaaggccccaaggcccttggccccactggatccactgatatgcttaggaatcagtgggtaggaatatttcaattcacatttatttaatacttacaagtgttgagaacttgtcctgtttgtttttaactttttttttttttttttttgagatggaatctcgctcttttgcccaggctggatgaagtgcaatggcgtgatctccactcactgcaacctccgcttcccaggttcaagcgattctcctgcctcagcctcctgagtagctgggattacaggtgcccgccaccatgcccggctaatttttatatttttagaagagacgggatttcaccatgttggccaggctctcttgaactcctgaccttaagtgatcctctgacctgggcctctaaaagtgctgggattacaggcatgagccattggtgcctggcttgtttttactttttcttatgaaataatttcagacttacaaaaaagttagaaaaatagtgccaagaattttcgtatgtgttttctcttactctttattttgaaacattccacagtaggttgcagacagaatgccctttacctctaaatatacttcactgtatatttcctaaaaacaaggatactctcttacctagcaacagtacagttttcaaaattaggaaaagaacatcgatgtaatactattattttttagatcttatttgaattttgctacatttgccaattttcccattcatgtcatgtatctggtccaggattcagttcagaattattgagttgttacacctcctgtagtctcttttaatctagaacagtgtttcttttcccatctgtgactcctttgaagagtataggccagttattttatagaatgtccctccgtttaggtctgtgtgatatttctgaatgatcagattcagtttatgcactctttgatagacatacctcagaagtgatgttgggttcttctctgtatcatattaagaggcacatggtattgatttattcctttactggcaacgttcactttgatcatatgcataaggtgggaccttccagtttctttattgtaaacacaagtatcacttcttaataggatggatttatttacattcactgattacattaaacattaaaagataaagtgaatatatttactgtattgaatcattaatcttttttcaaggaaacatttatactttatgtcatggctctacattcataggctattaatgaggaattttattgatagatagaatgatagaaatcttgtgtataaaaacaccttgttggctgagtgtggtggctcacacttgtaatcccagcacttagagaggctgagatgggaggattgctagaacccaggagtttaacaccagcctgtgcaacatggcaagattctgtctctacaaaaaaaaaatttagctgggcatggtggtgtgtgcctgtgcttccagttacacaggaggctgagttgggaggattgatggagcccaggaggttgaaattgcagtaagccatagtcacaccactgtactccagcctgggtaacagagcaagaccctatctcaaacaaaatcaaacccaaaatgacagtacactggataaagaaaatgtggtacatatacactatggaatactacacagccataaaaaagaacaagatcatgtcctttgcagcaacatggatggaggtggagaccattatcctaagcaaactagcacaagaacagaaaaccaaatgccgcatgttctcacttataagtaggaattaagcactgagtaaacatggacacaaagaagggaacaatagacatgagggcctacttgagggtggaggatagcaagagggtgagaatcgaaaaacaacttactgggcaccacacttattacctgggtgatgaaataatctgtacaccaaaccgccacaacacgtaatttacctgtaaaacaaaccttcacatgtgcccctgaaacgaaaataaaaattttacaaaaaccaaaacaatacaaaccactttgctagcagatttaggcaggaagtggaggtgcacctgctgccccagtctctatgcctggtctggaaacagcaagagctatatctgtatcttttgttgggtgagctgcctaatctctctgagcctaacctgtaaggcagagctgacaatacttacattgtgttgctgtgaggatgagagatgatctgtgcaggatgtctggtgccgtgtttgacacatagcaggtgctcagtcagcagtggcagtgtgattgtcatgtaaataaggagaatgattattgtggctacggaagactggacattttagaagtatgtagtgaaatcaggagtgaagagagtgtcctgtaggtggggtggggtgcagatgggtattgaaggttgtttctgcattgccgttaatttgggtgaaatggaggaaaagcctatggatgcctacagaaagaaggaaaataattacagtagttagttcattgccattgcctattcacctgtcttcatgttttcttttccgatccatcaaggtgctggcagtgggtgagaaccagggctttctttcactacagtaaaccctccctgccctgagaaggggcgtgtatgtgtgaagagcctaagagtagtgagaattaaatacaaacacagccaatattctttcacagctttcagatcactttcatttatgcttccatatttgtcccaaacaattgttcttgaagacaggtagagcaggtgttactgtcacactttacagatggaaatgtgagaggtgaaaaggacctgcccaaagtcacatggccaaataagcaggagtgaactccagttcttattctcaatctatgctctttccaccaaatcatacctcagaatgaagaagaagagaacggagaggacaggaaggaaatatagatggagaaggtaggcagagttaagtggtgtacacaggaaaatgggagcgtatttgtcattctcagagtgagtcggccaccatttaaattgtgtgaggaggatgtctgtgctattcacaggcactaggagatgctacaggcactaggagatgctgcaggcatcattgcaggaatctgggaagtttgccagggttctagcaagtgtagagggaaggaggtgacaaaaaggctttggagattatgttggggagagagatggctagtgagagtttggttagcatcaacagttgttagataccgtcagaagctcagcttctcactcatgaagtggtaatggtaataatagctatgtttgggaggactaaattaggtaatacataatataatagtggttgggacaaaataataagtggcacaggttatagcaaaattttttaataatcacatatattgcttttattactatagttattatagtccagattgtttttgtaacatttatgattgctgccacagctgtgggcacccctgctgctgttcccatttctgctgctgctagaacagctgtttccattacaaccactgctaccagtagtgggcactcaggtgcacatgatacaaggacatagcacagacagtgaaactcacctttctgtgaagaacgcacaaacgtcacaagacatgcaaaactcaaagagtaatagagaataagcgctttggtatgtgggcatagcatctgtgctacagctacgggaaaggtcatgaagctggtagatgggggacatgtgaagggggaagagagaaaaacgatatttattgtgcacctttatgcatcctgctagatgcttacgtcacatttatctcaattactgcagccatacaacaatcagtaaagttctgagtataagatatgttaaataggttaggccagaggataagatacattagactattaagaatgatttttaaaaagctataaatattttgaaataccaacagaaaaggaaaaaccatctattaaaagtgagttaagctatccctaaagggttacaggattttaaaattgagaaccacaaatatctcctagttttccatgcttctgtgtacaggcctgaaaattaaggcctaaggaggtcgagccttaaccaaggccaactgcatcatcatgtcctaacagtccaaagccagtatcccagtttgttaccatttagtttcttcttttagtcgataaagagggaaaattaccctgagtttctacagaattgcttttttcccctcctggaatcttataattaacttataaaatatcgaaggttatgcattatcattaaagcagagaagagagagtgatttcaaatgcttgatggaatgatgttagttttgttccaagttttcccagtagagggcagcaatgggttttaagtctgtgccattgtggaaagctaactaagcaaaagttttggctttgtcgaaggcctcagacttggagttgagggatcaaaggggtgttaggtccctactgagccatgaacaagagacaccttagtcaattagggtgttactttactgggcaggagattgaagggtgatggtttaacgacttttcactattactatttttaagttatattttctattagcaaatcaaagcaatctaccatttgcattttacataattcgtgtcagaaacaaacatctcaattttgaagatgggattggagagcttccagtattttgtggtctcaagctatttttagaaaattctttggtttctgcagttctccttagagcttggtaaatacgggtagaagagagtcaacatgtacaataagaacagtgaaggagaagtggacccacttccgcagttaccgtgcatattatgggtttaatataaaatactcccagtgatccacatcggcctgagtgcacatgtcctctctccactttgtgtttccttttcccatcctctcgcttaaaaccgaccatgtgccttgggaataaatctcattgaggaactcacatgctcacagggaggagggcaagggtggttgaggatattatttttcctattttagagctgagagaacagtaggccagagaggttaaagttactgatttcactggggctgttacagggacaggcgttcacagagtgtgagctcattggtgttttcactgcttttttattttaaattctttgctttttagttatttgagaactgagagttcctttggtcagaaaagagcttttggtcactagggggtgctattagaacagttcattgactaagaatctggacaggaattgcttaccagtctgtaaaaagccttgcagccgtagattttttccttttgctctgtgtctgtggcttgactggtgttcgcactgggggtgaattaggcagaggtgagggtagaggaaagagcaagggggaaaagcatcttacagagttactttcaattcatttggtgaattgagttgttgttgttttttttttttttttgaaagcatatgttctgggaaagtgactcctttctggttgcctttgactgggagctgagaggatccactctggaaattgtaatttgctgatccccatttagggagaatgtctttatttttagattgatcttgaaagacagtgagctgtgtaaactttcacagacttggaggtccagttttggatatttagaaataatgacacatactctgaaattattgtaagagatactgtttctacaaatttagtttgtagaaaactaattgttactggaaatcacatccagttagatttgtgaggtctggatagtcttcaaacatattatgtgcttcctttttgcctttgggaaatttgctaacttttcccaaaagcttgcgtgcatgagctagcttttctggaactgaagtggcgtgttacttgctgagagaagctcccgactgcctcctcctcctcctccatctgtccatgcagtgctccccgagcatcctggtaacctactaggtgctgaccttccctacggtaggtggcctttattcagcctctcagctccctctaatcctagtgtaccatttctttcctttcttccgaaaggaaaataatttggctagagttgcggaaaaactaatataaaatattgtcagtaaatgcccttttgatcttgtcaaaactctactatagttgtactgtcttttctccctgattgaaaactcaatggcttcttgtcattaataggataagatacaagttcccgccacttataagatgaggtgcacatcacttggaggtaagggatcactccagggtcccatggtctatgtctccaggctttctctcagccacgggccacctcggccttcaacacatctttaccaaattagatgtgtttggtaattgtacttttctaccagtacactcctgaaatccccacatgcaccatgaaggcctctccctacacttgtatctctcccagcctagcatcttttctgtgaagctttctgatactaccctcccagcaccccaggaggttcatcagtctgttctctgtactactccttaccttgagcttaaatatgttgttgcacttggtgtcatttatagcttactttctgctagttttaccttctgtagcctactatcaattcttgtggagcatggatggtgtccttttatctctgtgttctcagtacccaacatagtattttggtcaattagtaactatttttcaaattgaagtttagcaagcaagatggtgatgaggatcgtcttcatgggagctggtgtgagagtgcaaggggaggtagaggaaatctgcttttagttttaaagaagaatagttaagatatttttcagctggtgctgtattcttgtatttgaagtctgggactcagggtttagccgaacctaaatttaaaatcaactttgttagcaccaacttgttgagagtcttgagtgagccattaacttgattcacctttgccacatgatcatagaatggaatggttagatattattaggtaataattgtgaattatgcactttgtattatttgacaacaaaaatgtagtccctaccactcagcatatattgactattgtcattttcttctctgagccaggatgcacatacgttttcctgttacctgaagctgcatttaattaggaagatattccaaaaatagctttaaattaggttttagtacgctccacttttggattaccttttacttatttcctcacttaggagaaataatttaaactttttatatcatgatcctgcaagtctttaaaatgagtaagatgttttggagtagggaaggtgaaggaaatggaaagtaatggcacttttatgcatcacggggaaaggaagggttctatcatctgtgggaggaaggcaaatgtttgcccctctgccctggcctcttaggttgtggtcattcaatcacagggaatgtggagaggccagcagggggtgtggtacatatgtttgagacatcattgttgggggtcgggagtctgcttgttttaggctaatcaaacttgattgacttaacaaagattcagggctctatttattttaaaaggccagaaatatcttgtttttaaaaatatatttttttactttgaaatccagtagttctaaaacaaattaaaattcaagggactcgattaaggttgcactttgatatagaattttctaagctttccattgaattacttctgacacattcaaataccgatttagaagagtgtctaatgacttttaattttgttcttcacatatagacatatacaaaattaaggcgcccttgtacaactttcacagcaatcatagagctgggaaatgcaaacagtagcctttaatttaacccagattgaaaaggccagttgaagttgttttgggtgaggggtgggctttctctgtgactttgtggaaagctgtgagaggcagatgaaggagagaaaggctcaggagtagctcttggtcaggaagctgggaccataaaaatctatgcttgaaggttaagaccaagctttggctcttgagatagactccagccagccctggctctacgacccactcatggggtaaccttgagtggcagctgagctccccagtgccttgtctgtgacatggagactgttcagtggcttcttgttcttcttgggcaaaaactaaaatctttaaccggggttccagtgcttcgcatggtctagtcccttcttcgctcttcagccttgtcttgcattctccaccctcagttctctattgtccacttgcccatagcccttgtccatgttgctcttccccctggaagtgtcagctcttctcatcctgagcagacctcagtttcagctcaaagagtcatttctccagaaaacaaagttggaatcatgccatatttattgtcctgcaatctacctgcaatttcatttaagatatacctttggacatctttttatgtcaacaaacatagattagcgtaatcaaatggctgcatgaaattctgcaagaatgactataattaagaatcaattttttcttgataaatactagattgttgccaatttagaaatcgttaaccacactgggatgaacatcattgtacttgcattattacatagatgttacctattttgttagtctatttcctaggaacaggattgcttggtcaaagagtatatggtttataattattgacacatatcaccttacatatgtttaaagtgggaggtgttatgtttcaaatcccagcctgagtctcaggtccatcatctgtagaacattacttatgtatacacccatgcacatgggtgcatgcgtatatatgcttaattcagtgcctagcatatggtatttaatattatttatttttggcattggaatgttatccatgaacatttactttatttcattttttttcctagatctacagttagctgttttgtagagagaattccagatcttctggtggttctgcaaccttgagactttcagtactttaggagagattagattatacgaggtacttcaggctaattgacctagagcctattatgtagatcccagcttagggtcctgaactcttggggccattaaagttagttaggagagagccattggtagtaaaacgtattgaagccgttttgttctgcagtctgttcttggacacagaccgagtgtgcagtgttacaaggtgttttgcccattactctgtcactgtaatctcttctgtccagaacaaacaagtgataaaccagctgcctgcctgaaagtaagaccacgccgttttcatcatcccctggcttctggtttgtagatgcttgttatgaggtccgatgtcagccattcatgcggtgccaggtgttggtcatgaccagtgcctacactcaaggatagcactgcagtttccataatcctatgatcttaaccattcataacttttagagttgagaaccctatttttcttttttcctgaatcattgcattgtttttaaaaagaacatataaccttgagattacagcctcactggccctgggctggttttgaacctcatgtaatcacatggcttctctgagcctcgatttccccaccttcccaacctccaagggtttttatgaagttgaaatgtgacagtttatgtaaaacacttatgcagattataacagagattctaaaaatgctttttttgccttcttctcccttccctcattgtgcgtcagggaacattttgtaaggaaggagttgtgtattatacaagtgagcataaggaagtatttaaatgtcatgtgagaattgtcttttattttcttaaggaaattattgtctaaggttagtgaatttcatcctgctctttcgttcttccttcctgtctctgtagagcacaataacccaacagctacaacctcatgctttagataaaactgttcttgctcttctgccaacatacacagtcctagaagtttccttaaggactctgaattactgaagcttacttggaactctaccatttatttttgttttaattgtatgatttctgatttcttaatttactgatgaatttttaagttgaaattagaaagttagcctattgagtgtattttttaaacagttacaatgaatgcatctgtttgaacaaagtaaacatttttggtaataaatgacatctgaatcagctcgtcttcctctgacgttttctgtgatatgttatttctatggggtctctcctgcttttctctttaccttatcaagagatatttgcctgtcccccttttcctgacagaagcttcatgcctagttcagtggttctgaaacttactgtgagatacctgggccctttaaccagacattcacattctacaggtctggggacaggattcaggactctgcatttttaataagcaagccaagtgagagtggtgcgagtgactgagacagcctctgtgtcttgtctccttgttggagaggaagccatattgctaagttcactttacaaaaagaaaaatctggtagtcctgccatgtgattatatagctttaacaaaaatgcctatatttcacaagctactttcctctctttgcccactggcccacctcactgtcatttataattctcttttttcactctgaatgtcactggagcagcccttcctagttgttgcatgtaatatgtatcttatctggtaatattccatgtgtcttcgctgtgttacactgtgtgaaacagagctgcaatatttatctgcttaaacaatggcttcttttggtattgtttgataggtcttatattcattattaaagtgggcatatctgtctccagagagctctgactttactagcattattaatgtggcactcatttaccattgacattgtgctcctttctttgatgtataatagagggggggatgtgacattctagcttgtggaggaggcaagatggatgaattagcctttgacatatcctggtatggacatagaatggtgtggagagtttctatttagacaatggagaagagggctgggaaacagtttagggctcattttataggagagtttctaatcatggaagccgggcaaagatgaaatagactggaactgcaatcataaaggatctctagaactggaagataccctatttgtcctttcaaccagagcttcccacccagtggccagagcacactggtggacggtgagtaggtatagtgagccaggagagtaatcccctgatccctcagggcagctggatgaggcctgggatgaatgacattctggggccagttgctgtgaatcacttcatcatttgattctagtatgttgtataaatatcattttctatgtgcgccatgaggtagacaaaggttgtaaaacaatggtccaaaccgctggtattaaaattctgtgaaccattaaaaaaatcttactggaagttcaaaattttgaatataggggttgtattagtttgttttcatactgctataaagaactacctgagactgggtaatttataaagaaaagaggtttaactgactcacagttccacatggctggggaggcctcaggaaacttaaaatcatggtggaaggtgaaggggaagcaagacgcatcttacatggcagcaggagagagagagaagggagaagagctacacacttaatcaaacaactagatattgtgagaactgtgtcatgagaacagcatgggggaaaccacccccatgatccaatcacccccaaccagccccctccgctgacccgtggagattacaattcaagatgagatttgagtggggctgcagagccaaaccacatgaggggtttttgaagaaccttaggagtcccaagagtccagtgtgaagaccactgctctgaacctgtcctcttggagtagagaggagatactgagttctgtagagattgaatggatttttaataggtgactaagatctggatttccacttttggctcctggttcagtgtttttttttttttctttaaatgttgcttaagctgaaactagatgataaaaataagaattaatggattgtaagttaaagagcagggaccatcctaattggtcctcgctcttcaatgcttaacatggtgtatgccaaaatagttgctgagtagttgtaggtcaggtaaaatgactgtgatgggacttattctgtccatactgggaggttgggccagatgtgtttcaagcttcctccaataaagatccagtgaggtttttatatttatcagtatttagatggagggtgggcaggtttttttctgtggaaattgagaatagcaaaagctcttacattgcatatcacatttaagcttccaagagccttaggaagtacagaggaattgaaaagtggaatacaaattgatattgcaaacttttctttgaatttataaggagaaaattgctgtatttgtaatgaattttgcttgttttagactatttttcccctcgctgtatacatgtgagaactaaaataagttgggtcattttatcaacagcacagaaataaagagaagatcctaaaatcagctagagaagtaaaacagatcacctatcaggtaataataactagactgacagcaggtatctgagtagcaacaaccagtggctgaaaacagaggaataacttgatatcctcaaagtattgggaaaaagttaaaattttcaagattgaggatagtgaaaagacattttcagattaacaaaactgagaaaatttatatttaatgggcctgtattaaaataactttcaggaagatggaaaatgaaaattaacaagctaaacatctaacttgaattagaaaagaacaatcttaatctgaagaaagtggaaggaagttgataaaggtatgaataacaaaaattagtgaaatttcaaacaacaaccaaaaggatattgcaaataaattatagcttcaacagagatttttagaaccctataatgaactatgaattactgtatgccgaatgtctagacaagatggataaattttaagaaaaatataacttaccaaaactgagacaagtgaaaaaatagaaagatgagtagtcctataagaccaggtttttattatttgtagtttttattaaataaatctaacaaaaggtatataagaattttaggcagaaaaagtataaaatttattggaagacattgaagaaaacctaataaataacagaaaaactttgctcatggataagaagactcaatataggaaggacaccatttatccccaaattgattgatagagtcaatgctgttccaaattagactttccacaaaggtttttgagaaactcaacaagctgattctaaaatttatttgaagattttaggctcaagaatatacagtgtaactcaataaaacattgtgacattagggatagacaaatgataaagggaatcaaataaagaacccagaagtagaccctcaggtataaggaaaacttgatgtatgacagggatgtattatagatctgtgtggaaaaaagaaggaactattctgttaagtaatagttccgagatgagatatacaatctatatgaaaaataattattggcaaggcacagtgactcatgcctttagtcctagcactttgggaggctaaggcaggaggatctcttgaggccaggagtttgaaactaccctgggcaacatagcgagaccgcgtctctacaaaaaataaaaataaaaaattagccaggcatggtggcatatccttatggtcctagctactgggaaggctgaggaaggaggattgcttgagtccaggagttttaggttacagtaagatctgattgtaccactacactgcagcctgggtgacagagcaagaccttgtcttcaaaaataaataaacaaaaataaataaatattttaatctcacagcatacatacatataacttcattcctaacagattagacacttaatgtaacaggcaaaactttaaatcgtttagataaagaaaacctattgctttggagctcagatatttttaaataagagtcaaagggtctatctataaaagaaaagactgttaaagtgacacgcattgaaattaaggacaactgtttatcagaggataccgttaatgtaatagaaagacaaacctcaaactgggaaaagacatttttaaggcatacagccaacaaatgattggcatctgaaataaagaacttcttcaaatcagtagaaaaatgaacataaacacacaaaaaacaggtacttccctgaggaagaaatatgaatggctcaggattatatcaaaggatgtgcagcatcattagtatttaagaaaatgtatatcagaaaacatgttccattttacccctaattgatcagcaaaaattaagaggtctggtaataccatattttggtcaggatgtagacttgtcacatctcttataacagctggtagtagtgaaaactggcaaaactggcacaaccaatttggacaagaatgtggcaccttcctgtaaaagttatttctgtatcctgtagccccacaattttacgcttcgagaatccatatccagagaaacttttgcacaccatgccagcagatgtttgcaataattttcaaaacaacaatgtataaactcaagaaaatagcccagaggagaatgagtaaatgctgtctatccacacattagagtatcatacagcagcgaaaatgaacagcatagatgactttcagaaatgtaatactgagtgaaaaagagcaaactatagaagactgtagtcagagtgatactatttttgtaaagctaaaaaataacactaagtgatgtcctattttaggatatacatttgagatgatattttttaaaagcaggtaaatgataaacacaaaattcatggtagtgactgaggctagggtatgtgccatgtagcaatattttaagttgggtgttattgttccagttcattacttacatatataaatatatgttgtttgtatatattgaatattacatcgcaacaacatgaagagtcagacttccaaggttccagtcatgacactctgttcagtagaggttcaacaaagggcaaggtacctaacctcttcaaagctcagtttcctcaactgaaaagtagggtggtaacagtacctacacattgagttgttacgactattaaatgggacactccacaaggattaagttagtgcctagtacactaaatttacagtgcagcaaatttagcttttgttgtctttttcttaaagcatgaagtgtgatggtttgtacttcccttggaattaaagtagatagtgttcctatgcaaaatgcacttctaaactgatgatatgatagaaatgaggtgttggcaagatgaattgaaatatgcgtgaatattgcttatcgattcattgagaagggttagtgagtttagtacagatttcttacctatgacagaccaaacaagaggcctgctgaaggggggaatgacctttatggactccatgtctgtgaaattctggaacattagcaaaagtaccccatcgtttctttttttttttattttcttttcttttttaaattttgagacagggtctcgctccgtcacccaggttggagtgcagtggtgcagtcatggctcactgcactcttgacctcccagtctcaagtgatcctgccacctcagcctcccaggtagctaggactacaggtgcatgccactacgcccggctaatttttgtattttttgtagaaacagggtttcgccatgttgcccaggctgatcttgaactcccgggctcaagcgatcttcccattccaagtgctgggattacaggcatcattcactgtacccagcctatgttgtttcttgcctgcagtgagagaacactggagaaaggcagtttttcaaaagtttgtcacaagttggtataccgtcgagtcaagacatctcccaaactgtgctcttgacatagaggtaatcacaattacagcagttatgctttaggcttaataaccccagaaaacattttagaaagcttgttgttccagtatacaatttagaatgtcatacatattctgtagtaagtagaattttgccagggtttttgaaacagttgttttggaattaggatgagaacatttaaaatttggttggcttggaaatgatttgaccatacacgttgagaatcactaactggattcctcggtaaatgccattagtgatgcgaaagcaggtgtccgtataaagtgagtgattcttgagctctttacccaaagtttaggacactataaacatttttcacatgtgttgtcagaggacacagtcactatgaacagtgttacagtagctattaccacttggtgaattaatagggaatgtgaaaatgagtaaattttcccataatgtcccagagtttgggtcatattcccatgcattttcattttactcttcagtgtacctgtgaagcagagaaaaggctggctatttatggggtggtctgtgtcttacaaagttaaatagatgtgaaatgatatttttaacgtcaaataatgagtcagtccagacttcctttatgtgatggcaattccctgataagagatatttgagctaattccatatttaagtgctttacagaggatggcaaacagaaatggtgcttgtcatgcactaaatataattatcctaacatcttttaggagaggtattttcttctttcaagaaggcacgtgacaagtgaggttagacatccttctgggaaactccaaattcccaaacctttcaaagtatttccctgcatcaaggtgtgttacagaaaagtcctctaattcaagactaaaggtttttataagacccattcatcatgttgtgaagttattcgtatgggaattaggaccagaagaaagcaaagttgagaatatttgagaataacacctgaggataaaatcgcagtcaccttctgactttcgatttaatagctatgaagttaaccaatgattactttaaaagcaggaagtattttgtaagcagtgccattaatgctaagtagatgtttgttgtaaaataaccgagatgattttttaaatttaaaattacgtgacatgaagcaaccacccttctccaggagactaatctgttataaaaatagcaatcttcaaaacattttttgattaacaagttttgcttgaatgagttttatattatgtattccctgtagttctagattatatccacatactatatatacacataatacatacatacgtatttatgtagacatatatgtatgcctacataaatgttttttctttgagacaggttctcactttgtaacccaggctggagtgcagtggtgtgaacatggctcactgcagccttgacttcctgggctcaaaccacccttccacctcagtctccagagtagctgagactacagatgcgcaccaccacgcccagctaattttttggtacattttgtagagatggggtttctctatgttgcccaggctgttctccaactactgagctcaagcgatcctcctgccttggcctcccaaagtgctgggattataggtaatgagccactgtgcccagcctggattatatttgaagctgtaccccacgtgtaactaatatagtacataatctgttcttttaaattttagttttaatatatgtatatatagccaataggagaagaggtatgaataatagctataacagtaacacaagtaataacaataattattaagtttaaactaagtcaaagattgcgccaagtgcttgatcaatatcttttcattgaatcatcacagaatccctataaggtagatactgttatatctcagaattgcagatgagaaaactgaggtgcataaaatgtaagtaatttatccagaggctcacatctggtaagtgttagagcagggatttgtacagaagcagttgttgcaatcttgcctcctgactgagtatcattactttaaaaacatactggagtcaattagctgcgcatggtggtgcgcacctgtagtcccagctactcaggaggctgaggcaggagaatcatttgcatctgggaggcggagtttgcagtgagctgagattgcgccactgcactccagtctggcgacagagcaagacttcgtttcaaaatatatatgtaggagtcatgatgtattcctgttttcagggtttgtacactaggactgcaaggtaaccctgccttaaatgaaaccctcattgttctttaaggaacacaagagttcttatcttgaatttcagtgctaaagtgaagttctggaataaatatagcccttcagtagggcacagccaatttcatttctcccagaattggagtcatttttcacacaaggtcttgcccttttggttattaatcctgaaactctggctttaaaaatctcaattaaatgtgcatgcaatccttctaaaatacacaattggtatttcctatggatataagcttctttaagaaatggtgtttgcttatttaacattttccctttaattttccagggtgtacagctgcaccttgtccgcctgagcttgcatttgaaattgactttcgagcccaggctccctttcacaaggccctttcttcctatgccaattagataacatcacactgtgggaattttctgaagtgggccccctgaaacaagggagcctgcctttcagattgtgtctgatctacagactttgttattttatcaaatgacttccagttacctgcatggtctggagcttgttctgagtttgttgatcattgagttattttgtccctaagagagcgcaggccttttgttcccagtgaagattaggttggaggagagtgtggagaagctgtgaagttcatcagactgagtatggtggactgagttctctttcattctcatactaacaaactttcaggcaaaaactagaggttataaaaaaagaagtgctttgaaaattcaacctgcctaaccactgtcaggatcacctttttgaaattgttcttcacatgttgtttatctgctcaaatatgaacacacagtcttagtatttattcattttaactccaaaaggtaatgtactgtgcagttctttgtcttgctttttttccactgattatatttccacatctgtacatgatttcctcattcctttgtgttactacctaatgtactactgggtaggatatactataatttatttaacctgtcccttgttggacatctaggtgtttccaaatgtttgcaattacaaacaattgcttcattaattattcttgtgtatgtgtcattttgcatgtgtttagctttttcaaactggaaatgcaaggtcaaagggtatatacatttgtaatttgggtagatactggcaaattgtcttccagaatgtcatggtttttaaaaccctcatctcttactactcaccaatcagaatggtaagcttcagctacaatgaagccctaattagtggccctggaaaacatgatgtagatttttacccctacactcattttctgaaaatattctttcgttccattccattctataccttctatcctacccacccctaagcatgtgcaggtgaacacacatacatacacacatgtaactccccctatgggctcacaccttcacagttcctgttgcttttcttttctgaatttttgtggtgtattcacactgtactcactttgacaatcttatactacttgcaataatgatttctttggcaatgtctttttctcgttgtgagttcctgcttgatgactaggccagtgttttgcatgttgtgggattttttttcctaatgattagaggaaaatagatttattcttctggtaaaaataatacttattatgagaaaaaatcaactggtaaataaaagtgctcagatatgtaaaccttccctcaaatactgccatccaggaataattactcttagtgtttcattacacatcctttcagccatctctttatgaatgtatgtacatatatatccccagataggtgtgcacagttttacacgtgaccttatactattctgactattgggtaccttgcttttcttagacctttccccatgtcggctggtgtggttttatataattcttaatggctatatggtagctgtttctatgcacataccatagttcaaccagtgctgaactgattgacatttgtggtttatagttttttgtctgagtgaatacaacttttggcattagtgcctaactctttagataagttaaagtcttagaaatgaaagaactgttttaaagtgtggatacacagattgtgagatctaaataagtaattatgaaagagaagaaagtttacagaaatgttgagcctttttcttaggaagctgtcaaattcaaattggtattcatagcctccggtaccaaccactcagccatcaaaaagtgttgagaaatcttacacatatataaaagaaaaaaaatgttaaagagatagtctaagagaaataacctttccatgtattcatgaatgtgcaaagaatcattgctttcttcctttatcctgctgggccctaactatctttctctttccccaaattattttggaacgcttgtgtaatttagaatataaaagcattttccctcctactaaggtacaaagaagggcaatgttttctgtttcttggagaatagtttgcttaggaaaatacacagtctaatgaaagggtccgcagctgtgggctattttgaagcctacttgaaaacattttgatgtgtttatttctttactactctatttcagaaaagatttgagatggcttacaaagatgcaaacagtgtagctgggtaaaatttatttgataaatgcaaaaaggaaggtaaaggaacataaggataagaaagtaaatagaaagccaggagtgagattagtttacgaaatacacatgaaacatgaaattgtcatcatcagcagtccagaatgcttgaatatgggtgattttttctggtgcagccaaaatattaagttcagtatacttgctcaaggtagacctcagatgtgaccctgagccagtgtgacagggatgtagcctcatcatccctgtgattggaacacaaacctacacagaaggagtccaaatagtcctcatattgaatccaaagagaaaattcacccagagaagagatttttttttttttttttttttttttttgagacggattctcgctctgtcgcccaggctggagtgcagtggtgcaatctcggctcactacaagctccgcctcccaggttcatgccattctcctgcctcagcctcccgagtagctgggactacaggtgcccaccaccacacagactaattttttttgtatttttagtagagacggggtttcaccgtgttagccaggaaggtctcaatctccttacctcataatctgcccgccttggcctcccaaagtgctgggattacaggcgtgagccaccgcacctggctgagaagagatttttaaacagtataaattcatggtcccagaatgtcatagctggaagaatcttgaagggctggcttgtacagccttctcagaatttgtgagaccttgtagttgtgcattgaaatgggctctggagagtgcagaatctgcatatgacttttatctttaatcagtcactgaacctttccaatccagtttccttgtatacccaacaggaatacggattggtttttacctcataagatcatgcaagggagggaaatgcaaatgaaaatcacaacaggatactacctcatacccgctaggatggcactaataaaaaagatggacaaaagcaagtgttgctgaggatgtggaagaactggaaccctcccatgctggtgggagtataaaatggtgcagccactttggaagacagtctggcatttcctcagaaggttagcatatggcccagaaattctacttctaggtacaaatggaagagaaatgagaaggttatgtccattaaaaaaaaaaaagtgtacatgaatgttcaaggcagtattatccatagtagcccaaagtggacacaacccaactgtcatcaactaatgaatggaaagaaagacccatattggatgattccgtttatgtgaaatacccaaaacaggcaaatccatagagatagaagtagattaatggttgcctagggctggtgggtagggggaaattggggcataactgctaatggggataggagtttctttttggggtgacagcaatgttctaaaattgattgtggtgatggttgcacaattctgtgaatatactaacaattgacattcccattttacatagttgagttttacggtggattatctctcaataaaaatgtatatattttattttaatttttttgtttttattttttttgagacagagtcttgctcggttgcccaggctggagtgcagtggcatgatctcggccccctgcagcctctgcctcccaggttcaagcaattaatgtgtcccagcctccagagtagctgggactataggtgcacgccaccatgcctggctaatttttgtatgtttagtagagatggggtttcaccatgttggccagtctggtcttgaactcttggcctcaagtgatccacctgcctcatcctcccaaagtgctgggattacaggtgtgagccacagcgcctggccaatgtatatattttttaaaaacatagcacagttcttagtgtagtgcagtaagtagtataccaagtaagctctcaaatgtaggctttttctttttctttttattatactttaagttctgggatacatgtacagaacgtgcagatttgttacataggtatacatgtgccatggtggtttgctgcacccatcaacccatcatctacattaggtatttctcctaatgctatccctccccttgcccctaacccccgacaagccctggtgtgtgatgttcccctccctgtgtccaagtgttctcattgttcaactcccacttatgagtgagaacctgcagtgtttggttttctgttcctgtgttagtttgctgagaatgatggtttccagcttcatctgtgtcgctgcaaaggacatgaactcattcctttttatggctgcatagtattccatggtgtatatgtgccacattttctttaaccagtctgtcattgatgggcatttggttggttccaagtctttgctattgtgaatagtgccacaataaacatacatgtgcatgtgtctttatagtagtatgatttataatcctttgggtatatacccagtaatgggattgctgggtcaaattgtgtttctggttctagatccttgaggaatcaccacactgtcttccacaatgcttgaactaatttacactcccaccaacagtgtaaaagagttcctacttctccacattctctccagcattaagttttttgtagattctggatattagccctttgtcagatggatagattgcaaaaattttctcccattctgtaggttgcctattcactctgatgctagtttcttttcccatgcagaagctctttagtttaattagacaaatgaaaaggctgagtgaggtgactcacacctgtaatccctacactttgggaggccgtggcaggaggatcgcttgagcccaggagttcgagaccagcctgggtaacatagcccaggcctcatctttaaaactaactaactaactaaataaataaatgaagacactgaggctcagagaggtaaaatgacgtatcctgatcatgtggttacctttggctaaactagaacccagatcccctgcagtctaaatctgcacgctctcccccagcagcacagttacaaaggctggcaaggcatctacttttttttcgaatgtgaccctccatcgttttgactttgattggccttcctttggtcttgagcctttctgctgtaatgattttcaagtttcccaattgtgagtgcaatataaaccttgaaatagtctgcaaaacttgtaattagccatgataaactgtatgaaaaattgattcgtggccctgcctgctattgacttttgagatacttattagcccatctaagaattacccaggcattttgcttttttcctttttttccccatgtggcctgtctttggccctttgactttcaaattgttccacttgaaataggctggacagatgggtctccatttcaaaagcaatggagactcttgtctcttgagttttctcagtagcaagcctggcataactttttgaaattgcattgttgctatgaagtgaaatttgggtctcctattatggtttttttctggtatgtttttgttatgctgctaaaaacatgcttttttgttcactgcacatgggcattgccaaattattgtgacatgaagaaattctgaaggtcagtatcaacctggtattctcaattcagtgaaactgacaagattttgtataacttgaattatattaattttctctaaactggtgttaagaagtgtatgaattgtcacaacctgaaaaacatgtatgtttaacttacattgtcaaaagtttggtcccctataggtacagctgaggttattgacaaatactatggtaaaatttaagctttctgataattagatgtcaggaatacccaggtttccagaatagctttcttttcttagaagtagttagggaatgaagccataggactcttcttgggaccataaaagtagccacttggtaataaacattaataaaaagctaacaaagaagttaactcttcaacctaacaaccccttttgtgtttggattggtgatttcgctctctagatgttaagaaacactctgatgtattagttcactattgatgatcattatctattgctgcataatgaatcaccccatcacttattggcttagctcagcaacagccattttattattgtctctcttggttctggggcttggctgggctgagctgggcagcctttgcatgggctctctcatggcgttgtacctgtgagtgactggtggcttctcaaggcttgccactcacatggctggaggcaattgtagatagccatttgctgggacctcaactgagatgtcagctggacacctacacctgacctctccacatgatctctcctccttacagtgtagtcactggattccaagagtgagcttcctaaggagaccaggcaatgctctatggcctggtatgacggagccttggaagccacgtagctccacttctggtgttgttacaggcttcgccagattggcggggagggaacaataggttctacccatcagtagtagagtgtcaatgatattaatacattgttggaagagtgtgtgagatgggattttttttttattattttgaaaaacacaatcttatgccgtcactttttgacttaaaggcaatgttaggaagaggagacaagaaaagaaaggaggaaaggagccccagagtttggtagcagagtgacaacagtcagctgcagatggcaaaaatgggagcagaaaataaaagcaggggatagcacagttcagatggaggtgtgggagaggcaggacaagcagcccctgtcaatagggtgtcacggatgcttattgggctgcacttgacattgtggctttgaccgtatcccagtcaggcatacgtggtgcaataactgatcacgttcagcatctgggaggcagtggggccgctcttttgttgctgtaagaagctggccagggtagcatatggtaaagtgcaataggtataaaaccaccttgtgatatggatttctcatcttcctttagagggaagtaaaggacgctagtataaaatgattgtgctgaccttgaaggagaatatgggcacttgcagttgtcttctctcacccccttcccatgcaacagatatttgattattaaaagtacatgtgcacttgattttaaaaatcctcaaatatttcttgggtgccgaaaatatgctaggcactagctaggcgctattccagattgcatatttgactaaagaagaatgataaagaagagtaaatctagtgattacttagtattgttttacacagttgtttcacttaccccatatgatttctaagaaagggttagtgttcgtttgctatgaggcttctagaaaatcatttagcttctattagactctgttttacagactctatctgtaatacctatttgtgtggctcttgtaaaattaaaagcacacaggaagtatttaataactgctaaatatttttaccttttagttcctttaaaggctgtgattcagtcaaatgttctataacaatcacatgatatacttggataaattcaagcatgtaatagttgattccgtttattccactagtcttcttcgtcttctttttttttttttgtttttgagacaggattttgctctgtcacgcaggctggaatgcagtggcatgatcatagctcactgaagcgtgcactcctggcctcaagggatcctcccacctgagccttctgagtaactgggactacaggcatgcaccatcatgcacggctaattatgtgtgtgggatggggtgtggggggagatgaggtctggctgtgttgctcaggtgtgtctcaatctccttgcctcaagccattctcctgcctcatcctcccaaagtactgggattacaggtgtgaaccaccatgcccagccattctactagtctcagttgaacacctggaatgggccagttagtgagccaggtgctggggattcagggatgagcaagtcagataaagtcctcccctgtagaacctaaatgaggtgggctcctccatgaaaaggtgtggcaatgcctaagacttggtaaaatggatacatgaacaaatacagtcaactgtgcatttgcacaaggggcactttacataccacatctgtctgaaatattaaaggatttgagtgactaaaaaacagccatgatgtagtagaactctggcattttcaaagcagtcatctccaagtgtggtgtattgcctgaattgtttcagagtgttggtaaaagtgatatacttggtggtacttgccaactttaaccctgggttgtgctaagaaatgaagtttagtaggacaaggacccatagtagtatgtgttaagaaagggccatagaacagtaaattaatagcgttttcttctctcccctatagtattttgggcacgtttatacccattgaaaggcaggtttttttttctatgcttattgatttagcctatctatttataacagtataattcagaatataaatatggaacaagtttcataaggaagtttatctttaactcagacattatatcattaatacttcaaatctcattataccattatgacctgaatgctacatttttcttcctgtatggagagcttagggaaaaattgtggcctgatgtcttcatccattcacttatcatagagtacataatgatctcaaatatccaaaaatggttatattcagctgcatatttctaagaaaataggtaggtccacagcaggttcttaaattccacatacttgggtgtaggacacagggattcattccctgagagtttttgaagctgaggagacacctgggttttgtttttccagggtagaattcagtacaaatcagcaattgttgaacacatactaagttgtgggtactggactgtttcacccacatgatctcatttatctgcataataacctgatgaggtaggtattatcaccgtgtgttacaggtgaagagactgagacttcgtggttaagtcatgatgactagcaagcagtcaggttggaacttagtgtcaaagtctcatgcagaggccttttgttggtaaacactgtgctgtactgtcacccagtggaaggattctaatcacatccttgttctagtctttattttctaaattctctgtaataaacacgaatcaattttaaattgaaaaaaaaatctcagccaatataacttaaaataggtaatgcagttagattgcaaaaacatatatttgtgtgtgtggtatgaaaatataaaactacatgaacctgaacactgtaaccctatgtttagcaattatatagatattataattaatgctttttaaaatgcaataggcatatggatattaaggtttctgcttcagttatttttcttgggaaaataacacctattgatttaagatccttagtcccagattctaaattgattttcttatttcattgtcaacataattggggatttgtctttcaacaaaagaaaagcaaagcatagtcgtcatcttggtagacatttatgtatataggaaggtcataggtgatttctgaggaagtttggtgattaaagaaagagataccctgtagtcccagctacccgggaggctgaagcaggataatggcgtgaacccgggaggcggagcttgcagtgagctgagatcgcgccactgcactccagcctgggcgacagagcaagactccgtcttaaaaaaaaaaaaaaaaaaaaaagaaagagatacacgagtggctagcagattcagcgcaggcttttgatgatagtggggatttgagtgttcttttcttcctttttttccccttcaatgccacaattttatttgtgattgaaggggaaaaaaagtgttctgggagactaattgtagatcattgaatcagagaattgaagattgttctttagacctctttggaggtctttccttagtgagtgttgggtagaactcagaaatctgcatttttaacacatgacctaggtgaattttatgatcaagcatatttgagaactgggctagaataaagcttgcatgaaaaaatgcagtaggaagttaggttgtaaagctggatcgagtccagagtgtggaagccttagatcttaagccatggggttgggatgcggtgctgtgagctgtaaggagcccatgacaggtgccttgtaggcagagaagcaactgtagaagttggctcaggagtgaacagtagaggacagtttgaaggaggagatcaggctggaagaagctgttaaagacagctaggcctgaggtgatgggggtctgtactagaactgtggcagaggcataggacaggggacaagtgacattgaagtgctagacttggcatagcctagtaagtgattggacatggaaggcaaaacagaagggggaagacaactggaaggatttgaggcagtatgaataggaggatggtagtaccttttctgaaactggtgggaactggagggggcctggtttgcagggaagatcaggagttcattaggacgcatttgagttggaagttccattgggatttccgtttgaaggtgtcttctcaatggaggtgattgtggaagccatgtaataagattgccacagaggacatgacagagagaacaaaggagccctggggagtcctgggggaacagtcacaggaacaagtggaggatgcagagaactatgagaggaggaaaagaaagtgctgtcccaggaaccaggaaggtgaaggtggtcagcagttctgaatgctgcagagaggtgaaggaaaatgaagactcacaaaaggacattggatttagcttgtttttcatagtaagagaaaaagttggacagtcagaattaatgagtgaatggatgaagaagtgcaagtgggtgatttttcaaagtttggttgtaaagggcaggaagacacacatagcttgggatgtgcagaggcttctgaggtcagtggagacctgtgtctattcaaaagttcagtgtggagggggagaaaaatattgaaaatgcacaaagacaacttttcatttggtgcacatttattgttcatatatcaagtaccaggactgtgtcgaggctacagagataagactcactctgtaagtaacccaagagaagaatgaaagttggcagtgtgaatttgagcctggatgactgggagggtagtggtccccacagatcaggggaggacttggcctggaaacaaccactgagcatcaggatgaatgctgggttggaatggcgcacagcatgctggggagggctggggaggaccctgtgaaggacttggtcctatagttgtcctgtgtaagatatgtggtagtcttccttccctagaggcaaggaggcccatctcaggtggagggaccagcatgggcaagtacttgcaaatgtgttggagagtaattgtttgtgtgattgaaatagagggaagatatgcagaggtgggcaggagccagagcaaaaagtgtccctgtgtcttgatgaggagattgggctttccccccaccacccacaaatgaggagctgtgataagaatttcagtagagacatgcagcgaccagtttgcctttagagagagctctgaggcagcagtgtggcagtgtgttgtggtttagagggataagactggaagcaggggtcaggttggtggactggtagttggcagactgtgctgtgcaagtgaggataggtgggaacaaaggcagagcaggcagagaataggtagaagagatatttaggaggcagggttgacatgacttatggtttggctgtgtccccacccaaatctcatcttgaattgtagctcccataatccatggggacccgttgggaggtagttgaatcatgggggcgggttttcccatgctgttcttgtgacagtgaataagtctcatgagatctgatggttttataaagggcagttcccttgcacatgctcatgtgcctgctgccatgtaagaagttgctttagctcctcccacgccttctgccatgattgtgaggcctccctagccatgtgaaactgtgagtccattaaacctctttttctttatgagttacccagtcttgggtatttcttcatagcagtatgagaatggactagtacagcttaggtcttgaaaggttttcatgggaatgggagtttgagaagatggtgaaggataaggagagctttatggaaaagctcagactgactccctgctttctgacttacagactgtttggaagatgggaggaaacatttcctgggaaagatgctgaacattctgaatgtgttgagcgagagattcttgcagggcttccagggggagatgcacaggagaccaatatgcatgtctgcaaatcacaggagagggtggcctggagagagaaacatgtgtgtccaaccacgggagtgacagctgagaacattgtgtgcgaaagattccgtaccctgggagtgcgtagcctgcacacagcctcttaactcaagaactgattctcttccgtgttctgaattttctgagtgccttttgcccttctgcttttagccatctacaatgcggccattggactcttattgggattaggtagaaaaagaaaaaaaaatgatggtactcaaatatacctagttttactaacgatgagcagatgtgatgagaggattagatccttagataaagaagcttaggtcctgcagtgtgacctgggttacttgtgaaactcagtttttctcaatacctgttctcctctatcttaccatggattctgaagcttgaattttttaaacggtattttatctttattcactgtgtgagaatatacatatacagctatgttatttcttgtttgtttttaaaatcagtggctggcccttgttaggaaaatagatgaattagaatacatagtctttgagaaccatttacaggtaaatctgtgttatttattttgctgctctagcagtcttctgttagtatgaaatgaattaacaagatagaatttatggccctttttagtattgaatttgatcacagttgagacattgcccctgagataaaactcctgtctggagcatttttacagtggagcttccattattgctttccttgaggactgagaattgtcctgatgatgtaaggaacaggtgtctgatccctgtgaagatggtgttctctgttagcaataggaaaacactgacgttcctactctgtccttttggctgaaacagcagcatctaaatcggagcttgtttaagtggatatgatggctctaagagagaccctgacaacaatggttatagatttcagagtgtggaccacatttggattttggggggatccagttttgaataagtaaactgaaaaagtcatttttgagacagtaggacaaaattgaacgtagactgatattagattctaaggaattattggtgattttgttctttgggaaaatgatattgtgatcatgtttttaaatgtccttatcagagaagcatactgaagtatttacaggtaaaatgataccatgtttgggatttagtttaaaaatactgaagcaaaagagttggaatgtatagataaaatcagattggcaaaatgttgataatgttgaaggtgagtaaaagaggtttgttatcctattttcaccttatgcatttatgaacatttccattaaaaaaaaggtaacaaaaatgaatgtagtagccaagaagaagagaaagttgaaggtctgtttttctctcattttgacacacaacgtcagcgtgtcacacctgtcagtctttctgcacatagggtgataatctttctgcctttctgacccaataactgaggaatctgacaccacagctaaacagtttgtgtgatgacaacactgtcccaccaggacttggggcagctttctggcagttcctatctcatctccctcagaggctctagcctccaatgggaattcaggggattccttgtctccttatatttttgtgagttttgaatgagagagacatgagaagataacttgggtggagtgagctgtggagatggagtagaagtttaaatgtgaggcatgtttctgcatagggaccttgtgatgcagtcattggctcttctttcctatcaatttaaacttgtgctggaatcagacccttcagtctttcaaaccagagtttaagtctgtgctgtatcatgtgtgtgtgtgtgtgtgtgtgtgtgtgtgtgtgcacctgtttgtgtttctatcctcacatctgaagtctctgccctttgcagacagcatgatagtgaaatgagttgattacaaggggaaaatgattttagtgaaccaacatgggtctgtttgcttctttgaattattcccagcacgataggatgttaatatgtcatctcagaggcagatgggcccatctattttgatcatcagctctgtcattatttggcgtttagaaccatgcctttcctcgcagtatcttcaagatacttagaggaaggcccagagttttcttgacaccagctgctactttgcttaagcagatggaataaattaagcccctcagcctccctatactcatcactattaaccacatccccacagcgaaaaggccggtgatggcaaaagatggttgttttctgaggacatggtaaaatgcctttgagtctcagggtgagactcttggcccagaatgttcctgtgtcttacgttttagcctagggtatttatttgacttgttcaactaatatttctacggtacctgttgtgcactagtagtgtctgtgttgagtgctggttcacagaggtgaacagtttcagagcaaggttttctgttgactgctcgagtttcagttatgttggatatggggaactaaagggtttcagaaactaatggagtcctctttacttttctttttcttcatatcccttcagcagttctaggatacaatgtcactagctcctgacatccctctctaaggggaaagcatgagggaagatggggagaagtttccttgtggtgcaggtttgctctggcaagaccttcttcagggagcagaaaattgttattcattcattcattcattcaacaaatgtatctttggtccctactaaatgcaggatactctaaatatagggacacagaacagatgtaactgcatcttactttcgggatacatgctttcccacttccaaattttcttatatgctagaacattttctcaatatctttggaattttgtagcaaatgccaccttaacaaaaacaacagtatccattattctgtagacagaatgtagaagaacacaaactcagctacctcggagaggaatggaaaagcagagtattaataaacatgaactcatatctttacattactatgcattcaaaaacttaatggcagtttcattgaccaaaccaaatagcttattataacagtgagtcttcattccagaatttgttgcataaaaataaaatattagaccaggtgcggtggctcatgcctttgggaggacaaggcaagtgcatcacctgaggtcaggagttcgagaccagcctgaccaacatggagaagccccatctctgctaaaaatacaaagttagctgggcgtggtggcgggcgcctgtaatcccagctactcgggaggctgaggcaggagaattgctaggacctgggaggcggaggttgtggtgagccgagattgcgccattgccctccagcctgggcaacaagagcgaaactgtctcaaagaatacatctattaaaaatgttagaaatcctaagttgttaacatgtattgcaataaatgcaggtgaaaataagttgacattcttgatttgaccatattgtcatgttgaggttttagaaatatttttcattttttagttcttgaaaagttattaggcaacttatccttccattgaaagtcacatctttgtaccttgtttagaaacaggaagtggttacttatactttctgttttatctgcttccatgttgtttgtgttttttaaaagaaagtatgttttttaatttttagatacttctgttttgactgacagtgtaactcataatgataaaaattcaaatgatgcaaaacctttactggacgaagaaggcagggagaatgttgcttttccactcctgatgttcctttagcaaaacattctaggacactctttgcctaggaacttacctgattagtgaatttggagggaaaaatcaggcacaaaactgtggccccactccgtcttcctcactttctcctggagctggcctgctcacccagggaggtacccttggtcactgaggaccaccggtgtgagggaggaatgtgctgattaacatcgctggggagccctaggggagtctcttcgaaatctagagatcagtttctcaactgagaaagaaaggctgtttactcagtgtttaagccacaatctcagatatcacctttataagtaataagggtgatttttgatccttttatgcttactggtctgatttctaagttagtttagtgataggaggagagagggttatttattgggcctccttgaagtgtacaacatggtgaaaaagtctccaacccagtaggcattaccacatcctgtaaatgcttcccaaaatgctatgtgcatatacgaacatatctagaaatgtgtatgtgtgcctctcctcattttcttttacacagtggtggatgctgttctctattagccttttctacttgttatattttgatggtctctgatacttgttactggctacatactattccataatatggatttgaattaattttctaaccaggaagaataaaaacatgtttctatttgaaactcacactctgatcaacagtgaggaactgtgaagttctgctgctgggggacaggatagcaactgatttctgtgcctcctttttcacatggaagaggcatatcatgtatatatctctctctatgcaggtgatagacttgacttggtccttgataatagagaccacactgaaaattgactatgtattgacctactttttcagagagcctattgctgccatttatccaggaactgtaagctgagtaatagaccaaatgtatctttagggcagttagtaataatttttatgaaggaacccccttggtagtgacatttaaaagttattctgaaatgtttgcatacatttgtatgttgaaaaaaatcagatatcttagtgaaattagaatattaggaatattttctatattacatcttgtgagtctgaatggagtttccattccacaaaaatcagtgcatttgagtgtctttccaggtttttttctcgggtcattaatccctaagcagacgtagttcttgacagaaggttttccaagggggtggtgtcgattatatttcttagacctaacataaatgatgtttaaccagtagctaacccctgatctttatttcaggtgtctttgtaaggtaagaatttagtctctcttaagttatggtaattcatatcatcttagttttcattttttgtcctttcagttcagtttctcttaatatttcacttagagacattaacatattctgttatggggggtattgctcttctgctagctaatttgccttttgtttataaataccgatagtgaggctgctggattttagtgtatcagtcaggcttcaacaggagaaacagaaccagtaggagagacctataaagagatacattgcaaggacttggcttacttgatttatgggggcggtctaggcaagcctaacattcccagggtaggctgtcaggaagagcaagctggagctctagggcacagctaaagctgttgtccccagatggaatttcttcagagaagccttagctcagctctgaaagcttttccacgtattgaatcaggcccacccagattatcaaggataatttccctttacttaaagtcaattatggacttaatcacgtctaacaaatgccttcacagcaatgcctagcttagtgttggagggagtaactgtgggcactagcacagtcaacctgacaactagaactgaccatcgcagtgtgcttctctgttgcttgtcagaaatcttctggttccagccctgcctggagccatatttggttggctgtgtgcttctctttctcttcgccacccctctttcttctgcaggtaagctaactcttaacttattgctgtatcctaagcaacctcgactctgctctggagccaaacatttggtttctgcgttttcctttggtcttacatgatgtgtgttttctcttctgtgctatttgtcttaccaggacagagtgttcctatcgttctctttattagctgaagttacagatcagcttggcaccctttccagcaggagctttagttttcaaagacaatagttacaaaattggattctgctttcgtggctcttagctgttgccattgttctttgttgccctcacttggggaaatgccatattggaggtttgataggactgatgcagaataagaaatctaattgcttctctgtgctttgtgctgcctcctcagaatagttcccttccaacttccagaacattctctttcaagacattgccctttcatgttgggtttccaaagttacagtattccattctcattatctgaagagcaatgtttgtcaaatttgcttctcttcccgttagaaaatattcaggcattataaggaagttgctataaatgtgtctttcaccaaactagctgagtatttttaattatcattattaaattataaagtctttgtttctctagaattttttttctaattgcctatagaactttttcatatcctcattcttttgttctattccttcacattatagaaaaaggaaatgcctaattttagcagaactggtagagctttaaattccaagaagtcaaaaaataaatgttaatgggaatcactgactaaaaggtccaatatttagctcttgccacttgcctatgattaatagaaatgggcatttttcctcttggtaaattttagtgtataataacatagtcagatggagatactttgtaagtgtaaattaaaatctgaatgttcagaggcctggagtatacacaattagaaaacatgacttaaagtgtgtggtagagtctgttatctggtatgacaagggctgccaaatacgacctattaattttcaaagaatcactaagtatacaaaatgaaaacacattcagtaaatcccttatcaccatcgttatcctgatcatccatttctgtgcaacaaatcaccctagaccaaatggctgaagacagcagcagtcctttagtaagtctcccagtttctgtgggtcagggattcaggctgttcagcttctagtgtcatgccactgcgccagatggtcaggtcacctgggggctagtctgggctacctcacagcacaggggtctgaaggcagttggaatgcttacatggcacttaaagacttcaaccgttgagtattccagtgagcaagatagatgttgcatcaccttttctgaccttccctcacttctgcctcatttctgttggttataggtaaggcaaaaatccacccagattcaaggagagggcactggactctgtctgttggtagtgaagtggcaagattcttggacatgtggggcaggagatattgtcatgggcatctttggaaaaaacaatttgctatctatctacgctctggccacaacaacttacatctcttccatgtctaaaatatgctcttgagcttttaagactctccaaaagtttcatcctgtggcagctccaggcttaggctcaaaatcatgaccttgtcctctaaatcagatctgggtgcagaggaggctcctcaggactggtgccatgggcacagctccttgatttttcaatcttaaagcctgtgaactaaagagacaaatatctgctggacatacactcaggatgcggcaggaatacacacgtcttaaagatttgcccaaaagggggaaaacgggagcacacaggtccatgggagttctggagtctagccaggcgtgggtggccagctccttgatcagggttctgtccagttttgctgttttctaaggctcttggctcccctctcaagttctgttctttaagccatccttctttttccacaagaaagagtcagtgtttgcagctaaggagccttctcagactgcttcctgccagcaaaagtttaggatctgaaggcctctttttattttgtattctgtttctttttgtctaacttggcagtattttgtagtacgatatcaaaaaaggtagtgggttttctgtgaatcttgttgggttcactccattagtgaagatccatgaccacaagatgctttgtctaccatgggttccctgtgagacagctaaggggcagtgccctgtgattcttggaatccctgttatttaatgcagaggttctgcaacacaaactattaagatcctcagaaggtgttaggtacgtttgaaggtgtctacaaggcaccaccttagacctttctgaattcttaaaaggttgtgcagtttcaccctgggtttgatttttgctctgaaaccatttcttggctcaagaattgtttgatgtgtggagagattgggaatgagaaacaggtttatatttaacagtttattctttagctcatctctctctgctcacatcttataggcagtgagcagaacccaggtgtcactttaagtggctgcctggaaatctctttagatagatcattgagttcattaggtgcatttccgcttcccactttactgtagatgtcagtgttgctaaactctctgtcactgcacaacagggtcctcctttcctctagcttccaggaacatttccctcacttttctttaagccctcactgacaaccttcttaaaacaacagtcatttcattatctcgcactgttgctatgtgtcaggcattcagaaagggcttgtcctgactcggggtctctcgtgcttgctgtcagccatcttggaagcaagtctgattgtcatagggctaattgttgctttaagtcactcagttttagggtgattagttacatgtcagtagtgactggagtgattaacatgctgatttctttcaggcctttgttatcctcaagtcctagcacatcctctgctctgctttcagaaatccagattttctcattctcccttccccccaccatgcccacctgaaagctttccatgttttcccattgtctgaattctaagcctctggctggtgtacaacaggggtgtgaactcacaggccaaatttgtcccaaagacattaatttttaggctgcacagagaaagtttttttttttttaacttgatatgttaacattagaataagtcaagagcattcacataaaaatccaaattatccacttctctagaagaatcagaagatctggctatgctggggctgtctccctgtggcagccgtcagtcaatgctggttgccttcttatggtgggacaggtgctcctcaggtcacccaagtcctcacttggccagcttttcctttgcattttctgcttgcctcctataggcctttgaatttgcctttctgattgtacaagattctttacacaacttttccagccttgctcttagccattttctgaaaccagccccctagatcccagtatcttgtgacccagccacattacatgagtcagtagaatgtgctaagtttttgctttctctgcttgctgggctaatgctctagcagctacccttccatactgtcccttgatagacagtcatcctctcttctgcagattcccatgatttgtatcttttttatagtatttatgtcttttaaaaaaaatttctagcttaaatgtctgtccacctgtctggactgtgaactactccaaggtgtaagattttgttttattcatctttggtctagaacttggtagacgaaggtagtcaataaaactttgttgaccaaatgaagtaagaagtgatttttaaaaaatgtctaaaacaagctctctgccctgaaggagtatacagtttgatatgttatatgtccagtgtaacacaaagtagaatgacatagaggtataggcaaaattccaattggatcgacaaaagcttcttagcttaaaaaaaaaaaaaaaaaggagaatgtggaagggcagatcaggccaaggatgtaggtaatgcatatgggaaatggtagagtcacaaaaatatgtgacatgtacataactggattgtagggtatctaaagagatgtggtagaaaatatataaacaaataaataatttggggctggattataaatagataaatagatttggttgggagaagcattgaggatattcatgataatagcacctgtcatgttttgagtgtttcttatatggcaggcatcatgttaggagcattatatgaccatgcccctggtgaacatgatggcagtgggggttgggatgagattcaaaggcattaactaagacaacactggagaagtgtcagaatgaggctggagatggaggattaacaaatgggttaggggtggcaaactcaactttgaaaaacagataaggtgtttatatccaacagaacacttggaaaacaagactaagaaatgcagtttccaaggatttcaatttagatgaggtcagggaggccatggagaaggtgtgttcactcagggcaacagtgtctagtgagctgagaatgtgtactgggctgggagcagtcacatttatcgtggaggcagagcaaagaacagttggaggacacagaaggacaagagaggtaggaggagaaatattgtggacacagatttggaaagagctaaaggaaaagaatggagttcagcagtgtctacaagacagtgttatggccacagggaagagcattgaattacactattaggaagtcattaaatctcaaagggagagagaatagcattggtggcctagtagggacagataccatttttgcacggtattaaagtgtgaggataagataggatgtgagggccacaattggagactatctttagcaaaacgttgacagtgaaagagaagagtgatggagtaattcttaaggaagaatgaaaatcagtggggtccctggcgctcttttggtagaagtataagagagacttaagcatatttacagatgatgtagaggaggcagggcctggctataagtgtcttgaaggaaggaataagtgaatagatacatgaggagtgctcccagaggcattggtcttgtaaaaagaaggaatccattgtctttgcacacagcagggaaagagggtgagagtgtgaagtttattaggaagataggggctgtgagtatgtgttagtatgtttttgcgctgctgataaagacatacccgagactaggcaatttacaaaagaaatagaggtttaatgggcttatagttccatgtggctagggaggcctcacaatcatggcagaaagcaaggaggaacaagtcacatcttacatggatgtcagtaggcaaagagagcttgtgcaggggaacttctctttttaaaaccatcagatcttgtgagatctattcactgtcatgaggacagtgtaggaaagacttgtccccataattcaattacctcccaccgggttcctcctgtgacatgtgggaactgtgggagttacaattcaagatgagatttgggtgcggacacagccaaaccatatcattctgcccctggcccctcccaaatcgcatgtcctcacatttcagaatcaatcatgccttctgaaatgagtcagaactcatttcagtattaactcaaaagtccacagtccaacatctcatctgagacaaggcaagtcccttccacctatgatcttatagaatcaaaagcaagttagttacttcctagatacagtgggggtacaggaattgggtaaatacagctgttccaaatgggagaaattggccaaaccaaaggggctacaggcctcatccaaatctgaaatccagtgaggcagtcaaatcttaaagctccaaaatgatctcctttgactccatgtctcacatccaggttacgctgatgcaagagatgggttcccatggtcttgtgcacctctgtccctgtggctttgtagggtacagcctccctcccagctgctttcatgggctggcgttgagtgtctgcggcttttccaggcccatggtgcaagctgtaggtggatctaccattctggggtctggaggacatcagccctcttatcatagctccactaggcagtgccccaatagagaccgtgtggggcctctgaccccacatttcccttctgcactggccaagcagaggttcttcatgagagccccacccctgcagcaaattgctgccttgatatccaggtgtttccatatatcctcctaaatctaggcagaggttcccagttcttgacttctgtgcatctacaggctcaacatcatgtggaagctgccaagccttggggtttgcaccctctgaagcaatggcccgaggtgtaccttggctcctttgagtcaagctggagcagtcacagctggagcagctgtgatgctaggcaccaagtccctaaactgcacacaacagagggaccctgggcccagcccaagaaaccatttttttcctgctaaacttccagccctgtgaggggaggggctgccacaaagttctctgtcatgccctggagatgttttccccattgtcttggtgattaacatttttttttttttggagaaggagtctcactctgtcgcccaggctggagtgcagtggtgccatctcggctcactgcaaactccgcctcccaggttcacgtcattctcctgcctcagcctcctgagtagctgggactacaggcacctgccaccacgcccggctaatttttttgtatttttagtggagacggggtttcactgtgttagccaggatggtctcagtctcctgaccttgtgatctgcccacctcggcctcccaaagtgctgggattacaggtgtaagccactgtgccaggctgggattttcttttctgtcacatcgtcaggctgcaaattttccaaacttttatgctgtttcccttttaaaactgaatgcctttaacagcacccaagtcacctcttgaatgctttgctgcttagaaatttcttccaccaaataccctaaatcatctctctcaagttcaaagttctaccaatctgtagggccaaaatgcctccagtctctttgctgaaacataacaagagccacctttgctccattggatggacttgctctcagggtagcagaggaagttattttaagtgattggggctggtgaactgaggccctactgtaagctgcagtagcagagagaggaatggagagttggggatctgactcctgctcttacatctcctagtattgtcacctcccagctgtatgagcttgggccatggacacatgttacatgtgtcacagttttacctctgaaaaatggggcagtacaatcattctcagctcacaagctactatgaagattaaattagttaatacatgtaaaatccgtagaacatagtacctaacattgtatgaataccagctaggggcaaggggctaggctggcaatgagggaaagtgttgtctagcacagtgtttctcaaacttgaatgagaatatgacccctgggggatcttattgaaaaggaagattctgattttgtgggtctagggtgggtcccaagattctgcatttctaacaagctccctcccaggtgctgctgttgccccagtctatgggcttcacttggaggggcagggttgtagcagcactgatgccccatctaggagtggccggtggccatctgtagtggcaccaggcatcatgcgcacttgactggtgctcttcttggctggcagttcaggattagagagtacatgttggggctgatcccagggcttgcttttcaagtgtggattggataggaaggttcatctggccaggggacatggggacattgagtactagtaagtgtagcatctagagtcagctgtgggtgccaggccttgcatgctgaggagtagagccgggagggggctggtggaagagcaggagaggacctaggctggagaggacagtggagccaggcagtaggtgtaggatggaggtgccgagagaggtggtggtcagagaggagcagtgtcagagtataaactatggagacagtaaaatatttattgctaacgtcttactgagtcacatttcgttaatttttcatgatttagaaggctttttgtctgcttggcagtgcctcaagtacatgataaacagcaattaattagaaatattttttatacttctcatcagtagtatgcctggtaacaggaatgtcactatgtgttgctttctgctggtgcagtaggttcttgataggtggacgtgaggctggtgggctccctggatcacttgggtttcgactgtagtcagcatgccatatgttcagcaggtggaggagaggctgagtgcaggattcccaccgaaggggtaaaaatcactccaaggagattcccaaatcccatttccagggagaagttaatgtggcagtgggagaggctagtgggtgctttccttttttttttttttttttggacagatggacatgccagattgagacaaattctactaagttttggtcagtatttctttgggtcagtaaattcttcttttgttcagtagagtgttagaatcacacacctgcatttctgacacatttaggatgctatcgtagaaattttacctggtggttcttcatatccttcctccccattcctgtgtcaggggccaggtgccttctttgagttgcatggggacggtacaactgtatttgcagatttgcagacagctcctgtttagagatgcagcactggagtgacaggtcagaccgctctagggactgttgtccacattgctgccatctcctctctgtggctgctcatcctagccctgcccagtggccacctacatcttgcctggtggccaccagcactggccaggaaccatgcttctcctttgttcatctggctgagcctgccttcttttcttggaatcagaacttgggttcatttatttaacgggttttcattaaaaataacatttagagaaagagaagaaaatataaaacattttctaaccttactactgccaactatgacctgaagaatttgtgagattatgaattcctttaggtatcacttaaactgagcttgtttctctgagaagcaatggattttttaaaatccctgacagagaaaatagagaataaattctttctaccacctcttggctttactaaatgagcaaatcatttagtagaacaagagcaatgtaataatcaatgaaattagaattacaagggtaaataatctccattctcatcgttgggtgtggggaagatggaagcttttctgcactttttttttttttttgaagttttaactttgcaaggtattattcaattcccgaataagaccatttactaaactgtgtgaaacttagatggctctaaaagataaaagttgtttctcatcatccctacaaactccctacaaggatgtaactttgtaaaattgatttcccgtccctttggtagacgtcaatgtcacataaatccaccatgaaacctgggtttcaaattatgctgcaagtttattcctaggagtaagctgaggggacattctcaaagacaagttagtattcttattctagtggcaattttaccaatactattccctacataggtttttgaatgttctttctcttaatttggtcaacatttgtatatttatttgtttaaccaatgtttattgcttaaaggcccatcccaccatttctttcaatgtctagagctataatcctagacattttgttttatctttctctcttccagcaaataaaacaaacagagagagagccagggctctaaaataaaataaaaatgggagaaaatgggccattttattgtttatagttggattctgcttgtggaaatgaaactgacagagcttgtaaacatagagccagagggggaaaggacgtaaactaaattttaggatgttaatctagactctctctggaaaagaagatttccttagtgtaatctcttgggtgagtacttaaagaatactaattcatcagctatccttgggttctacaattttagtaaagacagagttttgttctgtgtctgatagataattttacttgttttctcacttcttagttgacagtatgttttgtaatagatgtggctttaaattcttccttttcaatgtagtcattaacatatgtttctctatgttgctaccaccatgatcagcgttgctaagaaaataattttattgtatatgtcaacagaaaattattttctcttcctttagctatttctgcaagcattaaaatgagcaatctgttctgcaaatgctgaagtgcattttggcattttttctatagtactttgccaacatctataagcaccattaaaatcaccgtcattagaaaagacttttagagcaactcaaaatgcaagcggaagaaatatctgatgccaagcccaaaagaggttttactaagtactatttcaaagataaattagttaaaaagaaaaatttggggggtaggggttggagaaaaaagctttttttaaaaaaaaatgagcataactatttgcaattatgaaaaagtactttgtactttcttgctgactttctatgttggagctcaaatcttctagaccaactggtcaggattacttttacaggttctagatggtaaggccctcaaatcaaagccaacccctagcatgcattttttatgacttcgcattgatctgacatgtatactaaacttaaatatttaaatttaagttctgtgttgtttcccttggttttactgaagctcctgtgatgcaactaaatagtgtctattataaaaagtaggctttcttcacatcatagtctttcagtcttcaaaggacagttttagataacttcttgctggtggttatcgttcagtggcataaggagagtcacatttgagtgggagtctaaggctttgtttcttgccttgctttgccttcattactgtgtgatcttgggtcacgttctgggcctccatctcctcatctgtaaaatgaagaggttggactagattgtctggaagctccctttccacacgaagtttctctgaatccttggaccatggctgttgcattcacatcatgttcatctgctacagtgctttgtttaattacatcttagtaaattttttaagcaaattactttggtctcagaggctcacttcagtcatcctgtccttttaaaagttttgcttttccaaccacaaagacatttgggaaagcttgccctatggattacatctctaccctagctcaaaacaatttgaaataatgaggaagactgattataatctagacactagcatggctgctgattatcaagctgtgttcctagcaatctcacaggtctcataagtgctacaaagtgtgttaagaatggtctggtgctgttttgttttgttcaaataggttgagcagaatcctggggaaataagcataattgtcaggttctgcaagagagtgaggtggcaatagaagggtgtgctttgttgtcttaggtttttagattgccaatacccatggtctagtatgcgtcattaggcttcctgatttctctgcctttgctcagtcagcaggatgttgcttgcatgcgcttccttaggcaatttgatgcctaccacatggccttttgtatatggcaactaataaagtgttaactgaagtaaacatgaaaaatgagcttgatccttaattgcttatatgtgcaatgttcttccaaaatattttgttcttcatgtatatagtaatgcatttcaaaaaacacagcatttttggaaagaggatgagtttgggaacctggaggctgtgtagtctttttggatcttaaccgctagctatccctggattcacagccactcaggttattttcaggttggtgtgtatgccgtataacccaagttgcagcaccagtgaaatggttcacatttgactagtgaagaattgtgtgggcttgttttgattcaggtaagaagagttcctgggtcaagtggtcaccttcataaaaccgaagacggggactgggagtggagtgacgacgagatggatgagaagagcgaagaagggaaagcagctttttctcaggaaaaggtaaatgacatcgttgacgatgagctaatctgtgtaaattttatttttgtgattgtgtgtgtgtatatatattaatggatacataattgttttacagtcacgaagagtaaaagaagaaaatccagaggtgagctgtggctatttatttattattttgccatttcattcctttcttgtggtatcagagtctgatccatttaggggagatgcttcaaaatctcatggagtagaaagaaaaaggaaaggcacgaggactttgcagctcctaattctgtctgagttactttgggctgaataaatcggggcaaattactttgctttctgagcctgtttcctcatctgtcaaatgaggatgatcccagtacttataagaaagtcgccatgagggttggcaaaatcccgtacacaaaaccctccacggaatccttgtcacagactaggtaatccattaattttaactcttaggattactgcctttagaaaacatagtaaccatacaggcaaagtgtcttccatgttttttgtttgcaataaagtagatattaaaatggttagaaactcttggttgagtctgttggtcttggtttttaaatcttccaaataataccttagtaggttaaggagcactcaaaaaattttaacagcttccctttgaggcctggtcatcttttgattaagagatcgtatttgatttacttcctccatttgattaattatcctaatgcctaatgataactgtagttcacaagacctgctaattctcctagaggaaatttgagcatatttaaatagctccaaatattttacagacctagtaattaatgtataccttaataaattctcattaagaaaacaaaatctttggactacaaatgatatccatcccaattttttttaatcagcagacatttccttttgattaaatgtagtacctgtcatcatggagtttgaagtggcagtagccagcctgggtcttgtaaggaggaggacagcagagccacaggccaccctttcttctcctcttctttcctctcatccttctctctccatcttgcatgccatgtggataggcctttcctaggcatttttcagcttgcctgcctccccatggtagctctccttcagattttgttttctcctatgtttatcatttaattcacctctcaatttcatacataaaatataaactttggccaggtgcggtggctcactcctgtaatcccagcgcttttggaggccgagtcgggtggatcacgtgaggtcaggaattcgagaccagccaggctaacatggcgaaaccccgtctctactaaaaatacaaaattagctgggcatggtggcaggcatctgtactcgggaggctgaggcacgagaattgctcgaacccgggaagtggaggttgcagtgagctgagattgtgccactgcactccaacctgggtgacagagccagactgcacctcagaaaaatatatatataagctttgatcagagacctcatccccctttgttaggagcaggggtgatgagccccacgtggaacacattgaccacacagatgttgtgctaagttttcagaatgatcttaaccatgtatcatgaactctatttctccttcctttctctcattttatctaaggtgcagagtctaggcttttctgctatttctaagagtatttcttactaaaagtgtcagttctgctgagaaatataacaacataacatggttaaagtagcatcattgactcacaaaacatttgttgttcaccgcaagaaatcttcattggacgatatccattggatcctgccttgctagtaaggctgatgggtgcaggtcataaggatttaggataatctcttactgtgtgcttgttgaaattgctctgatagctgatttgttatttggagaatagcagtatctttttggcaagaatattttctgcacagacaggaagggaaagactatgtagtgtgccgtgagttgatcttcaggcatcagtactgaccttcttaaatgggatatgaaagtcataggtggtttactgcatctagactcatttgatttctcagcaccatatgtctgttaacatattgatttataattaaagaagcatatgaatagaactcttatttctgtgaaaggatacatgtgtttgcatgtaaacacttccaccaaattttaggaataacaggccccacctgctattgcacagcttctcaggctagttttttgacacccattcctttgacagccttgacatttgattatcttgagctgtattaagagatgctacagtgatgcttcctgtgtcctttcagcttttaattaaagtgtccctctgatttgccaactaccccaaactgctttctgtaagcaaagcatgaagtattttatttatctattataaaggaaattaaaaagtgttaaatatgtaactattcagcaaatatgtattatgtccctactatgtgccctgtcttagtaggtttaagggatacgtcagtgagaaatacagagcaaaatccccgtccttgtggagctcacgttcttatgggagtaggtaaacaatatataatagccttaataagtaagtaaattatgtggtttgttacaatggaataggagtgatagaaagaaacagaatgggatgggggcttcagggagtgtggtgggaagttgtaattttagatgagttggtcaggataggccttactgagaagagacatagaataatgatttgaaaaacataggagaatgacatataataaaaactgaaagaccgcttttatcctgctccccttttcacccctgtaactatcactttgttccacagaagtcatcagtttgaacagagttttcttccagaccttttctgtttctttccatactaatatgttcattaaaaaatctagcgtgtcatttttaaaacatgaatggaattacaaaaactagaaaatatttttgcaacttgcttgattgtttttgcaatctttccaccttaggaactatagatctgcctcttttttatttcccagcacatagtattgtattagatgaatgaaaattgtttatttaaccatttccttcttggcgagcacttaggctgctattacaaataccattcccttaacttttttgtgtatgtatttcagggggcacatagataagtaaattataggtacttagaattgtgattgttttatgtgtctgctgattttgaattttttttttttttttttgagatggagtctcactctgttgcccaggctggagtgcagtggcgcaatctcggctctctgcaagctgtgcttcccgggttcacgcctttctcctgcctcagcctctcccagtagctgggactacaggtgcctgccaccatgcctagctaattttttgtatttttagtagagacagggtttcaccgtggtctcgatctcctgacctcgtgatctgccagcctcggcctccagaagtgctgggattacaagcgtgagccaccgtgcccggcctgattttgaatttttgtagttgctatcaatagctgtaccaatcagtatatacagcttctgacagtgcaccttatacctgtaaacatctttgagagtgaaaatgcttatctgtgccaaataacacatttaaatgccagagtatttacattttaataagctttttcatgtttgtcattacattgcaattcagttgtttttgactataagccactagaagattgagatagtattttatgaaaaaaatgaaaaacatggaagtttgtgtttcttttgcatctagtagacactatacatgttcactgatgacatgaattgggtatgcactgcaagtcgaatattaaacaagtgcatgagtaggcatatagtatttatgagtaggtcagaagtgattcaagggatcagaagacatataattgaggtgaagttcagaaaagtagctttgttagtaccatgtttagacagagtaaggtgctacagtaaactagggatattttaggaaagcttaatgagtgaggggctatttgacctcctaggaagtatgaggtagaatgaccaagtattacagtattaatcaaagaagactgagaaggccagagtgggatgtttgtcagagggacattgagaagatccacctcatcctgggtcgtatttggagatcctcctaagtccaagagaatttccagtataatctgtaagattttagaattgcattacttatcctggaattcagatctggcttgagattcatagccatcacattgaaaaattggccttgtgttcctaacctgatattttagaaatatcaaagtattaaaaaaaggatgagttcatgtcctttgtagggacatggatgaagctggaaaccatcattctgagcaaactatcgcaaggacagagaaccaaacaccgcatgttctcacttataggtgggaattgaacaatgagaacacttggacacaggatggggaacatcacacactggggcctgtcatggagttgggggaggggggagggatagcattaggagatatacctaatgtaaatgacgagttaatgggtgcagcaaaccaacatggcacatgtatacctatgtaacaaacctgcacgttgtgcacatgtaccctagaacttaaagtataattaaaaaaaaaaaaaagaaatatcgaagtattagtcacccactagtaattaataatttataacaagtagatagctcatccttgtttcatttgtttatcatcatattctacttggttgatggaagccagtgaagactaaatgttattattaataatattaattaaacagatgtttaatctgtgcctgatttccacttggaactgtgttaggcactgtgggaatttcataaaagtaaagacagctcgctagctggatgcttttcatctctttgggggtcggggaaggggtggtatttgcaaggacagtttccttaggtagtgtttcctagcttatatagcgtcttaggttatataaaacttttcaactgttatcccattattgatcttcttttgaccagtggttttggaatctctttttgtcaaaaataataagtacatgttttatgactttctgtcaattttgcattatatcctaattttctacataaaaagtgaaattgactttatctttaaatttatagtttcatttgggttcatttaactgaggagggcatttgctaaggcttctattaaagtaacactcttttttatagtagcatctcagttaggtgacatgaaaataaacagttcacaaccctggctggaaacctttaaaaatgcagtgtctagactcaacccacagattctgatttggtaatttgggatgatgtccaggcaactctgatttttaaaaagctgctctcaggattctgattcacagctaggatcaaggactggctaggaaaactgcacaaatccctcggaatccagaagtccagactggaatccaggaagctggtgtgctcaaaattcctgaagatttgttttaaatgtccatcagaaatttccaaaataaaaataaggaaaaagaaaatgtttcagaaatcccttgggaaagttgtgtttatttaatcaagggtaatgaagcaggtgggaaaggtttctggctgaagcccagtagggctcacaaaaggtatattgaaaagttttgttatcaagaatctagacttggctaattatggaaatatttctgtttcctaattctgggattttgctctgaggagaaaatacatttggtatttaaattgagttaattttattagagattagatgcaatgtgaaaactaatttttttccttatattacttattgctattgtcacatgtcatttaagactgctgttagcttttaaaaattatttctgtgggtcaggcgcagtggctcatgcctgtaatcccagcacttggaggctgaggcgggtggatcacctgaggccaggagttcaagaccagcctggccaacatggtgaaaccctgtctctactaaaaatacaaaaaattagccgagcatggtggtgtgcatctgtaatcccagctactcaggaggctgaggcaggagaatcgcttgaacccaggaggcggaggttgcagtgagctgagatcatgccactgcactccagcctaggtgactgagtgaaactccatctcagaaaaaaaaaatatttctacgaaaacatgttttccaaatgcctgtgagctgtcaaacgtgtttgttctatacccatatggagatggagagagagatttaacttctccctccacttttattatggttatccttagccatcacagactgctttaacctgatattttcatgataccactttctaaaaggtgttgttattgcaggtgactgcccttttgagcagttgttagaaaagataggtatgtttttcagaaatccagaaatctgcaatatatctgaaaatgaacttttgattttggaataattttcgatttatagaaacgttgcagggacagtgcagagttcccatatattcctcatgcaatctcccccactgttgatttcttatgtattcctgacaaatttgttacaactcagaaaccagcgctgccatgtgactgtcaactaagccccagaatttgttcccatgtcactagtttgcctactagtgtcccttgtttttgccaggatccaatccaggatagcacattgcatttagctataatatttgcgaaaacaggaaaggagttcattaggcagagctctacgaaaaattggaaagcagatgttgtctctttcttgtctccattctgagatcttttcctctcttatcctgtcctagatccccatcagggtctattgccatggtggtgttcaacattaatccattgttcctgcctcctcctctgatatggtttggctgtgtcctcacccaaatctcatcttgaattgtagcttccataatccctacatgtcatgggagggacccgatgagcggtaattgaatcatagcagcaggttttcctatactgttctcgtaatagtgtataagtctcatgagatctgatggttttataaagggcagttctcctgcacacactctcttgcctgctaccgtgtaagctgtgcctttgctcctcctgcgccttctgctgtgattgtgaggccttcccagccatgtgaacctgcgagtctattaaccccctttttctttataaattacccagtcttgggtatttgttcatagcaatatgaaaccggactaatacaccttcccatcaaaacactcattctctcaaatgtccatcctatagcaaattgtttaaaaggaaatgaaaaaccctgataaattgacagctgcttaatatgttagctttcttacaagtttttacacttagaagagtatacccaaaagaccatgccctaatcccatagaatggatctgtagtggtgacatttggaggaatgcagttcgttgtcaaggaagatgttttgtacggtggcttcctgtattaggccatccttgcattgccacctgagagtgggttatttagggaaaaaaaaagagatataattgactcacggttctgcaggctgtataagctgatgctggcagctgctcagcttctgggaaagcctcagggagcttttgctcatggtggaaggtgaagtgagaacaggcacataatttggtgaaagcaggagcaacagagagagtgggaaggaggtgccacacacttttaaatgaccaaatctcgtgtgaactcagagtgggaactcacttatcaccaagggaatggcccaagctattcatgagggatccatccccatgatccaaacatgtgccatcaggctccacctccaacattggagataacattttttttcttttttttgagacagagtctcactttgtcactcaggctagagtgcagtggtgtgatcacagctcactgcaatctccgccttctgggttccagtgattcttgcgcctcagcctctcaagtagctgggactacaggcgcaaaccaccacacctagctaatttttgtatttttagtagagatggagtttcgccatgttgcccgagctagcctcgaactcttggcctcaagtgacccacccacacctcatcctttcaaagtgctgggattagaggcatgagccaccgtgcccagctgaggattacatttcaacatgagatttgggtgggaacaaatatccaaactgtattccctccctgtccagctctcctgtgcatctctgcacattttctgaggaattaccatattgctgtgcatcagagtggaggctgtggtcccctcgttgtattcagggttacacctacacagtaaggttgcagggtgtgtgtggggttccagccccccgcctagttgattagccctccatcttgatgattgtgcagggcaggagatgggtcttcccaggggaaagagaagttttcacctcttagtaaatgccactaaggtttttcaggttacagtagttctttgactaaaggaagtcacaataatgtttataagtactgatgtggcctttggttgtatcacaaatttaaattaagattgtggaatcaccctgaaagattctttgcaagagatcatttgaagtaggcccagagcctctggctggttaatgaatacaggttgttttgttcttctaacgtagtcattttcccctaacatcttatcgtaaaaataaatagagcaacattaaaacattttatagtgaacgccgtatacctataatctaggtatcatcattactgtacttgctctatcatatatatccatctattcatccttcagtctatcttaactttttgatgcatttcaaagtaaattgcagacatcaatacacttttccctattacttcactaccaccatagttattttggaagaagcatggagagtaagaattttatgctcttaaactttagaaagctcttctcacaaataatttttgatgatttctgatttagaattgatagtaagtttagaaataggagaacctttttgttcattttcattgctgtttctctttgaggttttttttgttgttgttgttggtgttgttttttgtctttcaagttttgctccagggcagagttcccaaaagtagagctcaaggcaaaaataatttgggggtaaccttagagttgggtttctaactttgagagaggagtataacctatcactttagcattaatatcttttaaaaatgcaactatccttatgtattttttaaatacagtgaataattgctcatagttagattaaaggggcaggttttattaaccccaacgtcttttcattgagggtccgttaaccttagatgaaattatgcaataagaaaaaattatcctaggacatcttttggttatcaaatttaaaacatcaaataattcatgccttttcactttagcttagtggttctttaacagtataatgagggttatttggggaacttggtaaagacacagattctcttccatctctgtggaattctgagtcacaggccaggaggggcctaggggtctttaacacttgtcctaggtgattccaacacaggtagtcaaagagccacactttggtaaatattgctttatgatcgtttggaaattattgggtctgataattgggacttaatgtaaccacactcaccgtgtctccctttggctttcttgaatgctgtaacggtggctctcgtaacagattgcagtgagtgccagcaccatccccgaacaaatacagtccctctctgtgcacgactctcaggtatgtttctctgccagtcattccgtttgaggtgctttgtagacagatcctttaaaaaaccaacattttagaaagatagacaatttcaaggtagtgcctccaaatcaagggcttataagctgtctttttaaataggttgctattgactgtgctttgtgggacctccaacctttaaatgataggctcaagagtgagaattgattaccagactgctcctgaaattgctggtactgtggaaaagaagaaaaggaaagaaaatgacaccattctgttatattccagccacagaacattgtggttaattgatacttttattttttgctcctggttggatttctgtaacctgttttcataattctgttatcattgaattttatgggccaattcgtctctacaacttgccttgtaaaaataatagtccagtaactgtgacatgcatttataatgcatatttattaaagttatgggacagaagacgtggctgtgagccatggtgggaggtgttgagggatgctgagcaatccagggaaaggcctaggggcatagaaccagagcacaggcctgcattctggttctgctgtataattaacaggcaagcccttttgttctcaaagtggttgtactataaagcgtcaccactgtcaggatcataattttctttctttcaaactctgcatattcaatttaaattcatttctgttttacttggtctgtgttttataaaatagccatatattggagagataattagagtgattttgttggcttcaggaagcctgtttgaggtcagatacctaatgcggggcccttattttatagcttatatatagagggagtaaagacttgcagaggtgaagtggctcccccatagtcacaccactagttagaggccaagtcaggattcggtttaggtctttacactatatcaggcaactcagtaagagaccttgagataaactgtagggattggttgaatgataaaaggcaagttaagaataataatggatcagagggcaaagagagtaaaggaaacgggaacagggattaggataactagtactgtagagcattttatgactcactttcatctatatcattttattctccctgcaaccttttacggcaggcgttattcagagaatggcttgctcatggttgcatttcaggtcagtggcagtgccaagtcttgacctgaaatgccttattttttctactccaacaataaggtctactcatgtcccgggattccctgagaacagggagaggctgtgtattggagacattcatggttaataatcaatattcaagaaaatgggctctaggtgagaaaggcaggaaagataaacagtggctgaatcttctgggccccgccttcctctgcattgcagggtttaaggtgcccagcctttgtgatccccaagtttcaatagtaacagtctatgtgtgggttgtgaggtgccattttaggtagctggactttactacagcttatacaagttgtttatgatacccatcctagaactgaggctttccatatgaaacattcatatccacaattgtgatgggaattaggcaccattacaacctttacatggaggtgttacgatgccaaagaaggcctgcgtgtgtaaagatctagttttgaaatttccagaaagaaatggctatatgaatcaagtgatattgtgattttattcattcctttcctgatacagtttataacactgtttgctgttttctttttaaagggcccacccaatgctaatgaagactacagagaagcttcttcttgtgccgtgaacctcgttttgagattaaggtaaataatactgttgtttattctgcattgtttttcctatagtacaattttttaaatctccttcgttaacctttcataatattagcataaaatagaatcgttagcttatttgatttccccgaaccatgagtgtatgctgtattcccagggctaattgtgctcttctaattgcttgctaaagaagagtaagaaagaaaagcaccatatgagtgtgtctgcaggctcagtgtacctttcattatgttttatttccttgccttttccttcttagatttttttttcttttcctttttctttttttttacaatgtaagatcacagtaagagatttttaatgagtttctttcacacttcagcagtcggtctctgacagaaataaaccatgcttgtactacaggttgcctgttcagaacatttttcattggcaagtttgatcagccactgtggagaaatgacagatatattttgaaagaaatctcagtcttctaggaaatggatacaaatatggtgcctgacagtatggtctttgtctgcagtagtgtgaatgaaagcgttttccgttttaaggattttttttttaattatttaaaggttcatctttgtgatgttctttgctaagaatttgatatctcaagacaaaactgtttaaactgaattataaacagcttagtttaccagttctatcagaatactgtcacatctttgaagatgttttaaaagaagttatacatatgttcttctgaccattaaacaaataaagcacgtgcatatactaggcattttctgagttgtagctacaaaaagcgggttcatcagcaaggttagtttctggccactagggattttcagagttgtagctacaaaaagtgggctcatccttaaggttagtttccacccctctgagttatcatagtccatctaagtagaccattggcaccataatcacccctcacttctgatggtcatttatagtctgcattttcacgtatttgtcaaaggaacctcacagtaacccttggtatgattcaattcagagttaagaagtgaaattatcacaaggctgttttccttatatttgacagtagccttgattattattcacagttcgtgaatttagcaatcactaaagaatgaggtagcccattccctttttgtttgactttcgaacgaggtacttctttcatttatattttacttgttcagttattcattaattcagcccgtatttatgaggagcccactctgcgccaggagctctgtgccaggctcatgttgtcattgaggtgtagtggtgagcaagactaccaaggttttagtctagcccactgagcatgcagtgttggaagtgacctttagaatccaacagtctaatcgcccactttatatatgcaggaatcttttttttagtgtctctgctggatgtttacctagcttctgtgcatactaaagctcacgttttctccatgatggcccctttaatactaaataaaagccttaattgattgatggttcttcctcctgaagattaaaccgacttttctgttctgggctcctatgggctgtaattctcccccttagtgcaaatatcagactgtctgcataaaagtctcctggaaaatgtgtcaaaacacgtactactgaaccttaactttagatattattttgccctgggtgctagagcaatatgacaaatgtgttcccttatttttctgagagccatttgtatatttgcaaggaatgttcttctcttttcttagacaaaatactataagaatctttagcctttttctcatgatacagtttctatattgctcttgcaatcctagttgctcacctttattaatatttagtctgtatctgcctttgttatattttctcttgtgggtataggttgttttcataagcttgtggcttagatcactagtcctacatgacgctccaggaagaaagggttctatgttcaaataagttaaaaaacaatgcacactattcatcaatctgtgcatgtgcacacacacgcacatacacttttttttggaaatcataaggaatattaacattaaatattttaagaagttctacaggaagataatttgtttaactttctttaatctaaaacctatttgatctcgtaactctttttatgtggttattttgtgttccttttgtatgtagtgcccatatttaaatacaggattccagatgtggtctgagcagctggaatacagtattaagataatgtggttttttttttttttgtaatccacactctatatttctcctaaatcagcctgagttttcattgccttttgaaatatccatgcacatgggtgacatgttcagcatgactcagcagccaaacaaaacagctgatttttttaaagggctaccaagcctaattctgaactgcaactctagataaaatttatcttttatcactaataattaacctgatagttttgatgaatttcttgtccactgtgtgtttcaatcatcaccatcagtgtgtcatattctagtgtttagatgtatgtccattgccaatctgattaacctgccttttaatctttatccaaaacattgattaaggtgttcagtagtttgagggcgaagagtcttctgacatctgttggaaaccattcactgtcggagtgactttcagtaatgaactagtgttctttgatacagttgttcaaccagcaacaaattcaatgccttttaatgtacatctaacacaattattccaaaggatatcataaagggatctattatatatgttgctgaagttaatatgtaccacattaatggcattttcctgaatctaatgacatagaaacactttcaaataatagaaatgtattttagtatgacttattttcagtgaacacttgttgatatctaattgttggtacatttgtctagttaggttgccattaaaaaaaataccatagactaggcggctgaaacaacagaaatgtattttctcatagttgtggagatcgggatgtcagcatggctggtttctggtgagggctctcttcttggcttgcagctgtctgtctgcttactgagtcctcacatggtggagagggagtgagagcaagctctctggtgtctcttgggtcccaccctcatgagctcacctaaacataattacctcccaaaggctccatctctaaataccatcacttggagggttagggcttcagcatatgaatttttttcagggtgggccacgattcagtacatagcagttggtgtactttttttttcgctaaatatttacaagctagttatttagactattacttttcatatttgtgaactcatgaatctctgagaaattattgttggagtggggtggaaaggggggggatgtccttgtacttcagtttgagaaatagcctttgaaagttctaagttaaacagtattacttttttgtgatcaccgtgttctaaagtaaacgaaaatggtaaatacattcattcattctataaatatttattgagcacttactatgtacatggcattgttccaggtgctgtaatgtaccagtagaaaaaagaaaaggcagacttcttgccctaaaggagcttacattctagagccagggagaggaaaaattcaaatattcaaattggttgtatgatataccaggttgtctgaaggaaaaggtatgtgaggaggatagaaagtgagggggatggtattctatattatagaaggtatattagatttctgttgctgtgtgaaaagctatcacaaacttagcaacttagaacagcacccatttattatctcagtttctgtaggttgtaagtccgggtacagttgagtgggatagtctgctcagtgtctcgcaggctgaaattgcggcatgctcatcggaactcatggtcctctcccaagcctttttaggctgctggcagaatttaggtccttgcagttgtggactgaggccctgagctcctataggccacaagcagtttacaacatgattcttgccctttcaggagcagctgtggaccatctccactacgccaccctcactcccaaggcctcggtctttctgttcaaggtttttcacctgattaagcaggcctcacctaggataatctcctttttgatgaactcaaaatcaaactgatttggaactttaattacatcttcacctttgccatgtgccataacttaatcgcaggagtgacatcccattatcgttataggtcctgttcatactcaaggggagaggatgctgcagggcaagttcactaaggaatgggtttattggggtcatcttagaattctgcctaccacagaaggcctctccaaataaagtaatatttgaacagacagacccctattggaagtgaggaaacaagccacgaggccgagcaaacagcacttgcaaacgtttgaagcaggaagcatgttataagtaattggaaaagcagccaggtaaccagtgcaggcagagccaaggtcatgggcacagagagttagcaggggccaaatcacgtagggctgtgtagcctgtggtgaagactttggattttactgttagagggcagaaaaccaggaggcctgtgagcaaaagagtgatatgatctgaataaaattttaaacagagagctgcaattgatttatagagaacagaccatgtagagagcatataaggtggctgtgagagtccctaggcaggctactgccatgacatagtgacgatgatgtgacttggaccagagtgaggattaacggaagtggtaagcaattattggattccagattggggagaaagaacttgattactcaaggttttggcctgaaagtatggaggaatggagttactattttttgagatggaaaagagagtttgagttgcaggttgggatggaataaagaactcagttttgcacatgttaagcgtgagttgtctgtgaggatgtatcaggtagggatttagatgcatgatttcaaagatgtctcggctagagatgtaaatttgggaacagttggtgtctatggcatttaaagttatgaaatgagtggaatcatctagggagtaagtgaaggtagagaagagaagtgggctggtactgtcacagatgttgcataggtaagcatccactgattgagaaggagaggctggtgaggtagaggagagagtgatgttcctaaaaaacaaatagaggaagtgtttgaagaaaggaggagtgaaaagctgcatcaaatgctatcaataggtcaagtatatttgcaaaatgaagcacatgcttgaccttggcaagaatattttcagtggagtgatggggacaaaagcctggtccaactgggttcaagagattggcaagagagaacaggggataacaaatagataacttgttagtacagataactcttgtgagaaattctcaacacaagggatcaaaactgtggagtgatagctcaatgagaatattgggtaaaggaagattttttttaaaaaaagcatgtttacaggtgaatgggaatgattcaatagagaaggaaaaattgaatgagggaggggacagtgccagactgatgttctcagatgggtgaacagggatgatccccagacatctgttagataggagaaaggagaggtcatctcttggatggtgcagctaccatcaggggaaggcaggcaggggtggcaggtagaggtgcaaggagactgtaccttgcctggaagtcttcttctgtttctattttcccagtaaaacagggaatgtcattagttgagagtggaaggaaaagaacgtgatggaggttttagaagagaggagaataattgtgtaggagagcaggagagtaaattttctagggaaatgcagaaggattaacaggctggaacagggatcactggaggttaataatgacccagcatgtaagtgtctgtgtgtgtgtgcgcgtgcatgcgtgtgtgtgtgtgcacgtgcgtgtgattataattaaggaaacacaacatttaaaaacattcatagagggccaggcgcggtggctcacgcctataattgcagcactttgggaggccaaggcaggcagatcacttgaggtcaggagttcgagatcagcctggccaacatggtgaaaccctgtctctactaaaaatacaaaaattagctgagtgtggtggcacatggctataatcccagctactcaggaggctgaggcacgagaattgctagaacacgggaggtggaggttgcagtgagcagaaattatgccactgcactctagcctgggcgacagagcgagactctgtctcaaaaaagtaagtaaataaataaaacatttgtagaggattctgtgagcatagccatgggccaccatcttagaaacactgtttaagtcataaataaatatgagtcatagaattgctgtcaagctgatctcttgtgtgcaaggtggcagtcccctgtcctcttctctcaccccagcacccctcaaaggtctgacttccttcttttatagcctttgaagttacaagctctttgagtatcaaaaacccactatccagtattgttccctgccacacaatttgttcatacccattccccatttgaagtctactttggatcatttgcatcatctctgggcctgaacaagctattctctaaaccatcctgtgtgatagggagctggaaggctgcttttggctggtgttgatcagatttttaaaaatccatgccctcttttgcaccttcctcatttgtttccatctccattcaagactctgatatatgtgaatgcatttgtacatatacatatctacatgtacacacacatatacgcctgcatatgttacacatacacgtatatttgtatatgccctcactctctgtgaatcactcctcaatgtgatgcgtggctgccgggtattgggaagtagtatgcttgcatttcttatccccgagcctatctgggtgtgacatttatgtgtgttatgctccacaggctagtaggtaggagactttagttcaggccagcccttcctcagtccttaactaatgctgtgtgggtggctgccctctccacctcttggaaaggtcactgtgactttctttttgacatagcattttatggccctacctgctgggaacgtggcttccttcctcactgcacgcccctccccctccccccggaagctcaccttgattttgtaagtaggaaactgggaaatattttccttttcaaaatgtcacactctaggagaaaagacaaatacgttgtggctacaggtagtgtatttctccactatttatttattcctggagatcataggcaaaagtctgaggaggcaaaagggtagtttcttccttgaaaaaaatatagtgttgctttaatttgctgttatatgcaatatcagagaacaggattagaccttaaggctcaatgttaaatgctggaggtggttaaaatgcagatttatctttttcttttatgttttttgcaaattttttttgtccatagtatatatgataatgtcatctatgatatcaaaaaaattgaattatcataaagcccgtacaaggtaaggaaatcctcctaaatgctaaactcaggagaaaaataccaagtgggccaccttgtaatttatatactgtcagtagatggtaatacagtttctgttttgagtcaaacattatacaaatatttttccattagtatatttttcatcaaataaaatagtcatgcatttggcacaaaacatgtttattagaatcaggctcagtgatttggaaaatggtaaatctatcacttaaattattaattcctttgtattagatgctgttcatactttgacagctcagccctatggatggcatttacagttttgctgaaggcagccctgccaattgccatacatagatatgctggtctggtatgtcccatcaatttgctcatcatgaatttaccttgttattatgtagcagtatcattggaccttgagggaccagttgaagaccccagatcagcagagtggcttcctgctggtagggaaaaatgatctctagcacgggatacttattttaactcagcatgacaattgttgcatacttcaatttattattttggtttcgttattaaaagatgcacttagctatttgtaaagaatagacttagtaaattatgatttcataaagaaagctaaatctgttagaaacgatgttggccattgttttagcatgagtatgccagaattctaattccatcattattcaggaggaattataattcttaaactgttctctagcctataaaatagggttatttgtataattcttaccggtcaagtggctgggaggtttgattaattttttccctgaaaggttaaatagtgtaggcatagtgttcagttatgcagtgcttttttagtacatgttcttttttccctccacagcaaactacttatttactgctttctttgtgcaagtctttgttgaaaattcaaaaatgaataaagcaaggtttctgcactcagagagcttaccatgtaggcggagagatcagatcccgcacaagtgaccataatataaggtagaaggtgataaatgcagtaagaagagagataaaactaagaagctatgggtagttagaggaaggtgaaagcccttttgtttagatgttatctttggtgtgcttgttcccatagtaaccagtggtattgttttttgtgtgtgtgtgagtttttttttttgtttttttcaacaaccaaattttgagaagagtaatggataggacgaatccagggtcagtgtcatgctgtggtctttggtaaggggtttaccgtcttaacttatttctgaaaagacgacatttgtttttcagtagagtggtatatgttattacgtgggtaccaaattaatagaaatacagtgctctgatccaaaaaatgtctggcattttacttcattttttgggtgttctcttttggttgttttctttgagaatttgagtccctgatgcatatcttggctttattagtggtatccttcaaaaagatgaaatgcctactatgtgccaagcacgatgataagcacgttgtttgctgtgtcttgtttaatcatcataaaaccaccatagcatccatcctattgttaccagaatttcacatgtaggagattaaggtttaaagtcatgaaataatttgtttaacaccgtaaagctcacaagaagcagaggtgggtcttgaagctaggtcagtttaacatgttggtccttgttcttcttccctgaccctgtggccttgctctattcagtcctgttttgaatgcagtcagaaactcctgtactttagggattgttacatttacctgtcttcccattaacgtttcacataaatattcttttaacaatgtttcccaacaaactcatcattaaatgttatgacaggaatattggaaaatatttttcttggaggagatgctaaagatgctgctgcaaatagaaactggcatttatcgtgttttaataatttttcaagcactgtcacatcacttgcttgatttagtttttcctttcgtcctacatttgctgctgacagatgaaacagaaagactggagatgttaagtggctttcctgcagtcacagctgtaattctccagctggctagcatctgggtcttctgacactaattcaatgttattgatgatatggtatagggagatagtatacatataggtgatagagggtcgtgtaaggtgttgcctttggcatatacaaaatccttctgctggtaaacatgctaaaggaaagaaggtttgtattcagaaaaaattggtataagggaagcaaaatagaagcatgaaaaatcattcattctgcgataatactgttttttccttgacaactgagcaagaggacattgtgagtacaaatactttcagcaacagagaatgcatagagttctttaaagatattctgtattttcaagccgtaaatggtcatcttagaaattcagaaagtcaacataaattaaagaaataacatcatccataatctcaccacccagaaataattattagcctcttggtaaatatttttccagacttttttctacatacatgttaatgtagatttttaattttttaaatgttattgtataaactttttattttattataaaacaacatatgttgttttctaatctgctctgtttactttggtagtatgtcctggataccttttcatatcgatgaatacaaatctatagaatcctttttaatggcttccttatatttggattgaatgcaccaaaacttatattactgaaaaagtgttatttgatattgagggagttcccagtttttcagtattgtatcatataaaaggttaaatgtacaagaatggtgtttgaaaactgcccagtaggaaaatctctgttagctttgaattttgaccttagtgaaatgctcttagactttgagaagcctgaagatacagaactgagtaagcccagtatcaaagcacatggggattacttaggagctggttctggctcttgggtcagcagaggttgtcatcatctgtgtagcagcagacaccgcttcctcgctctgtgttggtgctgagttcttgcagcagggttttaacgaggtccctgcactaagaagctccaaaactgaatgatttcttaatgtaagagggttccattttgaagctgttcttttggatacttccttcgaaagcttattctttaaagaatcctcccttagctgcttgctgtgagcacccaggagttagaggaagtagcctgtgttggacctaacagttggaggagatgagagatcacctttatgctctgtgagccttacacaatggctagcatgttacagatcctgaataaatatgtactgcacaggtgccaactgaatgatttttaatgaaaggcgtattttacaaacaatatcaagatgcttcacaagatgctgtttgcagctctttatttttgacattgtggtggaaacatatacagaaaatactcctttgctagattgctttttttccaaggcaaattaatccttttgacataatctcctatattttgttcttttaaatacttttctgttaagacaaaaatggactttttaaggtacctactattttaaagatattttctctgcatgcttatctatataaagacatgaaaagattcatgagaataaagcaaaagttcatagaaggtgtggagagtcctggaaatatgaccaaacgatcagtccagcaggcaagaactgcaaggcaggttctctgtcagagaataaaagaagggatgctaaacaagggccttgcgcgagcattccctgccctccattgagacccagctgtgttactgtggcttggcacagtgtctattggcagttcccacctctaggtctcaggacaaactctcatcgttcacatttgaaagtgtggatgtgctatgtttctatccacagagccttctttggtaagaggtttcctagttaaaaaaaaaaaaaaagtcttcctcattcttttttttccactaaaagaagagtgaagccaaacacctatcagcagctagaggatggaagctggcctgcctctgtggagcttaccatggctgtctctctgaggcagggcattttcaggggagctctcaggtcagagaagtggggtgaattgtgccatgtcgcaagactagtcagtgtcagccccaggagtcaaatgccaatatcaaccttaagagtaaagtagagggggctgggcgctgtggcttgtgcctgtaattgcagccctttgggagaccaaggcaggaggatcgcttgagcctaggcatttgagaccagcctgggcaacaaagtgagaccctgtctcaaaaaattaaaaaagagtagagtggagggcctccttgctctcctctcatcttaagttccacagcattgtagccaggagtcagtcttgcatggtagaccaattgtttggttatgttttggggactctcgtgtcttctgtgaactattgcttctttctcatgagccttttaatgtcattacacagataggcgtgaagagaaaatgtcttaaaaatagtcagtaccttaaacagcttttttttggtggcatttaagtcaatgttaattacctgataccttacctgatagtagcctgaaattttaacaaatgcctttgtattttaagttatccttcctgtcgctgtgcagagcctgtctccctcatccttttttatattccacctttcctggctactgatgaggtaacctgctgctcttagcattctaaaaattctcctctccagttttattagggaaggttgtctcttaggacttgtcctcttgatcagagatgaataattctggagactgtttgcagagttatttcagttctccgttaccatatccctgaagataatgagtggtaagatttcttccttgagatgctgagtcttggaaaggtaacaagtatatttcagtttggggactttctttgcattaacttttctttccctgttgaaaccagacttcttggaatgtaatttaaactttatttagcaatccccgaagtgctagaaaactttattctccttggtaaaattcatacagttgttaactgatggtattgtgggaaatctctgctgtccggtgaatttcattggttggcctttgtattagttttctatcactgctataacagattaccatttacttagtggcttaaagcagcacagatgtattgtattccagtctgtaggtcagaagagtctcagcgggctaaaatcaaggtgtctatagggctgcattcctttctggaggcccttggggagagtctgtttccttcccttttccagcttgtagaggtagcctgcatccctcggctccttctgccatctgcaaagccagcagcttaacatctctctggccttgcttctgttaacacaagcaagatctctttctctgaccaccaggaggcttctctgcttttaaggacccttgtgattaggatggtctcaccaggataatccaaaataatctttcttcacaaggtccttaatttaattacatctaccaaatccctttttgccatgaagagttaacttattcacaggttcctgagatttggctgtggacgtatttcggagctattattctgacactaaagaaagattttaagtgtctctccttatttgtggtatataatttctaatttttattatgcttgcttcctggtcccacatttcttggtattacagggcctgatgcagtgcctgtcacattcctaacattcaggcttccctgaagtagggcagtgaactttcatgagcttggattatcattatggagcacctttggagtgcccagtgtatgccaaatgttacaaagaagatacagatgtgtgtgaagcttattttcttctatgttttgagacaatcatatggaagtatgaaattgcatattatccctttcagctgataagagggattacttaaaagtacaaggtaatttggaaggtgtgccttcctatgaaatctttcaagtagagatctggaatctgtagttcccatgtagccccctcctttagaatcggacacccagttctctcctaatgtacatgagtagtgtgtttctaacgcttcactattacaaacaatgccaccttacacacatctggttatttcccaaggaagagtaggaacacagacacaagtcaggcaagtgcagggcacaggcaaggagaattgctagttctcagctggtggctggagtcatagttactattatggatagcatttactgcttgctactcatatgcaaggcagtgtgttaaatgcccactgccttgtttcttttacttctgacaacactgtgaaatagatactaatgttattctcatttacagatgaaaaacaaccaaagcaccaaagttaatttacttgcctagagagttaaacactcctgtttagtacctgagcaggaattctaacttgtgttatctgatcctggtaggtcctcatttaaatgatgccctggatagcttccaatgaaagaaaagtccagaaatattgattggcagatacttggttaaggattttgtgctagggaattgggattttcttttctaggcaatggaaagtaataaaaatatcttttgggtgacaggaggcaacctggtaagaaaattaccaggacttttgttcactcagaaatcggagcttatctatctctctgcctccattcttgtcattatccagcattagccgtgtgttctggatgttaggtggtagccgggagagaattgattaactcaggggagtcttcatcttcttcagttcactttcagagatcctgagtcttgtgtggtgcttatttcacactgtttttctttgactgttacatcaactgacaatccaacgagcatctgggcaaagggctggtggttttacaaggtactcagtggccactggttatcagagctatcacttgttccttttgcaaacggtgatgaaaaccatctcgtcaatagcattaggcattaggcatttgccagatgatgcattaggcatttgccagagctgaccacatttagtctgtgtgacgctgttgagggtattacatgggtaaaggaaggtctggggtcacatcagaggcattgcagagctaggggaatgagatgatatgaccatctggacatggcgcctagctttgatgccagtagctggtgtcaggtggcggggttgctaattacagaaggtagctagagaacctgaagagtcaacaacaaaggtggtggaaagaataaagcaagagccaattattggaggcttgagtggttcggttagtgttttctagcaggtttcatttacccaggtcctgtactgtccctggggcctgcagatgacctcttagaagtggcccagtttggtccaatattcatgagagacaagaacatgaatttacctgaacttaaaaagcataggccgggccgggccgggcgcggtggctcacacctgtaatcccagcactttgggaggccaaggccggcggatcacgaggtcaggagatcgagaccgtcctggctaacgtggtgaaaccccgtctctactaaaaatacaaaaaattagccaggcgtggtggcggttgcctgtagtcccagctactcaggaggctgaggcaggagaatggcatgaacctgggaggcggaggttgcagtgagccgagattgtgccattatacttcagcctgggtgacagaatgagaccccttctcaaaaaaaaaaaaaagcataggccaagaaggaggtagaaaataactgtattttagggaactatggcaaaataaaacccatcacttgataaggatcttaatcagaatttggctgcatggaataactagagattatctcctgagctttcaccctctgggccacatagaaatgggactatcaaatataagaactactcttttaaaaaattttcagaaaataaaactctgtgccgtcgtctggtaatctgcttagctcagtgagtttccccagtgaggtaagtagttaagcaactttaatctccaaaaggaaatatgagttttggttgagtttttaatgaatttggatatggaagatgctgtcaagcatacctggccacaaagtattaatgtaaatcctctttaaaaccctttgactcatttttatttgcagagatacatcttgtttcataaaagcattggagggcttctgccctgggtaagaaagcaaaccacctttctgacacagagggccctggggaggaggtttggtctcctgtccccataagtttatattaatcctttaccttggagcatgctgcagtggctacttgaagatgacttttcagtccctacttggagaatttaccagcatgcccaccaatggcctttgttgtcttaatggagaagctctggggattttgtaaaaccaaactttgtacgtttgtctggaactcgttctagagttcttgctgtggagcagatacaaggtcagctcagtcaaaaagctgatggggtttttgtcctttgatcctttctctttttatggtttggttgcaccattttgctccctcccccgaaagagaagtctttctctgagaatgttcaaatgaattattaggcctctaaagcacttaaaatgaatgtgtattaccacagcatggctataccattttaaactctaacattgtaaatcacacaggatcctagtcagattggccttttgactacattagcctagctgttctgttgcagggaagtgtattgtttgcttatagagtatttttagcaatatccaagtagctaagaagaatcttttttttatttcttaaaacattctgtctcttttacctcttttctccaacatctgaaagaaaatggggaacttaaaaaatatcagggctaaaagatatttaacaatgcttcattctctttttttcctttttttttaagttgttttttcttcattcttttttaatcagtttattgtacaatctatactcgctgggtaaaaacaaaacagaagttttatgtttctttagttactgcctttaaagagttgtcagatcttcccttcccatcttttaatggcatctttggcattaggccataattttcctgtcacttggaatgtaaaaaagtttggtttaagcttccatttattatgcagtttcacctttatcccctcccatcacccacctgacccctctccctgaggagggaacacagttaccctttctcccctttttgggttgctttttcctcttggttgccactgcttctctaaaactaactggctgccagtgtcctctgaggccagtgtccaaaggccagctcttcagtagtgacccttgtgggactctctgaagagatataggccagctctgcttcctttcacctagggaggtgagcaagtgactcacctccacttgggaggagtggggtgatggcaagatggcttgatgtgggccaccttccaggtgaccccttcaccacaccaagacacgggggtaggtgtgcgtggatgctgaacggctgctccttctctgcactctgccgtgtctcactagttttcttttgtttgtttgtttgtttgtttgttttgtttttgagatgaaggagtctccctctgttgccaggctggagtgcagtggcacgatcttggcttactgcaacctccacctctcaggttcaagcaattctcctgcctcagcctcccacatagctgggactacaggcatgcaccaccacgcccggctaattttttgtattttagtaaaggcggggtttcaccatgttggccaggatggtctcgatctcctgacctcgtgatccgcccgcctcagcctcccaaagtgctgggattacaggtgtgagccaccatgcctggccatcttgctagttttcttttccttgctcaggcagtaggggtagggttgatcgatatgtctgctccctaagcaggtattgatctggggaatgagatgccagccttgcctccttgcccactcctttgacctgtggagtgcctctctgggggactcctgcagttgtattggtagtggggagcctcagtacacaccctagaccagtaactcgtgagggttccctgtcattctttaccccttccccatattttctttataaagataggagttggaggagtcagatgtcgtggttggggctagcatagccattttggccaattgttaataagccttaaaggagtagcatgatatttgcatcaatctttagaatatggggtagctgatgtctggttatttttagcttagcatcctaggaacagtgctagggtgacaggaaaagattcacctaatatccactgtcacagtcattcttctgtacgtctattgaactcctgctgggcaagttaccatgggaatattctaaaacataaactttgtccttgaaagatcttatattttggtttaagaaaataaggatataaacagagaaaatattgaataaccatataagacagcatgtggagaatagttcaaataaattaaattgagaataatggtgtcatttttcaaatatcagtgtcaactggggtggacggctaagactgcctctggcctgctgcagggggtgtgggggtgggtgaggcagggggcctgagtgtttctgttctagaggatgccttccagctctgttgtgtagcttctagctgtgctctgcaggttaaaagaagaggaaacacccagggtgtgggaggaatggaagaagaaatgtgaaaatgtaccaaggcacaggtttaggactaacttgattttttttttaaccagattaaattttgaaataacatcattatattcttgtttataacttttttttggtcacttataagatgcaaatgaacaatgttgggttttttttggtttttttgtttgtttgttttttgtttttttgacttgtgcctttactttcaacagaagttacaaggagcttgctgttcactgaatgcttttctttctcttctctgttatcaggttgattcctcttcagtatagttactcattttttcctgtacttacctgaaaggagaatgtaattaaccactgtctttggcagtgggtctgttggaattattacctgtttggcccttagtcatggttggttggtttacattcttggtctcctttcccaatcttatttgtcttctgtgacccttgcccagcatgcagttggcctctccttccactgcagacaaacaggtcttcgctcaccttcccaaaaagctgtcactggttcccttgggtttgcctcaccacagtgcaacaaagtgcatgaatttgggtatttgtagatttggtgcagtgtacattttaatcttcttcttctctttttctaaactcctggtccttttatactttccttcctgtttcttagataattattagaggctgatcttttcagtgttagcatctttcttataaacagtctttgggtcatatttcagtattttatcaagcttactttaaggacaaatcaagctgatgcccagtaacctctcttaggctagaattgactttatgatgttcagtaaatcaccatgtttaaggactccaaacttatcgtagtggccttggacttcaagttgcatattgagtgataaggaaaggaccatatatctatttttccatcctaatctctactatgttattggtgttgaaactgtagaaaggtccattaagtctaaggttaccttaaagggaggttatctctgctgttaaagtgacaatacccgtgatatactcaacagtattgcaaggatcttcccctttctctcaaaagtcagctattgttatttacttgtgctgctgcctacttcatgaaaaaaaggagccatataaaagtgatacattttaacatgttgcagagatgaacaagggctttcacacaacctccccagagaaaggaataataattattttgataaagtgctgttctatttgagaggttgctttcctctagctaaatcctcaataataatgcctacatctattattgttctaatataaagaattgcgagtgtagggaattattttatataaagagattctcactctagggaatttctatactggataatctgcagcctcctgagtgcaaataaaaaatggaaattaaaatcctctagctttgaagcatacataataaggctgctgcaagtacgaagtcagaaattgtgagatgatcaaaatcttcacagagtaatatgtgctaatgacaaagttcaggtcagaaaccaggaaaagaattgagaaagggctatggttgtgttagcagcctcctacatctttgttggtggtcagaaattgtgcctgtgttgtacttctgagttagttgtaacctattatattcctctttgctgtgtcactcctgcaaggagaatttgcagagaaaattcacatttgcattgcttctgtgttttaaaatttagaagcagctgcaacatgatttaatcaagtagggaaatatcgtttaactacattttgggggttgtttgtttgcctttttgctgtatatacacacttaattgattctgttactggggtttgtatttattttcaatttaaaaattaggaatcatcagcctccagattacttgcctctattagttattgatgagtgatttttttttgccatcaatgagtaataaatagaacacctcagattaattaattccatttgttgaattgacctttgtttcagacactgttctgggggtataaaatgaataaaccaagttaaatgataaaggaaagattgactgggtaaagttgggcgatcacatactctgattgctgagtaaaaggtgggctttgaactgtattttgtattcatagccgtcagtcaggtagttgaagattgactgggtaaagttgggcggtggggacggaggggccaggtagataatagttcttaactgtgggtgttagggacctaaaaactcagattaagcctgtagcttccccctcctgcccctaccaaatacatatttaacatttacatagtattttgcaggtggtttagataggtttactgatccccagaaacccatctatggaccctgcaaagctccaaaattagaaggaaggtggctgggtgcagtggctcactcctataatcccagcactttgggaggccaagatgggtggatcacaaggtcaggagttcaagaccagcctggccaagatggtgaagccccatctctactaaaaatacaaaaattagctgagcatggtggcaggcgcctgtaatcccagctactcgggaggctgaggcagagaactgcttgcacccaagaggcagaggttgcagtgagccaagatcatgccactgcaatctagcctgggtgacagagcgagactccatctcaagaaaaaaaaaaaaaaaaaagaaggaaggaagatagaattaagatccttcaaacctgttgttactgtttttccaggaatgcccagactccattgtaacccctacctttgaactgggctaaccggacttaaataggaattgtgccataacctatctctttgttgtttttaatatacaaagtaacagtagaaagttaggttgagtatgaagatgatttttaaagggagggcttttccgtagagagatggacagagagataccctagaaatatttagaggaactgaaagttgagtaagcattgatgtaaccacatgatataaatgaatgatttatttttaccttgccttgttccagagaagatttaaggtgacttacagtatgaaagcataaagtaggtgaagtaaaatgaagctaaaatgagattttaaaaatatcttgagagtggaaagagaattgggcagggaacccagagtgatataattacaatcactgagaagaaaatttagccttcagcttgttagcaaccaggaaattatagttgtctatttagtcctcctctcttgacaaaagtagacctataggattaaaagattatatagcgaggcaagcttttgcttgataccaaattcaagtggaatttatctcttggttctttctataaagaaccttggataacatggcagagagcttgacctactgttgcaaaaaatgttcttgagttattttttcttagattgacactccttagaagtcaagggcttatcttcattgaattacagcatacaacataaagtaatttcttcagagcctaaaccaagttcaggtctgttttctttccactgatcaactctgagagaagatcttgagcttaaagttaaggaaatgtttttagcagggaaagaatagcagttagtccaagttaggagttctgaccaccatctaaagtacccatttgctgtatgttgactgaagggaattcttaggtttacagatcagatgagtaactagcagcattaccattctcattggaaaattcaaaaatctgatgtcacttagacagacgagcctccacttgcagacatactgtagagaaggaactttggggatagatcatgcatttttttttttaaagagccaataattctttccccaaatatacagtggacagcatacttgtaaaccatacagtataggagaagtgatattagcctgggcaaattacttttcaagtaggtgtgatcaatggcttcctttcccataaaccttgtgtatcctttggaacttttattattttaaataatataataatattttataataataaatagaataatattattaatacctctccaagagttggactttaggagttggaaggattgcatattttttaattatagcaaatatttctcaccagcaataatattagttttagcatattaatgttaaacttgttaaaaacacagctcctcctggacacacctgctgaggtcagatcccatgatcttctccctagacggtaagctccaagtgggcaaggaccaggtctattttgtttacttctctatgttccatgcctcgcacagtgcccttgattcccataatgcacaaaatttaaagaggcatgagtatgggacctgtgtaacttaatgggttaacagttccatgtactaaaaaagagagaaacgtcactttatgtaattcagtgactatttttttaagtgcttactctataacaaggcagtgctgtattaagtgtcaagggaaaagaacccttagctttggagagaagataaacatatacagagatagtttcaatgttatgggttaagtccttgatagtcctggggtttcagaaatataaacattttgtcaattaaaggtatgaagatgccatatgcttgtattacttccttatgaaaatgaaacttcatataattattaattaaagtctatatttcacttaaaattctaggtgaagaaatctggataaaaaatttattgggaaggatttcatgttttgaactgttgtccagtgaggttatatggcagtaattttctccagtagggaattcctaaagttatcccattttgaagaaggtatgtattacatttttcatccacatgaagaagattacacttgagaacttagcgaaaagcatttgttgaagcccattactcagggcaagagctacctaatttttgtgatttatctgctatgacgcttttcaacttaagggtttatattttcctttttttgtgtaaaaagaaatacttggaacctatggtaatttttttggcatccttgttgattcagcccttttgtggttagttttttcttcctttattttttctatatctgtccacctgtacatttatccaaatatatatatatattgagcaacagttttattctcaatgttagtaatataaagatgaacaaggcaaaaaccacagcatacaatcggctcactgtgaggaagtcattgagtaatttgtagatcggagtgcggtgttgacaggcattgtaatgtacaggatgattgaggaccagagcccagagatggtactgagttctacctagagtagggtagggagtctgaggtagggatagagaggctcagggaggcttcccaagggaggcagtgcctgaatgggacatttcttatttggttgtataatatatcagcaatacctttatctaaaaataaattcctgggtggtgaataataggtttcttacctttcttttagccttctgatttttaaaataaacttaattgcagtataatttatatataataaattgcatccacttagtacagtatgtttgatgaattttgacagctgtgtacacccgtgaagctatcacagtcatcaagacacagaacatttccttctccctgagaagtttccttgtgtcccttttgcaatccattcctccctccacctctggcaaaggcagtcactgatctgctttttttttttttttttttttttggagacggagtctcgctctgtcgcccaggtcggactgcggactgcagtggcgcaatctcggctcactgcaagctccgcttcccgggttcacgccattctcctgcctcagcctcccgagtagctgggactacaggcgcccgccaccgcgcccggctaattttttgtatttttagtagagacggggtttcaccttgttagccaggatggtctcgatctcctgacctcatgatccacccgcctcggcctcccaaagtgctgggattacaggcgtgagccaccgcgcccggcctgatctgcttttttcaagctatggatcagcttgaattttatagacttttatatgtattcatttgtgtccatcttctttcactcagctattttgagatctattttgttgcattccctttgattaaagaggaatatggatataccacattttgtttacttacctgatgatggacatttggggattttttttcagtttttactgttatgaataatgctgctatgaacattcatgtatagtctttaagtggtctatattttgatttctctttgaaaaatttctagttgtacaatggctgggttaggtggtaggtgtgtgtttaactttttaaggagttttgcaaagtggattttccattttacagtcccaccagcagtgtatgagaattctagttcctctacattcttgttaatacttggtatcgtcaatctttttaattttagccatttaaataggtgtgtagtggtatcttattatagttttaactttcatttctctgattagtgacattgaacctttctcatgtgtttcttagccatgtatgtcttctgttcagatcttgtttcagtattttactggattgtcttatttctgagttacataaattctttatataatctgaatgtaagtcctttgccagatacatatggataataaatatttttctcactctgtggcttgcattttggtttcttaatggtatcttttaaagaacaaaagttttaaatcttgataaaaaatttaaagtatctttttatgatttgtattttcttgtatactatttaagaaatctttacctatctctaggttgcgaagattttcttcgtttttttcctatgttttcttctgagggtttttttttttaaatcattttagcctttacatttaggtctatggatattttaagtactttttgtgcagtggtgtaaggcaaaggtcagtgtttttttgtttccttccagatacacacttgtgccaaccccatttgttagaagatctgaacatttgtaataagttttattgtcataataaaagaaacactttttcgtgggcttggggggatgcaaaaaataaactcagaggtagtctcctacctaagcaatacatgtattaacattttgttctttcttccaagcactttctccaagtttacatgtgtgtttttaattataccatagactcggctttgtatcctagtctatctaactataggtaacatttctccaaatgtttcagattttcaactaaaccacacctatttcactctgtgtgtttgtttgtctgaatcactgacaaaacacatttacatagtttaagttttagttcaattctctgccttttcttttaagtcttttgctcaaatgatggtgagtcattacagcacagcttctgtttcaaatattagtggatcttattaaaggaactctttccccctcattatgaaggtaatatatgttcatcagaggaaatttgaaaatgcagaaagttataaagaagaaaatgattacccatcggaccatcactcaggaatgagcataattaacattttggcatatttccttccatttcttttactttgcatatattttttattgttcccattatactatatgtgcagttttgtgccatgctgtttacacttaagattgcatcttatggttatttttcttaggatgattgtatcttgtggtaatttttacacttaggattgcatcttgtggttattttactgtagtttatttaagtgtcttcctatcactggagacttaatttggttccagattttcgccaccataaacaatgacctaaaaactggtcttatacagataactgtcagatttctaattatttcacatcatagatcattgatgttgaattattaggtcaatgggtaggtataaccctcttaaaaatttggaaacattgccaaacaactctctcaaaagctagtatcaatgtatactcttgatggcagtgaagaaagctctaatagactgaattattgctatcatttggtttcctcttatcattttgtaatctttgctaatttaaattggtagattagaaagtagtgattgaattttgtattttgcatctttgcagagccaaatctcaaaatacccaggtggacaaagtgagggagggcacagaaagaccttttggtagttacagggtttccacgcccaataaaataactcactcttatataaaaagacattgatttttctatttttactctaaaagaattcacaccatgtcccaaaatgttcattagtcgtaacaaagcaagcctaaggctttcccttgaaatgaaaatgtttattataatagcaaagaaagaaattaggttattctgaacgtatttgttcttagtgattacctgctgaagtccagtggtgattattttctttttcgagtaactctcaaattatccctttataatgaaatgctgaggagcagcctcttcctacaagtctctctgtctcttctcctttctcaacctctctctggaaagacttggagcatgcgcctaccctcacccttgctctatcattaagctctaggaatcctgttgctacgtttccttactggcttttagaaagcagaagcaggtatctgagtgaagcccttgacttctgagcatgcaatgggtgctgctcctctgaacctcatccagccagagatatctagacaagtctgaagctctgtgttgccttcgacctttaaaatctctactcctgaacctattgtctaattatatggataaacatttttaatcttacccaaaaacagtaagctcatttctagagagagcttacaagagcggttgaactgctatccttttctcatccctagagccagaatgaagataaattaggtttatgtgatgccaggcagcagtcagtaatgtggcacctgttttcctccaaaggcacatcatgacatgtttctgactctgatggagtccttgtagtatatcctcccaaaggttaaaaatgaatagagtgattgggggtcaggagcccactgccttagccttcttcaccagctttctcatctttcaaccatggccagcaagttttttttttttccctgtatggactcacagtactgtggttttggtattggcgcccacgctgatttgggctaatcccagagaaaaatatattgagttatgcatttttctttggtaaatctggccatgtctgacttaatgtaagaaatctgcaaagtaacattgaaattcctcagtcattcctctcccctccatctttgacagactcacgtattcgctgtgttatacatttatttacccgttaattttaggaaatgtgaaggctgggaagtcttggttctcttactgcttgctttatagtataagtgtctcctttgtgcttacaatgtgttatgttcgaggagagggtgctgaagaaggagagtggcagggtgtgatggcgtagggattttgtaggtaaagaaagaggcattcatgatttcaacagctgagatgagaattatcttaaggacagcacattagacacctttttgctcaccttatcctgctcacccacaaagtttccttccagctctgaatgccatgattgatcataaccttactgagcacagtcagtatggtactttgtttctacgtggtttctcttttggagtcctaacacattgccttgtgctaagtatttgccctgtatgtatctgagccgaacggtttttcttctttcatttttaactcacccatcagtgtaacatgtcttacttcctagatggacttgatcacgtctacctaattaaatgtcctgttagacattctgccgaagtttaaaaaggtacagtttgtatatatttttacttatgttatttttgttagagaaagggaaggaaaaactaaaataagataaaattctttgatttgcttttaataactaccctttgggatattttagaattgaagtagtagctatatatttgtttttaattattattctaaaattgaaaggaacttgtaagcaagcatgttggtgatgacgtgtcaggtgctgaagtgaaattgaatcatcttttatgtcccaagcaaagcaagagcaccatcacaaacatccttatttccatcttttaaaacccctcaaaggcagaaatcttttttcattcataaccagtcaaaagcatgaacaacccttctggatacaggaggttcccaggccaacctcaaatcattaacgaccaactttgatattggttccaagtctttcaaatacatggcggtttggcagtcagatacaagctctatttttgtaaaaagccttttcacttctctgttcaggtcatttttaaatgttttattaatgaccacatcaacaggctgaaggaggtcactattgctgagatgcagataaaaatgagtattatggtttttttctcccagttggctcagtgggaaatcctattagtgctctaagaagttatataattagcatggcacccgctgctcgtttgttgagccaaactggtttttaatgttcagaatacaaaacatggcagggccatcttcataatgctctgtgctgtcactggttgccaggagcgtttctgcgtgaccgatccataataacagcaatgatgagagccacaattaaatagcaccctgtgtttggagcactggtccttcaggtatcccttagtccagtgagttcctgaatgctggagagtgtgtaacatcagtgccatgtgtgctctgtcttctggtgcagaggaagagagttaccagcaatggtggccagccactggcaaaatgggtgcttttcttccatcccttttttcgtcagagacttcctctgatttgacaggatcacacactttaagcatgtttcagtcttctatatcttctaacttcacatgaacttggctctttgatttcaccaaacaaagccattactttaaatttatttataagggcaacaattattagctggattatcagaaaacttctcagattctcatgggcttgtttcactccctgacaattatcaaggtaagtcaatcccagtctctttgtttcaaaccccaagccagagtgtcagtctccacctccacatggtcagggcctgtttactcaagcaatgctgggccgcttgaggacatgcaggggcctgcctcccccaaatcttgttatgtatgttgggttcattgttagcagctgctgtaggactcagtggaggatttgatacctacactcttgtttaggataggtgaagggatgagacagaaaagatctcagggcagggactaagattggacttgtaaaacacaacacctaaagattatacatattgctgttgatgttttttcactaatactgagtgcttgcagaaggcactgtccatgccttctcctcatagttatgccatgaagtagttcgtgtcactaccttattttatagatgaagagagaaagacttggaaagttaagtaaattgccccaaggtctcatagctcgtcagtgttacaatccgtatttaaactccagaatgttatctccagaaaccaaggtaggacaggctgagtcggcctaagcaaccaagtactttgtgctctcctttgactcctcttgatgaaaggataggaaaggagtcagaaaagaggctgttacaaggagttatgctcccctgccttctctgttcaaataaaataagtgtattgtacacttcagaacagcctgaaactcagtgcacaggtggctcaggaacagcgttttagagccataaatgtaaagcttttgtagccatccagagctctgctacatataccaaggccagagtaggccacagcttctatatattgagtcttgtctgagctgaacccaccatcccaaatgttgactgttggctcactgctcaggaggaatagtttcgtagccggaagtctcttcaatggaacagagccctttacctttcttagattttgtcctaatgcgatatttcctctattgagcatagctctgacctgcaaagcacctcaaatgctctcagcccagaaactcttttttttttttctttttgctggtgttacttgagtgtttattaagggttaaggttgctgacttccgtacctagaaatgttgtcaagtatacttacatttaatatactgccatgcatcaggtaaggacgactattgtatcccttgattcagttcaacttcatgaatatttattgggaatgtacttatgttggcagacctgtgccaggttctttaggggagagagactacccaacatcttagctcctctgacccatctcttgaattctgtgtatttgccaaaaaggcttataactgttaacctttaccatccttttatttttcaaatgaacattcagcaactcgacttcttcttaaaccaagtaattttcttaaattaaagttgacagagaatcaatggttattttattttgcctcagacatagaggaaagctctcctatatgttacccatcggggaaagggccctcttatcttttccttcagagcttctttcctctctccagtcgcaggggcactgttttttaggtttttgttttgctttgtttttttgtacctcctttctgaaaagcacgtctgtcactttactgtgaagaggcaaatagcaggttgtttgcaggatgcactgtatatacacttctgaagagtgagaacttgtctttgtccagcctgacatcctttattaaattttttctcaagaggtcaggaaagataagctagtcttaaaaacttgtcagaagtcaacggtttaggtaaaggacagtcattgaagaaaccattatgaaggaaattgttgggtgtatctttttcattagttattcttaggtatggaaaacacattacccccacagtcttgttaagtccttaacttggtggtacagttacacccctgggtgttgcttattcaacattctcaaagaacaagtttttcaaatcatccaaatgtgagttatggctctaatcatacagattccatgactcatacacaaaaatcagctttattatttgataatcacacggcatgtgtttaaacactgaggaaaatgttttgagcgtttgaaatacgattacatattataccagtctgcttttaagtcttgtccttggatatatccttcatggtggagttgacattgcaccattgaagactatatttcatgaataagcacaagggtttttctacttttggcaaacttcaggtgcttggaaatttccaattagggtggctggtatctatgccaagtgattgatttcattttatttactttatttggaaccgttgaagggatgatgtcttcccaaaccattgtaataatgagtggtataagttagtgttccagaggccgagaacaaatttagtttttaccaaagggacaaatgttgacttttaaatatttgtcagaatcagatagtatattagtttgctagggctgccttaacaaagaaccacaaactgggtcgcttaaacaataggagtttattttctcattgttctggcgcctagaagtctacgatgaagctgcccaaaggtttagcttctcctgaagtctctctctatggcttgtagaagaccttcttgctgttcttatgtgatctttcctctgtgcgggcacatgtctgtgtcctaatctcttcttataacgacacctgtcctgttggattagggcccaccctaatgatctcacttaactttaattacctctttgaagaccctgtccccaaatacggtcacattctgaggtactggctgttaggctttcaacatgaatctgaactgtgtgttcagcccataagaaatgagaagggaaaaggcttcatgtggtggccacttctcagggccactctgtgttaataagagttgtgtgggcagaacagcagtggggcttaagaaggggcatccctgggaagcagataaggctgagcttcagatttcccttctcttacttgagggaatcttcagatttaaaaagaaaatagattttgtaaaaaactgacctggaaacagtgtcaggtatttgtcgtctctttaaatactgtcatgcaaatcataccccttctggtacccttgcccttctgggagatgtcaccctaaaaggggctttccaagctctgctctcagctttcaggcacccactccgctcttctccagggcaggccagaggagtttcagtcctgtgagtgttagtcattggagaaccatgtaaccccaacctccaaaaacaagcagatgcattttttctttctttttgccttgagagaatctttggatttttggtttgtttagacattctgcatgaaaagtcctgtcctcatccggtctcctggcaagtgtgccctgatgtattctcgtgcatggatgtttccttctgatatacattaacaacctagcaaatgcctaggaacaatgttactttctgtgcaactatgtattttataaataatcatttgctgaagtaatttcagaaaagttgaacttgaggatttatagtggctctgcccaagggtcattcatcctagactgtaaatgcagttacttacaggccttttacctgaagtggatcaaaaggggaaatacttgctccatctcattcatcatcaaatttaattatcttgcagtaccacctgtggaaaagtcagggggattctgcttacatttctaccctggaggacactggcgttaacacttcttattaattagttcttcacagttttttcctttgatgagtgatcattttccttttaaatttgctaatctttaatataatttcccctggattcgattacacatatacattaatagtaaaattacaggaataggaaaattaaagtatgtttctatttctgtgatttcttggctaaagtttaaagaatgtattgtctgctcactttatattttttgtgatttatgctggttctctatggctaactcacttgattaatcacacacatctttaaaacttttaagcaaaaaaaattacttcttccctattctgaagcaacaaaattgggagattattattattattttgagacagagtctcgctctgtcacacaggctagagtgcagtggctggatttcggctcactgaaagctccgcctcccagattcatgccattctcctgcctcagccttccgagtagctggactaccggcgcccgccaccacacctggctaattttttgtattttttagtagagacggggtttcaccgtgttagccaggatggtctctatctcctgacctcgtgatccgcccacctcggcctcccaaagtgcttggattacaggcatgagccaccgcacccggcccaaaattgggagatttagctgagtacatgtccaaggtgttggccagacacagaacttcctttggaagttgccacatccagcaacccactctcttaggtgttagccaccagctttccaagagaggacataagccagtctcctgcatgttcatggcagaatgttacttctgcttcctacagatggtttagctaaggggaaagatctatgtctaatcagtacatagactttcagaccccttcaaatacccgtcggagaaagcagtcatgaaatcgccctttgtagcacttgacaagacacttttggggcctcaggaagaagtgtgtataggccatccatttctccaggttctttgagctccctctgttgaggtaaatcatcagtaaacaatgtgcttctgatgtattatttcagctcccagcagaaatgccatcactcaggcaagatttaatattgtgtcttcagcacctgggagaaaaaaactttcatcgtttgcaccatatggttgaagacatttatatgaaaaaggcttctgtcttttgtaacataagttgaagacattactcagtgtcccttataaagggtcttccataataaaattttccctgaaattaatgccaagataaacaaaatctgccttgcatgtttctcttttgatgaagttagaactatactatgcaacagtttcccttttctgccttagtttcaggcaagtaaagctaaatccggtgctcagttggagtaactgacatctcaagtatgtactaatgtctctttctgcattccttttaattaatgtctgttatttttaacaacaaaatgttcagttatatatttagtttaattttgaaactatttaacatccttcttgcaagaattaaaccaaataactagttggcaaaaaccataattgtccttaatagttagagtttgtaacagtttgtgccttaaagatataaacttctattgtcttaaaaatgcatttatctcagaatgtaccaatgtgtgcagctccacccacctcgccatatactgttcagtttgtataaatacacctactaagacatgatgtctgggtcccaaatggacacatattaggttcatgtcttatagatgcctttacattcctgttagaaaggacttagcgtgttggtttgggagcctcatgcatgggagagaggtatacatcacagagacaatgatgagtctgtgagttctctgcagtaaaacccaccacaccctaaacttaaaggcacaaataatgttaatgaaggctggtcctgtatcagttgattgaaaagaacagtgatctacagagatccttacatagtgagcatgattaacattttttcctgctacaaaaaagtgtgaactttgaccagactatcatgtttctgctcctacctgccattaacatgagtctggtatttatatgattactccttttcccctttgccccataggtgaaaataagttcaataaatatattcactagacatcctaaatgctgaaaaggactgcttgctacatgtgacattatagttccataatcttgacaggaagcagcacccttacacaatgacctgttctctcctgatttactatagctgggatgtaacacaagtgactttgtgctgtgtaggtgaaacattcttaaaattttatgtattcagctctgaagtaaatatgacaaaatattaccatttttaaaattctggatggtaggcacatgtgtattcattgtattactctttgcacattcctgtatgttgaaatgttttttataatttttgaaactattatgtaatagagaaaaaaaaagagtccaccatggttgtttaggttgaagagtgggtaaggttagggagaggaaacagccatgcccttcacctggcaggcatggagattttccagaggtttctgtcagagaaaatcaccttaacttagtttggattacttctagatgaaaactctttttcgtagctagggaagaagtctgttatttatatttctgcatgcgatttattcatgtgtcagccctggactgagtattagagatctctccatgaaaggctgacatgtgtgcactgctagtgtcggtgtcagctgtgtgaaatcctatgcagccagactgtttgctccctgcaggccgcaaacctaaaagggtccttcaggctgtcaggtagccagcgggaactgtcaagagtctcaagcctgaggttccagttgcagaagaacctgcagttaaccagtgtgtgaggccaaattctttaaaatatgttgagatatcttatttgaagaaaaccttgtgcgtatttgtgtatgtgtgtgctcatgcacacacgtgtgcatgtacgtgtgtgtacatacatgtgtatgtgtacatgcatgtatgtatatcacttagtctctgcttttgttgttgttaaagggaacagtgtgactttctgatctatctgacattggtttggggctgtgtgatgctgcatggcttgatgcagactagaattccagatgctactaactacattttctaggccaggggcatatttctgcacgtgtggaggtgcacgctgaaaggaattttcactttttagaagactcactgatccaaaagacacttttgcagtaagttaaatgtaagggcaagggtttggaggggaggggaaagtatgtggttcagctactattctcacagccttggagcatatggcccatggtggctggagatacacacatccaggagagcttcgatttcgggcaaggctgtgggccacagtgctgataggttcagcagtggttctcaacctttagagccacagatagagggcacaaactgtttcctttcccctaccttacccaccctccaacctcaacaaactcagtggttcttttttcctctagtatataatactttcaaaaattataaaaaacatttcaacatataggaatgtgcaaagtaataaatgcacatgtatctaccatctagaattttgtgtgtgtgtgtgtagagaccagatctcacggtgtgtcccaggctggtctcaaactcctgggttcaagtgatcttccctcctcagcttctcaaagtgctgagattacagacgtgagccactgggcctgacatagaatgtgttaaatggtaacattgtgtcatattgactacagagctgattatataaattttaatttctgccatcatatcaatcatggaagacactttcccatctatagtgcctctcactgcatgcagcaattcttaactgagtgcaggggtataactgggggaaaagtcttccttttagagattgcacctcccctcaccctgcctgcagtttgagagccatcagtctagaataaagagcagtggtctagaggtcctgagtcccaggttctgttgtcatttcttccgttaatggctcctggcacaaacctgacacatagtaggtgatcaataatgatttatggagaatggcatgaattaaccagctgtgttatcttagacaagccacttaatctccttggcttcagtttcttcacctaaagaatcagagaaatggattaggtgacctctaaggcctctttcagttgtaaaattatatgattctgtgattggacctttacctcggaggaagattaatttgacaggagtgtgaaggatggatcagagtgagagccaagagaggggaatacacctttctctgaattagttcaagatttccttcgctactagtattttttaagcacttacttacattgtttttccctgtagtttacataaactgaccatcattttctgcaaagatcggaaacttgttaatgactggaactatgactttttctccctatttctatgtgcctcaaaatatgaggcctaataatggcttatagcagtagcacagagttcatacagtgttttcacacagcttgttaaatctgcgagggaagcattatttcccctttttactgcagaggaaaccgaatgttggagaggtgaagtggcttactgaatgtcattgctggtaagtggattaactccaaattgggctcagctgaccagtcttcaattcccgaaggagtctccagttctgacgtgaagacactgccataggaaggccccgggatgagcagggatactgcttcagagcagccgtcagcttggccacaggaagctgcccctttcacttcgtggctcttttatttctggccttcatttgtaggttccttctgtgtatcctcatattgcctaatcttttcatgtctcattaagtacaacaattttccctgagggctgcacattcgtctgccaaggactattccctgaatagcagctccctcaaccttttacagccctttttcctgctgttgtatgtctttagccttagcaaaagccatgtatacgtgtgtatatgtgagtgcatgtgaaatactctttacttattcagtcatttcttctcatctgtggtagacgatggtggcctgaccttggtcagtagcagtgaagtttgagagaaacggatgatacgagaactcttacagaggtataacctacaggtcttgatagtgggccatcactatcatttactgccataaggagctaaggaagggaaatgtatctgagaggaaaagtgatacattccgttttggagatgctgtgccttttggtgtctttttggacattgcattgagagataccatataggtagttgataatgaattttcagctctggggcagtacctgagattgagttatggatttggaattaatcatcaagggagagaatgagaaggggaaatggtgagggatggaacattaacactgaagagacagccatacagaggtagaggagtgtttggggcacacagagaaagggcagctgggggactggaggagaccagaaggaggtggtattacagaagccagggagaggcactttataaaagccagacttgtaaactctgcattcattcatctgttcaacaaatactatctgtgtacccagtaggcgggtaagggatgtgcactggtgaagataatgggtaacattttttaaagttccagctttagttcagctctgttgttcagactgtgattttggatctattctttatcctttctaagcctcagtttccttgtctctaaaataatagaggataagagcagttcctgctttaagagttgctttgagtttggactgagataacatatgtaaaacatcaagcatgtcccagcagataggaaatgctgttgtcttagtccattcgtgctgatacaacaaaataccatagactgggtaattcgtaatgaccagcaatgtattggctcttggttctggaggctgggaagtctaaggttgggggctgcaccatcttaatgtcttcttgctgtgtcatgccatggcagaagtgcaaagagagggtgagagagagcaaaagattaaactcacagcctcaagcgcttttagaattggcattaatccatttgtgagggtggcgccctcatgacctaaacacctctcattaggccctacctcccaacacagtcacatcagggatgaagtttccagcacatcctttttgggggagacattcaaaccatagcagctgtgaattattatttccccctctcacagttgaggaaacaggttacagaaggccaaataagtagtttgtggttttgaactcagatccccatctgcatgggtcacattatctcctcatcctgccccaggcggcctcctcgtgtgaagcagaagtatctgcccagctcactgggagccacagtccatccatttcttctcctaagactgtggggatggactttggtttggtgcccagagtaggacaagaggcaagctgaactaaaaatgatgtcctgaccaattcctagcttagcctttttaaaaggcccccttcctactcctgatagcggggagatagtccaggaattgagtgtgtgggtatccctttgaaattccctggacactaacagctgcaccttcacctggaatttcgggtaaaagtaaggaagaagagggctgttgatgagaaatcttctgctgcttaggagcgagcagctgctcctgggtccctgggaaacactatccctggcactcttacagagacccttggtggtgttgccaacctcaaagctcggggaaatagttgcctttcatcttcatttgagagcatccctgcggtggagggtatacaatgccagtgacacttactgtttctgatgctctttgacaatgagtggtctttggatttctaccgctttaatcacatctgggtcttagagtgtgagtgccctcatactgctgctggcatgggctaagagacggtaatgtgaggctgaaggatgcaaatagttctgagctggcattttggctttggagccctccaggagcaataactctgtcagattgtcctgacacggtacattaagaggtgcagataaaagctacatcctgtaaaatatatacttcaatcgcacctgccttctgcacctccaccactgggaagggatgggtgtccgttcgtgttctgcattaccagcctcttagccagctgcctcgtttgattgttcgttgtgtcacttgaagatgaactgaaagaacaagaagaaaaacttaatgcacgccaatctgtatctctgaacttctcacgttaaatagacatagcaaaaaaaaaaaaaaaagtttgtcagcactgaacatcaattactaaacatttttttaaagtcaggctgggcatggtggctcacacctgtaatcccagcactttggaatcctgaggtagggggaatcacttgagtccagagttcaacaccagcctcagcaacatagcaagacccttgtctctacaaaaaattaaaaaattagccaggtatgggggcacatgcccatagtttaagctgctcaggaggctgaggaaggaggattgcttgagcccgagagttcgaggctgcagtgagcaacaagtgtgccactgtactacctgggcaaccaagtgagaccttgtctctaaaagaatccaaaaaatgaaaaaaacgaatttcagttttataagtttatgaattgtattttcttttcgttaggtttctgtggctttatttttctttcccatgattaatttctcccatgccttcagtctgtgggtctgtgtatcatttatttgactctttttagtagatccttaaaaagaactttgaagtttaccatttcagaaaacttcatccccagaaatcggtttattactatcagcagaagttatattttatatttgccctcactaatgaatggtaatagactgaatctggcccacacattagtgtgaacattttaaaattagtatcaacaattaaaactatggaatgtcatataaaatttcaaatttcttttttctctgacaaatctgaatattgagcaacattgagtccaatcctgtctggccataacctgcaggcactgaatagtggttgtcccctttagatggggaagaagctttccagctggcacagtccccacatctccctggttattaatacattctgatttattcaaagttcctgcaatagtgcttacaaatggtgggtaagagcataaatgggtgcaacttaaatgaaggggaatttcataatgtgtgtcaaattacaaatgcatatatcctttgaccaaagaattcacctctagacatttatttttatacttgtatttatgcaaaatgacctaagaataaggttacttattgaagcactgtttacaatagtgaaagattggaaacagtctgttcatagaatgggaactggtgaaaaaaggctgtagcatcccagagaaaactatgtagttataaagaaaagaatgagaaaactctctacaaactaacatggagaaattccaagatggtattatgttaaaagagaggcaagatacagaacagtggatatactatgctatcatctgtattcaatatatatgtatatttgctggtacatgcataaaacatctcaagaagtatgcaccaaattcataaaacactgattgcccctggaagggcaaccaggtagttgggtgacaggagtgagagggccaattttcacagaatatttaatgccctattgtaccttttaatttttaagccatatgattgtatcacctacttaaaaaaaaaaaaaaatgtcctttctgagttctgtatgtatttgcattttcagtgcaatgagctataagaggctgtaccttaccaaatttaagagtttttattttaagattaaaaggatttttaataaaaattatcaaaggcagccgagtgttgaaactgttactctcaagtttttatcatttcctctataaagttgctcagacttagtttctggccttaaatcatacctattttcagcttccctgaaatcaagagtgtcctgtgccatatcaattaaagtaaatgtactttcaattaaaggtgttaagtatgagtctgaaaagattaattctttataaaaagatgaccttcagtagttcgctccaattaggcatttttccaactatatttcatcttgatgggacaagtctactactcacaatcaatcactgtgatcttttcaaaggcgagtattttaggttcagagtcataaaaagaatgacttgactacgcagcctccataacttgaaccacagttgatataggcagagattatgggtgttggatattactttttgtgttattaatatttgaagcatcaggatatgcatagtgatattctgggtacagttcttacacctctcttctcatgaccttactagaataaatatatttaaataagactgatggaaaggaagagaggaaatgaacaatgacacaaattaatgtccaaccaaattcctcatttttttcctgtcattttattattaaacacattataaatacttgctttcctcatggttgttttgttattggactactttagtttgaagtgaatcattgctcatatacagcacataaaaccaagactattaaggaaatgaatgcttggtgattgttttatgagaacatgcaaaatcttggggaataacattgctttctcttaaaagttaaaggaattgagcatttctgtttgtatttggtaccttcagtatggaattattggccttcactctgccattcattaaatttgtaaacttggagaagccattgaacacagtcatggaaaaaatggaaaacaaataatacctctttgcatatctcaaaggttaattattggaattaaatgagattatatatgatatataataaatgattatatatgatacataatctcatttaattatatataatatatacatatatgtgtatattatgtgtacatgcatatgtatgtatgtgtatacatttatatattagtgttacttaaaatgtagtccagtgaccctgggagtctttgagaccctttcagggagcccatgaggtcaaaactatttttataatagtagcaagaaattacttgcctttttcactctttcacacatattcagtggaatttttaaattcctgtgtctgtaacattcaacattgcaacagcttgcagaaacaattgtaagattcgagctgtcctaagcctgatattacagaggtttacaaaactgtgaagcagtggactctttttcactgaattgttttcattttgaaaaggaaagtaatttttcatataaaatttatattgacatataatggggttgtcattttcaaattaataaatttttttaaattgtcaattttaatttctaatatagtaaactttgatagatatagtccacataaacaaaatctctttaggggtcctcactactttttaagaacataaaagtgtcctaagaccaaaaagtttgagaactgctaatatatatgaaagcactatgtaaatgtgcagtggtgacgttggtagtttattaagaaactttgccaggcgcagtggcttacacctgtaatcccaacactttgggaggctgaggcaggctgatcacttgaggtcaggagttcaagaccagcctggccaacatggtgaaaccctgtctctactaaaaatacaaaaaattagctgggcgtggtagcacactcctgtagtctcagctgctcgggaggctgaggcaggaaaattgctagaacccgggaggcagaggttgcagtgagccaagatcttgccactgcattccagcctgggagacaggcaacagagcaagactccatctcaaaaaaataaataaataaatataaagaaagtttaagctatttaaacagtgcagcacacaaaccatcctcccactgcaggcactgttgtgaatggtacactccacctccagggcagggttctttagtctggggtccaacatgatttctaaatcctctgtagttacctacaattttgtgcataagttatgtgcggtaatccctccatatcttcgcaagggtacgtttcaaaaccactgtgaataactgaagccaaagatagtactgaaccatctatgcagtatgtttttccctatatatacgtacttatgataaagcttaatttataaattaggcacagtgagaggttaacaacaagaactaataataaaatagaacaattacaacaatataatggcataaaggatatgtgaatgtggtctctctctctcagaatattttattatactgacatgggtaaccgaaaccatgaaatgtgaaatcacggataaagggggactgctgtatctactttcttttagggtgaggatccacaattttcacagttttcagatttccacaggtcctaaaagaagcacagttataggaactgcggcagtccctggtcccattttagccctgaggggagtagtgataaaagtcaaggttggggaaacctgaagggagatacaaagttcaaggtccaaggctctcatatctcggtgtgggcttggacatgtcttgaggtattggccctttacttctccctgttttgtttatggaaaggtgtgagacttgggctggctttctagacactgaggaaaagggcattctttcagcaagtgccatgccctgtgtatccttgtgggcctccttgctcttagtgtggttggatgtggtaggacataaagaaccaaaatcaggctgtggaccaaaaagggcccagagaccagcttcattgtggtttgggcacagttcacagagaccaggaggttttacacagagctttacagtgcgaatgctcagtttcccagctcctcaggaggatgttcagggatgggtattcaggccatctctgactctgtcttagacattttcagaggctcagctaatactagttcatgtttcctactgcaatttctttctttctttctttctttctttctttctttctttctttctttctttctttctttcttttctttcttttctttcttttctttcttttctttcttttcttaaaaatgagatgaactcttgctctgccacccaagctgtaatgcagtggtgtgattttggctaactgcaatacctgccgggttccagttctcctgcctcagcctcctgagtagctgggattacagggatgggccaccactcccgggtaattcttgtatttttagtagagatggggtttcaccatgttggctaggctggtctcgaactcctaacctcaagtgatccacctgcctcagcctctcaaagttctgggattacaggcgtgagccactgtgcctggcttctactgcgatttcttaagatgtttttattaaccttaattctagcatctgttgatacttataatattttagtgttcttacaagaagttgaaactattctaattatagctcactgccccttattatcatttcttaaaattaatttgaatggaaaacttgtgtctcagatatttatgtatttaatatctccccagtgccatttaatttttaaattgcatatacatgtatatttttcagttttgtgtaagcctttacatttacttaaagttttatatattcatggggcaaaatgttgcaaaattgcccactgaatatataaaacttttaaatttagataaaattttaaactaccaaatgcatacctttctcttggtgttgtgctacatgatttaatgtgtagtgcttcttgaattctgtcactgagaccgtcttccctgtttgtttcacttttaaaaatgatttaataaaatagtatttttcaagaaaaaaaatggataccatttattttagactaaaggcttctgaaatttttaataaaattatattggccaggtgtggtggctcatgcctgtaatcccagcactttgggaggccgaggctggggggatcacctgaggtcgggagtttgggaccagcctcaccaacatggagaaaccccatctctactaaaaatacaaaaaattagccggacatggtggcacatgcctgtaattccagctactcaggaggctgagacaggagaatagcttgaacctgggttgcagtgagatcacaccatcgcactccagcctggacaacaagagcgaaactctgtctcaaaaaaaaaaaaaaaaaaaaaaattaaggtttcctgtttagtgcagattttataaaatgaacattttgtttttggaattttgtgatataagcatgtttatataaggtaaattcaatcaaattaaagaaatctcttcattattactgttataactatcttttccagttaacaaaatacttggaggtaacctcaaactgtaaaatgttatccacatgttagtagcatcttgtgaaaatctgaatacatgtagttcgactaaactctgcttccctagactttaatgtattatatgttatgtatttcagaaactccagaaaggaacttaatgacatacgatttgagtttactccaggaagaggtaagttttaattgaagttattattttattgcctcaaagagcattgcagaaattgattacaagcatgtggttataatctgctatttaaaactgctttgtttaatagtgaaggaaggaaggagagatagacagaaggaaggacttttgatacttctaaggattccaaaccaaaccacagctgactacatgaatctcagtgacacatgcggcacagtatacataccaatataagttagatatattagctcaaccatgaaaataagtattgctatggtaatgcaggccctaaaggaaatgatggtgaatgtgatgagaagcataccacagtcctaatgagggttgagcagcagtgggatcatacagaaaggtaacatactttgcttctgtgatctcagctcagattacgtgaagtctctattggggagtgtttactaaaattttgaaaactctgaagtacaagaactttctagcttgatagctggtccatcagtaaaccctttgaccccctctgcggttattacctgcaggaagacacaaactcagatgtccacagaagccaaagtgaatggtgagcacttcaggaaactggaggatttcctatcttatttcacccatgttcagtagtgttgttttttttttttttttttttttttgaacaaaggccaccagccaaacaaaatattcctgggcaatacttggccataggcttattggtccctgaatgctagtcttctgtaaatgcaaagatttcaggattcctggtatatttgaattaaactaaaatatgaagtatcttttaaaaataaatgtacaggccaggcacagtggctcacacctgtaatcccagcactttgagaggctgaggtgggtggatcacttgaggctaggagtgtgagatcagcctggccaacatggtgaaaccccatatctactaaaaatacaaaaactagccgggtgtggtggtgcacagctgtagtcccagctacttgggaggctgaggcaagagaatcacttgaacctgggaggcagagagtgcattgagtcaagattgtgccactgcgatccagcctgggtgacagagcgagactttgtctgaataaataaatggacataaagccctgatggatttgctaattgatctttctttctggaggtatccatctttgacaatttagagttggtttatgaagttgtacagcaccagctagtgttgtcaaaaagctatctattttgtcataatataaaaatattgaccaggccatgctgtgataaaatctagtaattatgtaataaatgcttcaattacagcaagtagaaagaacagattcttattttaagattgtttcttttcatctgattgtttaaaattgactatggcaatgaaaatcaattttaattttaagaggtaacaaagaagtgaatatgagctcaggacttttgtgggtaacatggccctgtcagcattactggaccatgggcactggctttggcagccgcttttgccgcatttagattaacagtccctgcttctgttgcacagacagaacccatggcattgtctgcctaatgacagccggccttcactgggtggcagagcacaggcccattgttaaaggaagtgatgtgcatatatcactgcacctctgtgactattgatgctgtctgtattctagactttgcttacagtaaatctgtgtgcagttcacatgcattatgcttgtgctgtatatacatgtgaataaatatatatggcacaaaatgtataacgtaaaatattctctttcctcacttgaggacaagccctttgtgtttagtgtgccccatgtgctctggaaaccagaaattaatacatgaatatttatcctgtttaggcaccagggatgttaaacagcttaaagaaaaatagattactaatgaaacatgaaataagttatttcacacttctgttctaaactattactagtatcttacttacatgcatacaaaataattgcctaatggcacgcacgcagatatggaatatttcccatttggatcagccagcggtacctgtttgccattttggtatgactcatctggtgcccaggagtcctgaaaacagaaggacatgctgtatgctttaatcatttgggaatgtcaatcattttggtactgttttagtgctatccctcagtgcagctttgattatttcatttttggctacattctgtgattatagctccttacttaagtgtaagatcttactgatactttagaagtgatgggtaacacatccagatgcttcagcagatgaccaatcagtagaaagataatgaatgactacctgctatctgctcagtgcctactaggtgttaggctctttaattcagttcacttatttccctaaagatttgggtaacatccaggaagatgccagttatgagactgaatgttctagcagcttcagaaagctaaatcatgttcagagtagagcctcttattatgctaccccaacttccattattatgggatcattttatcatgaagagactttataaggtgttttttttttatttttttcttttcttttttaaaaaatagacagggtttcactctgtcaccctgactggagttcactgcagcctcgacctcccaggctcaagtgatccttccacccagcctcccaagtagctgggaccagaggtacatgccaccaggcccagctaattttttacgctttgtagagatggcgtctccctatgttgcccagactggtctgtaactcctgggctcaagcagtcatcttgccttggcctcctaaagtgctggaattacagatatgagccattgcactgggccaaggtgttttttgtactgctggcaaaaagggcaaagcctaagacaagctcatcttacatggaactttatagtttagtaagattcctatatatttatttgccatttacttcattttattccattttattatgacttcattatgaaatggaatcagtaaaatggcagaataccacagtttctctggaagtataaagtgtaaggtgtgtttcaaatgatctttggctgctgcatcatcatcatagttaccatttattgagtatttactatgtgtcagacactgggcaagctctttaaacctcaagaattgtgaaacagaaatgtacctccagctgcacactcacatgtatatgcacatatgcaaacacatacacacacacacacacacacacacacacacacacacacacaccagcccacttacatagtcaccacatctgaagcacagatgaaataaggaaatgcaaacacatacacacacacacacacacagtttatggttagggcagcttttggtgtcacaaaccgcaatttcgtttagatgctcatttgatttagcagctgtactttcaggtgccccctgactttggaagacatttctgtcaaacccccgtctagagtgttacagcctgctgagccagtttcttcttatcaagctacaattctaaatatttgtgagaatatctgaagtccctggggaccaagtcagctctcttgaaccgagtcagctcccttgtaaaaacgtgggggcttataacagttcttctgagcaacttgcaatttatcaatttccctttacaaagccttcagatagaagattagtgtgatcatgttcattcgtaacctttcaattaagtaattccagctgtattcacttgccgcagcctctttagtcccatccttatgagattgcgaactcctgtcacttatcattgagaaagtacggtattttattcaaccacatttttctaagacaatgtatctgttgctatcaaatgatcagtgtcatgttaaaggagtttcttaatagcatacatttaaattgctcatcttaatagtccaacaagctcataggctgtttgtacaaaatacaaggttatatcagatgctacccattcaacctttgctgtaattcactccatagctactaatgataaaaaaggattgatgatggtaggtgggattaaccttggcaggaaagaaaagcagtgtcatagggaacagttataacttctggaggtgcatttgaagattaattcagatagtagccagagggcacaagttttttagttcgccaaaaatagaaaaaataattttgcataacttctgttgaataaatagcaagatgcaaatggcacgtggcaaaatgtatttcatgttgcttctgattttctcctgatagagtctgaattgttgaattaaaactcatgggcgattttagtaaatgaaaaatatatattttacattgtactgggttgttgatttttatgttatggttactaatacatattcatttcacatttggacagatacagcagatggtgtatctcaggagctcttctctgctggcttggtggatggtcacgatgtagttataggtaaattgttttttagtatgcactgtcattttgttggtatataaaatggaaatgtgtttggaagcaaaagtgttcattaaggaataattcactctgaatatttgaagaattcttcttgaattcttatcttttatgtagaagtatatttaagaatcatatttggacgggcgccatgactcatgcctataatcccagcactttgggaggccaaggtgggtggaccacctgaggtcaggagttagaggccagcatggcctatttggtgaaaccctgcctctactaaaaatacaaaattaaccaggcatgggtggtgtacgcccgtaatctcaactactcgagaagctgaggcaggagaatcgcttgaacctgggaggctgaggttgcagtgagccgagatcacgccattgcacaacaaaagtgaaactacggctcaaaaaaaaaaaatcatatttaattttctttttttcaaaagctcttaatgtaatcctgtctcatatatctggacatgatttatccaatgaggagcctcatttattggaaatataacaaagaacttagaagacccaaaagtccatgatgtaacaaaaataagatgctatcaattctgtgcactaaagcatgggaacctctgagacccttactcagagtttctatattctctttttggacacagttctaataaacttagaattcgttttttcagccctcagcaatattcattataaaatctcaggtttggatgggaacttaaagatcattcaggccggttctttcactgtatagataaggaaatgaattccttaagaggttcagtggtgtgtctagaaccatgcagctgggttgtggcagaagaatttcactttgaaactgtgggtctttctacctcctttagaatcataagatagctgcacggagataggggagcctgctcaacataggcctgctgatgggagcaagcaaccacccatagacctcctgacaaagcaaaggaggcagaaaagctctaagaggcagacatagccatctgagaaaatgtgtagcctggttccacctagggtgaggatgaatagctccatgctcttcagcaaattctgactttatagagattttatgatgtattactgtataatcataataaccctaactaatcaagattagttagcatattcataattatgttaattattaattatattaactctaataatgtattacttaggggaatatatattatgataatgccttattaaaatattcaaatcaaaactgatttttgaaatgacatgctccccttaaatgatatggtttatgtttggttttggttttgttttttttgagacagggtctcactctgtcacccaggctggagtgcagtggtgtaatctcggcccactgcaacctccgcctcccgtgtccaagcaattctcgtgcctcagcctcccaaatagcttgggactacagacgcatgccaccgtgcctggctaatttttgtatttttagtagagacagggttttgccatgttggccaggctggtttcgaactcctgacctcaagtgatccgcctgccttggcctcccagagtgctgggattacaggcgtgagccaccactcccagccccttaaatgatatgttttaatttaaaaaataacttattcaaaataagtccttccccaataatgctagagtatatgactgagagggagtttaaggtagatacacacacctatcagaataatttgttcctagtaactttggaatgtaaatcattacaaagtgaattattttatgtaaataagagtaattgagtttatagtgggagattagaattctgactaaagacataatatccagtatgttatttacatacaaatgatatatcataaatgcagatacaaagatacctttataattagaaaaaaacagattttttcctactgattatacattaactctacacattgatttcacaatgaagctccaactcctttgccaagtggctccatacatgaggggacacagacatattttaaaggaaagtgacttaacgtgcatttatgtggagtgagttgtattcccttatatatcttgtctttcacattttcctttacaatcttgtgagatttaaggccagctaagttctcgcctaaattttctaatcaaatgtgagagggaagctgagaaaaaagattgattcaactttggggtctactttaaattctgtctaagaattcattatgttcacctaccaattaccaattccttgatgaagatgaacactctccttcattagaaaacataagtatacacttttgtgtcttagtttaccagaagaaatagaacagttaattaatggctagatcaggagaccctgcaaaccttgaagagagctatggtccatatgctaagcatccagaatagaaaattaatcagcaagtgaaaataataatcaaaaacttctttgaaacacctactaatgtctcctattgggcaagaagccaaggatcagattgttcttttattggagttgatcctggcaggtggctaggaacacagaaaataagagagcttgacggaaaggcattaggtcacatcttcttttaagcatagtccttgcttcagacctacagtcaagtttaatgcacttctttttttgccccaggctcagctaaagttaggaaggttttattgttgttgttgttgaatttttaaaaggaggaaattaaggcagacttcatgtacaacttattgagtgtattttaaatacaatatataaccataaagcttttctttttctatgctttagttaattattcttccaaaaactcttcagcttgccttttttccccttcttggagctaaattatttctatttagagagtgttggagtaagaacaggcatatctaactctttgatatagtagcacttaaaaatgccttacatggacatcacacttaagtgtctacagacaatgtttatgtatttcatttgatcatcacatcaattctataaggtaaagaggacaggttgttttaatcactatgttgtagactgaaaactgaggtccgaagaagtatctagactgttgcaactggtaatgttccttgcgcttgggtcttgttgactccccaatgttgacactttgcatataatttataccttcacccttaaaaagtggatccaggtaattttaaatgttggtggttcttgtgtcccctgggagaaaagtagcttttccttgtttgtttttccatggaccagtggatgttttctattttaattgctgattatttgacaaactaatgtatttgatcttgttccctctaaccaatcctagcaaatctctactccctccctcctcatctatttccctctttactagatatgtcccaccagcatatgaatatgtttttatttctcttatcttcagaaagccctgtctttaccccacctcccattacagctatttctgtccaaccccttaacagctaaacttatcaaagacaattgccctggctttgattcctttcttatcactgtctcttaaatccacctcagtcagacttttgaccttcctactccactcaaattgttcttttcaaagctgtacctggggaaaacacacctgcaaaaaggagtggcagatgcacaggtaggcgtggctggagtgaggggagaaagaaggaaggtaaaggacacgtggtctgtgaatggctgccatgttcctaaacctgaggctcatcctcagtccttatcatgcttgacctattggcagtattgggcgtagttgacaatgcccttctccatgataagctttttcacttggttttaagtctccaccctctcctagttctcccatcttactggtatttccttctcagtcttttttgttggttcctcctcatctctctaacctataaatcttgatgtgtccaaggaccctttccttagatctcttctctttctctacttgctgctttgctgatcttatcaggtttcgtggtattaaataccttccactctttaactcccaaatttatatctttgatccagacttttattttgaattccagacttatattcagctccccttttagcgtcttcacttggaaatgtaatagacatccaagatttaatccacagcttcaaaatccagcccctggtgtttcttcccagcctgcccctccaggaatcttagactcttcataggcatcatctccacctttccaggtgctcaggccaaaaccctgggcattgtccttgacttttctttctctcatacttcacatccaactcatctgaatgtgcccaggatcctgcctttgctcaccatctcacatcccatcacgtttcaagcccctctcaactcccagttgagttcttgtattcatccctttgctgccattccagcttctgtacttgcctcccttcagcctgtcctcatctcaacagccagagatccaggtaaagtaaatcagatgcaaaaggccacatatggtgtgattctttatatgaaatgtccagagtaggcaaatccatggagtcagaaagcagaagagtggttgccaggggctggcaatgaagggggcaggggagtgactactaagtatggggtttctttttggggtgatgaaaatgttctggaattagaagtagtaatggctgcacaaccttgtgactttactaaaaaccactgaatcgtgcattttaaaggggcaaactttataatatgtgacttttagttcgattttttaaaagtaagccagattgtgttcatagttcaatcaaaactctgcagtggttctccacccacaatcaccatggcttccagtcctctgcactgtgtcccctctcacttctcagatgtctcttctcctgctcttccccttgctcaccccaccccagccaccccggctgttgaacttgctcttcttccaggacactccttctttagggccatatatgcccaccccctggtgcttaaatattacctcacaaaatggtcttgagcagcctcattaaaatcgcacaccatccccaactctctaccctctttcttattttgttattctacctaatctctccccattcaatagcctgtatgtttcatttatttattttgtcagctatataggacttccccttgagcatcagttttttaaggccaggatttttaatctgttttgttaattgccacattcccagtgccccaaactgcatttcacatagtaggccctccataaacatttgttagagataaacaaatcccattttgatatatatagatatatcgtaacatttactttagaaacaaaggatactttgagatataggattctagtgttttaagaattttgctttcaagattgcaaaattcaaagtgtttgcaaatatgaaataagttcacctgaggaaagctgtgtaaagaaagagtccagtttatatagaggtttgaatgatttcttacatgtgtattttttctgcttctataatataaaatagctaacatttaaatagattaaaaatctgtttctttcccatcagcattttcttttgaattggagtaaatgcttacagcattgtgaaaggctgaaaaagcaatagcatatgttatggagcagtgaatgttatcagttttactagaatatggcaaacacaggttacaaaaagtcttcaatacctagcttcagggtagcctgcttttagtgtgccgaccttcgcgaatcagaatctggattgaagaagggccagtatagtgacatgaagtgattgctttcgagcagaagcagagcagtgcagaaatgaaatgtgctgtttgtagactgaaatcataaacccacttgacttgtgcttaaactcggcactaccttaggcaagaaacaggaaacatttttaggctttgtgtaaatagccgttgataagattggcaaggcctcgcgggtgggtgttggtttaaaaaagtttgcaagatgaaaaactagaggacatgcatgcataaatttgcttatcttgcctggctgggttggctgacaaatggaaagagaccaaatctgagtccctattctagttgtttcagaggattcccaaggatgagtgatagtgagacagcagagaaactccttgtttcctttgctttctggtgaaaaaacagccggcaagaaataagttttctctgcaatggaagcacgggggaaaaatgcaaaacacaaaattcatatgtacaaaagaaaacaaaaggtctaagttctctccagactttgtgatataaatttttgaggaattagtttagtaagttttagaacctcagctatagaagaaggaacaccagtgggtatgttaggctaagcagttatgtggcctgcttaccgactcctacaaagctgctgaacttcaatctgcacggctcaatacagaggccagggtttgactgtgtgtatacaccggaagagaagctgcttgacagatgcctttcagaaatgtgcccactgactgccctttgctgtgtttttataccacccttccctagctttgtagcaacatatgtctgtttcctttaagtggagtttagaaccagatgttggaatttctgtttcctgagaagggagctgggtgcctgcattcatttctgtagttttcctttgacggattttgagcctcactgactagttgtcactggaaggaaaacttactttagtgatagatgttcccaaagctctctcagtagacttttggactattgttcatgcccccatgagatgctcttttcctgcacatgaagaatcatgtttaaaacctgtctgcctgcaagacttaccatacatgtcaccatcatgaagcctcctctgctgcctgacaccccactccttgcacagtttggaggacagcttttccttgtctagaatgccagagaaccatgtttttaccacctcaagacgtatggctttcatcctgctgtactactgcgtgcttgtcttcctttgtgtggaggctgaaggcatctttagggcaacgcttgtcttctattttattgcatccctaccattgttgacacacataggcatttaataaataaatatgttggataaatgaatacattgtataccatatgcaaattctcactaatgattgatttttttttttttcagtactggattattgcatgaattgatgatttggataatgtaaatattgctgtatcttccaaaaaagaaatagtaattcactatgattgatttttttttttttcctctctgcgttttcccacgttccttgcctttctctcagaaatagaattgtcacatgacttttgagtctggtctcttgggaaaggaatatggtttgtctcaacagccttctggccaggaatggtagctcacacctgtaatcctagcactctgtgaggctgaggcaagtagatcacttgatgtcaggagtttgagaccagccaggccaacatggagaaactttgtctctactgaaaatacaaaaattagctgcatctggtagggcacacctgtaatcccagctactcaggaggctgaggcaggagaattgcttgaacctgggaggcagaggttgcagtgagctgagatcgcgccgctgcactccagcctgggcgacagagcgagactctgtctcaaaaaaaaaaaaaaaaaaaaaaaaagagggccttctgtcccctagtgcttgctaaggttaagtattctgagtgtctctcaaagtatgagctgtgagatgcctgtcttatctgggatgcttattaaaaatgcacgtttctgggttccagcccagaaatatagcatcagctgtcttttgggcatagagtgtggaaatttgtgttttcaacaggtatcccaagtgattctcatacacactggaatttcatagtcactttatcttttatattttaattttttttttttttttttgagatggagtctcactctgtcacccaggctagagtgcaatggtgcaatctcggctgactgcaagctccacctcccaggttcacaccattctcctgcctcagcctcccaagtagctgggactacaggcacccaccaccatgtcaggctaatttttttgtatttttagtagagacggggtttcgccctgttacccagaatggtctcgatctcctgacctcatgatccgcctgcctcggcctcccaaagtgctgggattacaggtgtgagccaacgcgcccagcccatagtcactttattttatgcttataataatctttggagatgccttcagctcatttcatcatctatacctttttcccagtctcactaatctcctttgcttttctgccttacttgattctctgctgtctttaggagtctgttttaaaactgtgccagttaacttttaaaaattgtgtttatgtgtatgaatggtgtagatgccacatatatggcattggtataaatttttaccaaaatgagtagttacagttttgattaaaactaacattgctgctcaggaggcagtggatcctccagatggccttcagcttttatttctctacaaaatggcaaagtacgcttaggctctcaagtatgggagcaacaaaatctctctgctcagtcatgagcatatggttagatgtgcgaagtgctctgttctttctgctacagtcagggatatttaagtctgttatgagtgatccacaatttactgagcagcagtacacttttacgatgaaagtcttggaaaacagtgaacatatttcatctcatattcatttcagtgattatgctgtgatattcactgatattgactttcagtgaagaaaagcattcattattaaaatagtgtctttattacacaactgtactatgattttgaaatggtgacagggaataaaggaagaaaactccttaagccctttctgggtttagacaggcttgtggttagttgaattatgtcaataaatacagctgagtgattcctgattaaaagttgtctatgtgttaagtttaataccttagggaattaggactataagtactttgggggtgctgtgctgattacttttcttatatatttttaccagaaataaatgttgacctgttagatatgacgtagggtttctgttttcaaaaaggcactgcagcctatttgattgtaactcattgctcctggtttcccaattatcttttctttctttaaaaaaaatctttactgaggtataatatttattccctaaatagaaaaattggacattaatattaaaagctggcaaaattatgttttaaatattcacaaatgataggctggactatctaatataaaagtatcatccgtgttgtaaaataattctaattccattcagatgaatgactaccatttctagatgaattaagatattcagcagttgggccaggcgtggtggctcaagcctgtaatcccagcactttgggagcccaaggcaggcggatcatgaggtcaggagttcaagaccagcctgaccaacatggtgaaaccccatcactactaaaaatacaaaaattagctggtggtgtgtgcctgtaatcccagctactcagggggctgaggcaggagaatcgtttcaacccaggaggcggaggttgcagtgagccaagattgtgccactgccctccagcctgggcgacagagcgagactccatctcaaaaaaataaaaataaataaataaagatattcagcaattgaactcttgagaggtggtagaatcacagtgttgctttaaacatccaaagagctgtttgctctgcagagtgctgggaaaccaggcccaaatgaatgtgcagtgagagcacacgtgcacacacacacgaacacaaacgtaagcacagacagagcacacagattcagcattagtttgatcacacacctaagggttacatatattttttgaagttatttaagaacaatttatttaagaaagacagactaaagtaaaatgcatagaattcttgctttgacagaatatcattttttaaatctgataaaagcacaagagagtgcccatactcctctgcgccaaactcagaggaattaagcggaggaaagaattcctagaaaaaaaagaattcctagaaaactaaatcagaagcttaagctgtgatgtccattcataggattgaatcctctgccagcccagccactccctgtgcttatctgtctgcagattctaacatagaatgaccagctctccagggaaatgttggtagacctgtcatttgtaaagaacttccgatttggggatggggaaaaggagtgtttgaaaaccacctttcaaaatgtgggcaaatgttatttccaagaagttctagcataaaataacatctgtaatttccccaaagacgttctcagtttctgtgtcacatgattatgactcattgcagcagtaaaccacactgtaagccctgattttctaattaactttgttactttgtatttagttaggagttgtatatcctctttaaaaccattagtacagagatagaatccaattaagacctgtacttaacttcacttgggtgaaacaagagcttgccagtggattagttgtagatatctactaagtcagtagagtcttgcttttttcaattactttagattgccttgttttaatttatgttaatctgtcctttaactccagaatcaaatatgcttgcagattacactcagtctcgccacactttctgatcagtccctacttaagacaaaaatatatttctagtggaagtaaagtaggcttactttggtgcaggaaacctagtctttgtgatgacttacatttttctaacattacaccctacttaagacaaaaattatttcaagtgtgtaggatttaaattaaatggctcttttgttgaacagtctacttgttaatagcctgacaggcaagtctcccagtcccagatgaaatctctctgctgtttttttacttcattggttaaaataaaagagaagtcactgcctcatgatttcttatataacaggtaataccgctccttgtttgctcaatcaaaaaaatttgaaagttaaggaagaaaactaaatccatatattttttattcattgtgggcttataatcactattttggctccatatctaattataatcttaaatttgatcctgcatcttatattaggttatcatttttttttttaaaaaaagaggactttcttgccaatcctaagaaagcctagttcttaatcttgcactacttaagtttagcatccaaaaggttgtgtaaaaatacatgtaccccagattcattttaaaacgagagatctggactggtcacctgccgatagatttagaaacttgtccttgtcatcaggtttatgctgtccccattgtatcatcaacgtttgtgcccaattttgttcctttgttgttgttttttttttttttttgatgtgtttccaaattgatacatcatagttgcacatatttgggggatacatgtgatattttccaattttgttcttgggctaatgtttttcagaatcacccactatactgcataacccacggtaaccattccataaaagaaaattttcttgccagattctgtgtctgctgagctatagaaccagatagcaggaattcatagtcaggaaaccatctgaacagctttaggtgcaaacgcatgggcctggccagtgtacccttctgacacaagtaaagagggagctgtccattaaacttgagaaatggatttaatgccttaatctttatccttgtagaatttggtcagcgatgagaggtttgttactcaaaatcagaccatcagattcaaagcatcttttcagtaatacaccccttggagggctaatttattacagtttctgagactccttaccagtttgtgattgttgactggatttttagaaagtcacgttcatggctcatttcttcattggctgaatagatctggggtcaagatcgtgctgtcagagctctgcactttcttgtctttctgcgatatgtagggtcagaaggacaagaaaggacatctgaatttctcaaccactgccctgactttcctttcagggttgactatcaattcctcacatatccttctaactattttgcctctaattcttgtatttgttcatggtattgagtaataagatgagagtgacatacaaggggaactcagtgtctaatagaaaggtagaatacaggttagaggacatgatttggacagcattactccggggaagcataaaaatgctatcggttattctaatgggcttctcagcctcaggcactgtaggcttgctggagctctcaggatttcttttaaaaagaaaaagaaaagttggctcttttctttagtgctcatgaaaatttttattagacaaggaatgagtatgagaaattaatttttgatatttttttcatgatgaactttttatgtcagaaatatagaactctgcacttagaataactctgaacagtggctttaggtgttcaattagcaataattaaatgtaagtttaatcttataggcataatctgaaatatccatgcaattcacctgtttgcaggctaaatagtgattagccagtaataacacgtatttccctgggatattattgggagtccccaaagggatgtcccaggggtccttaaatgactttctcagtgctggttaccatgtggtggtctcactagctccctgcccaaaagactgcttgaagaagcctcacctgtatcaccagccagtatgaggacaccagtgcccacaaggggagtgctgcttccagaaggtcacagggcactacctatgtggggccagagtggtacctgcttccatgcagaagtagcgggaggagccttctaccactctttgtcatccaggcccttaagcaactgtacttcattcattcattcaataaataaagcaagcatctcgggccgggcgcagtggttcatgcctgtaatcccagcactttgggaggccgaggtgggtggatcatgaggtcaggaaatcgagaccatcctggctaacatggtgaaaccccatctctgctaaaaatacaaaaaaattagccgggcgtggtgtcaggcgcctgtagttccagctactcgggaggctgagtcaggagaatggcgtgaacccaggaggcagagcttgcaatgagccgagatagcaccactgcaccccagcctgggccacagagtgagactccatctcaaaaaagataaaaataaaataaaataaataaagcatctcatctactgtggtgctgagtacacctgattaacaaaacagggtccttgccctcaagaagcttgcagtccaactcgagaggcagaccttagacaagtcagtacacaggtgtcagtgaaattacaaattgtgagaagcattctgaaggaaaaatgatgtgctataaaaaaagacaataatgaaaaaacatggggtcttcatctaattcaagagcaggggaagcccctctgagggagacatttgagtgaagtcgtagataggcatgtgtagaaataatggattttgtaaaagctgaccagtatggccagaacaggcaaatgaggaggtgggattgggaataaggatggggagggggcaggggccagatcacaaaggaccttgtaaagagccattagccataatgacttgcgaaaactgaatcctagtgtttcaactcgattgggtccctttgtagttaaagtataaatcttgtgcctctctagcctttttcctctccaagagggcaaataaatgctttccttcagacgcgtttcattagactcctttgctgcctgaatttgattttcgtttgactgaggtgagtaggaaccacagatagacaagcaaatcatcctggaggacttgagaaataaaagctgagatgatgtcccagtgttctgggttcatttatgtgcaaaggacattgaaaagcgatttgtaatttaatgtttgggggccaggaggactgcagagataccttccagtaattctgaatccaattattttatcaaaaggaaattaggattcctagaaaaggcaaaacaaacaaacaaacaaacaaaaaacaccaacttaggcattaatcacgggcatcttctttatattaattggtaaccaaagggccttcacttcatgtacattcccaaaacagatgaaatatatttccatttcataatattgccttattctcacacaaattatggtgtgggctaaggtagcactacatacaaagtagaactattatcattataatagagtacagaatacgtaaaatattcatgttcattgggctaaagcaaacctgccatttcaagtccattaattgcagtcgaatttagtgaatattttttcagggactaacactctaattatctaaattaaagtgagcatttaagtggtttcatgttcagaatgcaggtgcagtaaagtaagttcttgtttagctaacctttgtccgggtgaaccggatagagggctggggcagtgttttcccacagtggtgctttctggagtgggagtgtttatgcattggtaaagccatctgatagttctggtcattcctttatttttttttaaccttccctttaattgggtttattctttatgtaatactttcttttaagggaaagagctttccaatcttttgaggagtagaggtaacaaaaacatagaatgacatagaaattattatacagcactgtatagcctccattaaataacatcccccacaattcgttaaattgctggtttcagattggttggttatggttgaattttagtaaaatcggtttttctgtgtctcatggcgtagaaattttcatacagcactgtagtcgccattaaataccatcccccacaattctttaaatcactgttttcagattggttggttatggatgaatgttagtaaaatcagtttttatgtgtctcttttgaggagctgtatgactctccatattgtatattactttttgttattagcttttaaaaatatccccatcttatttcttagacttttaggatctgaaactgctgtagagctatgtgatgtagggaaggaacacaggttttaaaatcagatggctgcaggttcaaatcagtgacccacttaactcatggaatggcagctctgtcagtgaagatatgtgacttggggaagttagttcatctctctaggccttcaatttcttccttaccctagagtgacccacttaactcatggaatggttatgagaattactggattacatgaaggggttagcaggatgcctggcctccaggaggcactcagtaaggggtagttcttccctctttcccttttgaaatcaattcacctggcctcctatcaaacatcaagcttcttttacaaaataccgtatcagtcagagaatataaagccaccctgcagtttccccaaatacagtgagacccagattcctggcagagaatggaggtagaaattgcacgtagggaagaatgactgaaccactgttgtcctacttatagtccacaagattcactgtgtttgcctctgccacctccacactagcagtgggaaaaccttctcctattacttctctggcacaaagagagctggaaagtagtgtaataacaacagaataaatacagacactcggaagggtgtaggcaactagataaatcattctaaccaaatagttcacttatagtgagcctggaggtaagtctagggttacctcctggtttagttttctgcgtgcttccagtaactgcaatgaccctctcttactgcctgggaggaccatccagcctcaaagtctagacctaagaggagagtccgagagagaaatgcaaatccccttgtcctcctcaggctcaccctttgctctgcagttccttagtcggtgatctacctctttgagttctagtttctttgccaaacacttacctctttctttgatacttgataacaagaatctccaccagtttcagggggagtctacactacctcaagtaaactcatacttctttcccatggaagagcagccatgcttataggcctcaagaagacaatccagacaggagacaatgcaataagccttctatttctacagaggactagccaaccaccatgaacttgacccaccgaattaggtgatgttctaaattccctgtgtagaatgtacccgtgatgcctggggggcgggctggacgctaagctatgagagatgacacattagtgcatcctccttcatagccccatggctgcccctgccaggtaggttctaggtttaacaaactcgtttgtacagacttcttcttataatggtgtcatttaataaactgataaaacatgagttcagaaagtgagttgtgtctgcaaaaaataaccaggatgctttagaaaatcttgataaaggcaaattattaaaaactgttgctaagttagatattggaaggatactgtgagaaaatagagacattttttaaatctaggattttttaaatgttcttggccctacatcacgagagtggatagtaaatttaaaagattaaatttaagctttatttgtatcacagttttatttttccctgcttaaactgcctgtatcttttacccaagcaaataccactcccacttcatcagataagagtatttcttctgtacatattaacaggaccagctacataatttgcagggcccagtgcaagatgaaaatacaaattcccttcttcaaaaattaagaatttcaatacggtgacagcagagcattaaagcccagcaccctctgagcctgggccccatgtgtctgcatgggctgcaggacatgaagctggcaccagcaacagacaaaagggctgggaaggagaggtagtttcacatgtcacccagctctctgacaatttctggtgccaaagagtttccccttgtaagagacacctgttcattgttgaattactgcttggaagggctttataccgagcctaaatccattctcctttaatttctgctctctgatgtagaacatacctaatcccaaagccacacttaatctcttcttcttaatgtacctttttgggtggcagtatagtttctaaaaccacctccatcttctctctcttgatactctctgttctttctgtatccttctgatgggcagtgctcacattcttaggtataaactccaaattcctgatgtggtatgggagtttgaaagcttggggactcctcatgaaaatactgtattggaattttggatacactgttttgttctgaacttaaagaaaatcacttaccctgtttaaaatattttaaatgttttggctgggcgcgggggctcacgcctgtaatcccagcactttgggaggccgaggcaggtgcatcacgaggtcaagagatcgagaccatcctagcccacatggtgaaaccccgtctctactaaaaatacaaaaattagctgggtgtggtgtcgtgtgcctgtagtcccagctactcagcaggctgaggcaggagaatcgcttgaacccgggaggcagaggttgcagtgagacaagattgcaccactgcactccagcctgggtgacagagcgagactctgtctcaaaaacaaaaaacaaaacaaaagaaaaatatatatataatatatatattttaaatgttttaatgatgaaatcaaatatatagaaaagtgtaaaatactgtagacttcatgtagtcatcattgagatttcattgttgcttaatacctctcccatcatctttgcaactcctcttaaaatatttttccatctggcttctacttacccaatttactgttattctgtatttatatagttgatttttgtgacctgaaggatttaactttgttggggcccatccagagtctctgtagctgtactggagacttctctccagggagccctaaaactaaaaccaactctttctggcataatttttaagtttattaaaattctatgaaatgaacctcgaaagcattatgctaagtgtaagaagccagacacaaaaggtcacgtattatatgattccatttacatgaaatatccacaatggttaaatccatagagatagaaagtagatttgtggttgctgggagctgggaggaggtgggaatgggggagtgactgcttactgggtacacagttttccttttaggtgatgaaaatcttttagaactgactagaggtagtggttgcacaacattttgaatatgctaaatgccactaaattgttcacttaaaagagttgattttatgctatatgagtttcacctccacacacacacaaaaaacaaattctatgaaataatatttaaatgtttgcattgtagcattgtatatacatattaaaatcagtagtattgattttttttctttttcactggtaactacatcatgagtattattttctgtatactcagtttgaagtactactacttctttgaagccaggaagatggtaattgatggtggaacaatccttatagataaattttgtattaagaaccaattaagtttatattatatttgagatggtggttttatttactcataacaatggaaaattctgtaactcagtagtagtgtcttgggtaccgatatgtacttcctttacattacttaaactgttcactggttggtataagactgtattccagaatgacatatgaaagtggttggagcaaacccagaaagttttcctttaaggagactccattgaaatgtctcttggacccaggtataaaaattgctccatttgcccttagcctattaacatccctttcaaaatggaatatatcattcctagtatgtgacagtattttatgaaacttaagaagacaaagagaatcttttcttccaattctgtatgtttttatatgaatgcagtcaatgcctaccagaaaaccatacggtgtaaaacttgactcttaacattttgaagaattggaatgattctccaggagaaactgcactttcaattagagtggtttaagctacaagtaacagaaaactctgttcaaaatggtttaaacaaggactttagctcacatactggatatccaaaggaaaggaaggtttcagggttgtttagcatctcagtggtatcagccaggacctggggtctttccttcccttagcccggctctccacagtgttgattttatcctgaggctcattcccttcatagtcttagaaggctgccagtgaaacagtgctgcatgtttccttgaactcctggcctcaagcgatcctcccgcttcgacctcccaaagtgctgggattacaggcacgagccaccacacctggccaactgcatgtttcctaattcacatttggcttttagtgattcttaataaggagcaagaaagtttctctcttggaagtccccaacaatcttctcctcccctgtgattggtccatactggcttatgcccatctctgaacaggcacattggggtggaaggctgagtctccatgagcccattgtggggcttcagctgtaatgcatgcacactgccagctctatagtactcccattaaatagtcttagaactttttaaatgtcttacataaatcgctcattctgggtgcagatgattcttcagaaaacttattacgttgcttttatattacatcactgcagtgtagcatatctttcaaatgtactattgagatgtgctatttgcagcccattttcaaaagctaggaatattaaagcagagaagaaaccaaagtttgctttcattggtgcatgcatgtcattggtgagtgtctcctacttaacaggaaagcaaaatctagattgtttatgcattttattttggattatgtatgctatatgtgtttatttttaatagacaaatggtcttttatagttggtgtacccttggtgcttcattgctgattatgttgttttgttccattttcttaactatatttggtatgcagaaattcaaccttaattatatattacaggtttttctttgactttaaaccatgactccttttgtttgaatatgttaaaaagataaatctcaaattgtgaaaaactgagttttaaaattacttcagcccatattttctgtctcaagtcttaatttaacacagttcttaaggaatgaacgtaggcactcataattgagtgcctctttgcctatggaattcttttcctctgttggcataccaaaattgacatttgttgagcttcaagttttaccacaaagcctctgaaccacattagtcaataattcatcccacatccttctttctgctctgaccccagttccagacagtttcttcaggtttttgctatagtgcagaggttacaacctggtggcctacagctctgatcttgcctgcaaatggtttttttgttgttgttgttggggggcaggttgggggagctgctgaacaaacaaaatttggggattatctgacaacaattgacaagtgggagagttgacataagaatccagttctggcttgtcttggaaaaatccaaagatctgaaaacaatttttggcataaaatcctgaatggcaaaaattctgtcccctcttctccaactgagttatgttatctcccaggcccctgaagacttttgaacttcagactcatttagagtgcattagtgctaactggtgccatcctgttttcttcctacaaacagagcacgtcatcttcgcagacctagataaaagcagtttaagaatatttctgtaagcaaaaagacaaatatgattgttcaagccgatcaggctgtagatgtaaggctctacagctttttaaagattcctgtcttcctgataactcattggaatcaccagtatccttagacaagaattgttcaagccgatcaggctgtagacttggaacagcagaagaattcagtgtacacctaattgtccagttttggtaaaggtttaatacaagatcattaggatataaagtcctaacccgtttcctctaagggaggggaagtcatatatccagaaggattgactccacgccaactgtgagggtcattcctgctgatattcagtctctaatatggattccctggtcatttgttaagactttattgatagtccttattaatactaaactcagtatgtgctcccctcctaaaatgtacaattgcagcattgacctacatactgtattcataggactggataataaaacagcagtaacatcacagggtgttcttgctcaaagatgattacagtgtcatcctaatgtccccttattgctcttgaatattcccattaacccaactctaggacctcttccacccccatcagataaattcattttacagctctaactcatgtgcctttactcttctctttgggcagactccttaggtcaccctccattcccttttaagtaccagggtgctgcccagggctgggtattccagtgttaatgacaatcacaggcatacaacttaatgttctcttcttggcttagtttttccagtctgatttagatgtttatcatgaccagtcctatcactggggaagggtgtaagttgaaagaaagcacatgtgtgctttcaatagtgacttggttggccattacaacatttttgtgatgaataggattttgcagactagcaagctttgaaaagtgtttgtatctgccaaacattcccgtgtatcgggtgtttgttactttgcccaactgggtaatctggattgtccctaaaattgaagctatttacaccattttaccgtgacatcccattgaagtccaggttcctagtgtgtctttgccactttgggctctatttgagcactgtggctagtaatgcctggtgaaatgtaattttggggaaatgtgggtcattcagtgactttgctgagacagagttcacctatcacaggactaagctccatgtacgcaggaatttgttgaccaatgaatcctagagcactggaataatgactagtgcctagtagacatccgataaatattattgagtgaatgaattgttgacaacttaaaacataccactgtacatattataaagatatgtgggttctttttcctgttgggttttaatcaaattgctggcgtttattagcagcaaaaattggggttctgcatttgcactgttcagatttatagattaagcaggatgggcattccagaggtttctgtcttctagagttatgtctcagaaaccagaagctggatgtgcaatcgttttttactacattacccaggcaagaattaattcatcatttttatttcaccatttctcgttataagcctaatgccaatatcttgttcagaacagtgccaaatttcaccttctgctaaacgaagaattggatatctgtttgtacagcacactgtagacctatggcagattgactctttggaaatagaaaaaatatatatttgactgacctccagccagccagaaataaatcctctgcataatcttgccaaaatgtcatttggttgtgaacagcgcccttcatttgtcttaggagagcctgcgtatcaggtaccaggccactgcaggcttttctgctcttcttttttctcccaggcagctgcatctttgataatgtggattcgtgaaaaaatctcattgtcctccttacctgtgtcatgaacttctttctcaccttattgaattatctgttgagtcaggaagtttttttttttacagtttagtttctaataaccatttgaagatgatgatgatgattattattggtcgttttagcccttgtgttatagctcacattaagttctcttctgatgccaactggaaattttaatctaccattactaagtttaaaaatatgttcacttttgcatatgggtagacaactttaatcatgatttttttttactgcttatcactgttggcttagctatgcttctactgggtgattgatgtgttttctttttttagttcagaatttcctgcaatttttaaaatttcctgtctataatgtgtataacataaataacacttaattggactaagtgatatttcatttttacttttctaggaaaaacatctcttattctggatatgtaaatagggatgaagacttacaaacctaatgttctttttaaatttcttgattattctgcatttagagttgaagtcatcagcttggccctgctaactctatcacccactgctgtctggctgtcctcacctgggacccctcaggtgccaaatttaccagctctcttccagcattggttgactatttaaaatcttgatttcatttatcttgttcttgcatacaaatgaaatgaaattcctgaaccaggtacaactggttctttggagaaaatggactccatctgagaatagctatttagtgaagacaattttcatgatagttcatcttaaggatctactttgtgatgttcttactaagtgttggacttttagaagccaccatgtgtagtcccccattcaccaaatgaagtttattattcaccccttcattcacaaaatgaagtttattattcttcattttggggaatgactagcattattgcttaaaggatgccccaggtgcgtacagaccactgggaatgagcttaaagccctgaagcagctgatgaatgtggaacattgatcacccacctcatccctaccctggcctaatctttcatctgtaccaaccaatggctatctatatggagaaagaaaaataacagcaagagatgtaagctgggaatgccactcacccttgttctgtgggggtgagcactctggtctggggcttgaggatgccttcaacacctctcttggttgaagctctcagtcactgattgctctcgatctatcattgttgctgcccttcccataaagcatgactctgagcaggcaggtaagctgccagtcttctcagtcctctttgttccatatgctttctagaggcatgtttctgaatatactcaaatacagtcattttttaaaggtggtttaactgtggtaatgatctcaggaattttatatgtaaatttctaaactgaacatttaatgtaaactaaatcagctctatcaccacctttgattccagaaacacttttttttttctcatattaacaagataaagccttcacctatggaagaaggattttttttttcttaaagcaggataaaagacatggaagcatccacaacaaaataatcctcaaaacagctttgcttttctacagctttaactgggaccagctgtcaaattcttgagtgttgaggtgtttgaaaaaccatggctgaaaggcactaagatcagaaagatgatgggatttcatgttgggaagcattagccccagttgtctaaaatggtcttgctagaaaacatggagagctttttgatgtgtgtttcattctctctcggttcactatttgggtccccaaagggatcttcatatatgcctgcgacttctttgcaggaaaaaaatcagcttttacatgagatagacgtcacactggcccctgctgtctgatataggggaggggactccatgcataaggggcaccagcagtgcctctctagtcctaattcttattttaagtacctgccttaaaagcagtaacaatctattttaaggaggtaaatgctatctgagaggcagaaggcactgtggttgtgtgtacaatcaccagagagccaaactgcctgcgttcaaatcttgcctctgtccctcccaagctgtgtgagttgaacaagttgcttcatctctgtgtgcctccatttcctctgcaaatggagcaaatacgagttccaacctcatagaatagctgtaaggattaaaatttgatacataaattgcatagtaaatctcagtaaatatgttaccattaatcattaataatagttttatttattctgaactgctttattactctagtttgtaggatttctcaaagtcaaaatgaggaactgtcaactcagggacttgctcaacagtgaaattaaaatctcattaaaaggaccacagatagatggggttatttgggggttatttggaggtttcgctattccttgggtggcttagtacaggcctggtctttgaacttagcacagtatggtctttgttaaaacattaggattttgccagctggggtttcctctgccatgcccttcctaggatctgattagaatttcaaggatcatcttaatgatctgtcttattaaatgattggacagccatgaacagaatacatcagtgagaaagagaagtattatatatatatatttttgtcccagcattagtatatcctattttttcatgaatactctacagccttccatagttaacttttctaagtatactctgccaccgtagaggtttctacgaagaggggtgatgctatcacagagttttaaaaagcttccgagtatatgcatcctcgcttttctcacagttggctaatctaaatctgtaaatcctcttcttaacactctaaaagtataggattatgataagccagagaaaaggggaaggggaagggagggtggcagttttgtagggaaactacagtgggtctggcactgcattgtctttgctcgtgcccagtcttttgaactatgaattgattgtagttagaaatcacagcttttcatttgatttcttccaatgggagggaaaagccagtcctgcccacggttaatgagatcttgctgcctcaaataacattggaataagcagtgctaacttgttctcttggagactacacatacagcccacagtcttgttggcccttttcattgctgtcaaacattcttctgatttttactccttagtgcattattgatgatcatccctaagtcagcactcttttctggctcgtcttctgtcttttgattgcttgtgactcgtcttcgtactcagcctcattactgcacactgcatgaggccttctccacatcctcctacaaatggctgccttccctaaggtaaccaacagctttatttacatgggtaggaagctacctacacctcataatgacctcacggtgttcctttcttgtctgttttcttaccagaagtgtttggtttgtctccttctgttttttatttcccaaatcaatgtgacatcgatttcactcatttttacctgttacttatcttaaaagtctaaatccatttctggtgctcaggtatctaaggctgaaagacagcaaattggtatcctctctctttatctaagagggaaggaatggaaatctgaaagtcaaacactttttttatgtttcatatgcacgtgaggaacttgtggtatgtgacccttttataaatataaaacatttctgagagtttggtaatctacaagtttagaaattgtgatatcattgcaaggaccaaagcaaaaattgtagtagctgttccctggattgctttggatcaaaatttttcagcatgatttaattcccctctagtccttagagcccagtacatcctcactgcaggctgtcttatttctcctgtcgttctttcaaataatttctgataacagtaagcaaaaaaactttttgataatcatcacaattgtagttggcattaagggcagtcagtgttcctgaagtgtatgtttaagattgtctctgcttcccccaccccaactaagattggaatttctaataaatcactgtgttgtacaagttggcagtgctggccatgtacatataacaggtgaattccaacctagagaaatattagtggagacttagaaaaactgtgactgtggacactatgatagaagtatttggcatattcggaatttcctttcttcccaaaataccgtgttttgtttaatgaataagatagacatgcagcccattacaacagccagtcttgggctgctaagagttttaagtataaggttgttgttaaagctattgaacttttaggatatttatttccttaaaatgccttcttacggcttgtggtaggtgttgaataaatgttttgatttcctaatgcatgcaaattaatatttattattatttactattagtaatagtaatgcatatgttgagtctttgagactgtgtcttagtatataaatggccacttttcccctaaaataatgtcatgtgtccaccaaattcagtaaggctagtggtttcattaagatgcactgccaggtagtgaagctgtagccagtgtactgtggaaataggtaatgaaggaagattggaacttccttctgtagacattctcaaatgtaggatgaacaacttcctcttgatctcagatgatgtgcagatatcctgcttggtgaagaaaggatggagttgggaaccctggcatgacccttgtaacatcaggacatattacaagctgcttttccactgctaattttattcatgcgatgttgtgtgaaacaaacaagtgcacaaacaacaaatcagttcagaagttcttcccctgaagaaaggttttttccagtgttgtttgtttatcttctttgcaataataactcttccttcttcattaccctggtggtaagagaacaatatcagggaagaaaaatgaattccctgataaagtatttcttatctgttcaattagcgcaactaatatagtgagatacagtgatttctcaattaatgaatcatctagagaaaaaggtctacatatggttagttgcattcaaacccataccccatgcaggcagttgtcttagaatatatgagacagagctgcctgcatgagagtagtaaagccaggtactgtaatgtccactttaatttgtctcaatcctggcaatgtacttcattagttttttttacattctatgtgagaacatcattttatgtggatggtgttcatgaagactggctgtatgtgcataaagcttttcatttgaaaatgtattttaaaagttaatttgacctattataatgttatttgacattctaaataatataatacaaatatttattattttaagtgtatttttaaaagttaatttgacttattaatatgttcagtcccaatcagcaaatcacacaactgttaaaaatattttatgtttacaaagccaagccaaaattttatgttttcctccccaaactttgatataaacactaacattttttagcatgtataaacatcattattaaccagtgtcctattaaaactccttttctatgatagaatgtctgtgcttttaggtggataaggcctagatgattggcctctaccagcatcctcatctctgtccctgatgcccagcttcagcctcgctcctgcatgctggaccgcttcagtgcagctctcagacttgctctgtgtctcacatgctctttggctacgtggaatgctcccactcacccagcaagctcccattcctcatttaagatgtaaattgagtgtcacctccctctcgaatcctacccagaactctccaggtggtttgcctctgtgctgatgttgcaccttgttcctgcccctccaacagcactcatgagaatatgttgtaatcatttgtgtatgaatctgcctgtatgagatgcaaggcaagatttgcattacttgtgtttatatctcctcagcatctaataggaacactagtttatggcatatacttgtaagaattcgtttaataactgaataatcatagtccacgtattagaacacacatctgcttaaaaagtaagtcatggatcttaataggcaacagcttgagtttcctcctatgcaaccactcaccatgccatcccgctcacctccccaatcttgacccccagcacagaggggccacattctctgtggtttcctcacaagctttctcgtgataaaatgtataatctgaaggatcttgaataagtactactgcctacctcccttggagagttggaaacagcagaaattaggatctagaaggctttgtgtattcaagttgggatgggagcaggcacagaaaggtaggatgacctagcttaaatccatatttcagtttagggagaaagacctggggcatgctgtcaggataggagtgatccattacagagagtgctgcattcccagcgtccagtgtcagagagacacattgcagaagggacgggtaaggatgtctcaaattcagtgcactggatcagaaggcacactagcatgcctgaacccttaatagtcaaattttaggaaaagagagaggctgcatccctcctttccccaataaaggagaataatttcatcaccaccagtttctatttcctataatttccttccttccttccttccttcctttcatttctttttttttttttttggatggagtttcactcttgttgcgcaggctggagtgcaacggcgcaatctgggttcaagcgattctcctgcctcagcctcccaagtagctggcattacaggcatgtgacaccacgcccagctaattttgtatttttagtagagacagggtttcaccatcttggtcaagctggtctcgagcttctgacctcaggtgatccacccgcctcagccccccaaagtgctgggattacagtcacgaaccaccgcacctggcctatttcctacaatttctatgctatgaagtacattcttctaaccataatgagagtttaaggctcaagtttaattgcagatgcctagaagagttaacatattatcctcaacaaaaatatgctgctaggttattttcattcgtccattccataattatctatgtgcacctcctaagagctagacactgcgctcaatattgggtgtacagcagtgagccaaatggattgtgtctctgtcctcatgctaccttggcctttactagtttgagaagggaaagaatttttaaagcatctaataaggtcaggaagattacttctgtgagatggggtgagtaacataaagtgaaagctggagatctgaagagaagcttttataacttcaccctgatcagctctacctatcttcatctttgtggggggaaaatagcagcttctgaaaaagtgctccctattcttggctaccaggtactcccaggtctttcatttgttaattcatcagtgcctattagatgccagctcagtgttgggtagtgactgagaatctagaggtgacagatgggtctactgtgaaggagcctcagtctagctcccttgtaagtagagtgaccacatcaatttatcatccaaactaggccatttctgagagtgtagaataaaaaggcacctcttgcagagtgatataaacatacctcctgcagctgtgcctgttacatcaccttcttagggaataacctatcaaaagtaagtgctgcctcttgaaggagattctgatgcttcgtcagccaacttgtgtctcctgtttttggaggggtcagtgctataactgtagcctccaagatgggtggaaaatattgacagacattttatgtaggttacatgcctttctggagaaaaaaaattcagcacttaattttttttattagaatgcactttttaaaagctcattggtgtcagaggggtttaatgcaaactaaaaggatgactaatcaagaaaataaataaatagttgtagacttataccatacaacaaatattgggacgcctataacaagaatgttcaagccgacttctctgtgtcctgtggcaggactggtcagactttctatacagatttgatgtttactaacctctcatttcacaatgactccacgaactgtatcttgcaggctgcctagtgggtctcagctctactagccagtatgtcaagtttctggcaaggacgtcggcactgaatatttctcccaccaccaccctaactagaaacagttagctgcccatgccaccctttgtgttatctgcaagatctctctaggttgtctttcaaggagaggtgtgacttaccttggatcagagaagaaggatgatggcagtggctgtgggaggggtagaggaaggagaaggttattgggatgatctttcagatttaatcatgtgttaaaatgagacctttgcacagtgaaataagatttgaagctggaggtacaaagtaaaagtccgccaaacccatcccagcttgttttcttgcagcaattaataataatttgtttaaaattgtaaaatacaagacaaatgttaaattgaacacaacaccgggacaagagacttttttgtgaagcatttgatttttttgtattccataagttcttttcactttcctagaattcttctcttcttctaccactgattgtgaagtttctgcaaaaagttccctttaaacattttaccttgttagagaaactatataaaatactcagccagttttcttatacttgatccaaaccaatccatcaagaatgggagaagtaggaagagcaggataatattatttgcagaaaagtctaaagcagtgccacttacagtgtgatccctgcactggcttgagccacattgtcaaccagctacattattaagcacgttgtacagttcagctgtctttttttctgggtagcaagactttctcaatgaaggaagcaatggttgacttacattctggtgcatactccataccttacgtggacctgcaatgaatattttgacaactggctactttgagttttcactgatctaaggcacaaataaggtgattttctaaagtctcatattaaatattataaacaggattagatttcaagtctttcatttttttttttactctgtggcctaacgtagtgtgaagtcttagttcacatccttgaattgatttgatttcttattattcaagaagtgaattattcactcttactctgtacatttcactggctgttaaacctttactttaaaggttttggaaattactacacattaaaaaaaagaagaagaagaaatgaagataaaacctttaaaggttttggaaattactacagatttaaaaaaagaagaagaaatgaagataaaacctttactttaaaggctttggaaattactacacatttaaaaaaaaaaaaaaacaacaacaagaaatgaaggtaaagtagatgtccttccccagagcagtgccgcataacataaacaaaggcttagctctctcctcctccacatgactggccacatgtgtgagagagcctctgcttgggactgccaccgtgtgctgggctcacagtccttgcagtttccctgggctttgtgcttatgccagatggctctgcctcagtcggctgcattggcccataatttaggtagcattcctcatatccgtagatttactatctcattaattttaacttttccaaagcttttcccagtccagaagccactaggttaaatctcaagctgtgtgtgtcctgttaataggtgactatcaaagcacctctctataaaatggatcaaagtaaagtgagagtgacggtacgaaaaagttgatcctgggaagttatgtgttgccttttcttttcctttggcatatttcttctcactgattagaacttttctggaattcacatggttcatgtgacaagatcgtaaagagagcttgaagcttatttccataagtgtttgttttttaatcaagtgattatatgcattgaaggagacacaaattatttctgatcttatacatagactatattgcagaacatttggcccactgttttaatttgtagtactagctgcatgtgagccttcccctcaacagtggttgtgagattgtcattagagtcctagagtattttggcttatatgcatatcatcttgttaatatttccagaatgtgctcctggatgtaagactcttctcttggcatccagacatgtagcataagtaaataagaccttcttgctgtaggcagaaaagacctgggacgactttgctttgtgcctctagaaatcacagttgggtggattccctgtgtcatatcacttcttccctccatgatgtgatcagttccttctctgctttatttaattattttcaaactcatgacctacacatttaaaatccgtagaagaaagtcagggtttctgaactgtacaaaaagctctagcacactttccaagatgcagaatgatgctgctggagctatgcctgatgcctctatgtatgttttattcatctactggatgacctgcaagaatgcctgataggcactcttggaacgttttacctctcggattaagaaacacctgtgttttcctaataaaaacttctgtttctttttagaaagaggcttctacctaattcagcaaaaccatacttgtatttatgggaacgtttaagacctttattgtcagaaagtagccctaaaaagacttcaccaaatatgcgcatgaaaagatgctctattagagaaatgcaaagtaaacttattacaggataccacaacagagttattagaatggcttgaattaaagactgaccatactaagtgttagcaagtttgtaagttctaatgtatagaactctcatacactgccggtgggaatgtaaaaatggtacaatcactctggaaaacattttggcagtttttaaaaaattaaaaatacttctatcatgtgatccagccattccactgctaggtatctacccaagcaaaaagaaaatgtgtatctatacaaagatttgtacatgaatgttaataacagcttttttgtaacagcagaactcagaaatacccaagtattcatcaagaggtgaatatgtaaacaaaccggtatagcatacaatggaatactacttagcaataaaaaggaatgaattatcgatcatgttccatcatggaccatggtcatattttttattgctcaataaaaaataatcatgatcaataatttattcctttttattgctaagtaaaataattatgatatgtgagagaaactagataaaatgggtatgtactagatgattctgcttgtgtagcatttagaaaatgtaaactaatctatagtgacagaaaacacatcagtggtttccttgagaaggcagcggatcaggaagaggaagatgggaggaattacaaagggacacaggaaaactgatggacatattcattatcttgattgtggtgatggtttcatgagtgtgtacacatgttcatactcagacttgaaaaacatgcaatttgaggtatgttagttatacttcagtaaggctgttaagcaaacaaaaagcctcatccctaagctgcttacattagtataagaaaagatgttaggaagtatttaggaaagtaattgttaagatttcaaaggacgtggccccactgataatccagtaaatgccatgaaaccacttttgcaaaaattatgaggaaattatgacagtggaagagatcagacctgactccatcttgcttctaacctttaagctgtccttgcttattcctgggagtaggccattaaccttgggatggtatttagtttatagtttaactctgaaaattttgtttcagagttaaagccctctcccccgcacctcccaaaaaaccacctcttgcctgggaaacaatctgcctttgtaggattaacatattagctacaagattagaaattatggtttaggggccatgcagcctctgtctgccaagagtctgaaccaccccaaaatgctcctgggaataccatcactattgtaaaacctaagatcggtgcttgagatattttgcagaccctgcactcagtgcaccagctggcatcacccaaactagtaatctggctcagtgagttttgcgatcccacccaggaacagaagacagcaacctcacttcaacccccaatgattccatctccaaaccaaccagtcagcactccccacttcccaagccccttcctcagaattatccttaaaaactgcaaccccaaatgctgtaggagactgatttgagtagtaataaaactcccgtctcccacacagccaactctgtgaattaccttttctccattgcaattcccctggtcttgataaattggctctgtctaggcagtggccagggtgaacccactgggcagttacagccatacaccctctccccagaaatgtgcacacaaagttttgcccacaattcagagggttccaagactgaaaacctctggttaagacacctatagaatccttaatcattttcaaagaaacaaagtacttttcaacagctgttgctgccactcaacaatcccctttgttttttttttttttttccgaagcaagtaaactaattcttaccttcaactcagatgaattctgggtattcctggtaaacatgactttatttcaagtttagccattttccatacagcattgttatttctactttcttcatcctcattctgaagagaaattaaactataagcttaccagtacatcacctctgtaagctaaatgaggatacagttttattgattacaccatttcattgctttcaaaatgagcaataatcacataatgattattggacacttcccataacataatgattattggacacttcccattaccacactgtcagctagttcataaaactgtaccttaaacacattaaaggaaattcaggatcaaaataccaattttatggtaatattttaaaggacagatccagtatcagccagttttgttacgccaaaccgaatcagacatttgcactaggaccaaataatactaataaactggaatttacctgaactgtaaggagaatggcaggtgtatttctatgttttctttattcctcatacatcccttctatatgtaaataatactaatactcaagactgtttgacattttagtcttaaagtctgcatatccatagtacctgtaacattcctagaattgtaaccatcccaatgggttcttcctgcccactgcacaaataaaggccacagcattgcagtaaaaaaaaatagtttgattgacatgaggctggccatgccacacaggagaaggagttattatgcagaccagtctctctgaaggcttgtaggctaggggtttttcaaagacagtttggaggaagggatgtggttgggtagaaatgggtgcttgctgctgattggttggggcagagataaaatcatagggggtcaaagttgtcctcttgaactcacttgcttctgagtggggccataggagcagaggttggcgggtccaggtggagccatgggtgtcagacatgcaaaaaacctgaaaatctcaaaaggccaacctacagtagtgatgttatctacaggcatggctggcaatcatttatttctgcaccttaccagaattcaggctcctcttctccccctagcctggtggtctctcattagttttacaaaggtggttgagcttttgagaaggcctgttatcatttaaactattaatataacctaactgtcttccaaagttagctggcctaagcccagaaaaaattaaggcagcttgaaagctaaaggcaagaggaggggttgactagatcagatctccctcttaataatttttggaaaggcagttttagaattttttctaactactgttttttctcactatccagaattctatttctaagtgaaatcccaggaaaactgcttgtagtatactcacttcttttgttatttgcacttttataaatttgatcatgagaaatatcttctaaggtgactatactgtgtccttccctataggcagagtcttagggtttccgaggaaaaatttggagagccatagatttgtatgcagatagttttttgaggagttcttttaagatcagtatctgtgagggaataaaggaagcagaatttggcagatagagtaattgtgtttgaactgcagcaaatgcctccttcagcaaagggaggaatgaagctgagatgacccttagcgttgtcctgccttgaggcgatggggcctttttcctatcatgaccagtcctttgaagagagggcatgaccttggctaagccggctttctgcggtcatggagaattcccaaagaagaactaaactgatggttaccagccaccaataatgccagcagatggcactgcaaactccgcctcccaggtttgcggcattctcctgcctaagcctcccaagtagctgggaccacaggaacccaccaccacgcccggctgattttttgtgttttagtagagacggggtttcaccgtgttagccaggatggtctcgatctcctgacctcatgatccgcccacctcagcctcccaaagtgctaggattacaggcgtgagccaccgtgcccggcctacagtccaccttttgcactacttggatccacctgagaatggttcttctggattggttgatctcttttcctggggggaaattgtaagagggaaggttagtaatgtgagttatagtccttacacctggtcttgaggcctctctgatactcctcatccccatcatctacattctattgtagatttcctctgctcgtctcagtgggttatgtggttggggtggcctagactctcatccttgaaaaaaactgaatgaaaatggtcagtctttgaaatcatgtttgcctaggatatgataccaaatactcaattgaggtgaaccaagagtaatttatttgcattttgtcttttccatgatgagtcataaaatgcagaacttttaataacaaaagctttaaagactcaggaaggacaaggtggccatcatggttctccatgagtccatgcttaattaacattagacatattaacttttgaataccagttgtttctccaaattaggtacatagcactgataactgatgggttaccataggtaatttgacttagaccatggagttcattcaaattgtatatctaaacaatttcaatatcagctgatttagcatgaaaatcaatttttgttctacttcagttagcagttttataacccagtcagtcttttcattaaaattccaggaattcttacccagtttgaatgatgtgattctaaagttattagaaacctgtattcaagagtgcttttagggtcctttccatccttttgtgaacctcctaaaagacactatactctagcattttgcatgcttgtgaagttttcagaaactgcatgagcattaagcacttaaccgtggaaatgactttaaatagttatagttaaaaacacagttgacaaatttagttatttctgtggtctgcaataacaacataataaccataattacgattgatagcatatactcagacatattagaattttagaaatcccatacaattttggaacatatattaatatcattcactaaaatataacctgaagaagattaaactttttttaaatttttgacaatgcttcctatgtaactaaacatgttaaataattgcttgcctttcttttagatgcttcaggggccctctgtagcatctcaaagttagaggtcagaaaagaccgttttgaagctgaaatttgattttggaaaggctatcaaatatattaaggtttaaaacacttggtattatgaaatagaattccaggttaccataagtcattcatttagccaaaatgatgactcaaaaaatttttaaaggcaaaaacttttactcactgatagggggaagacttagcttttcaaacagtctgtctctttgccttctttttttgtcagtagtttattcaaaagacaaacaaaaatcttttattatcttttaatattacatgaaaatttgtttaagagagaaagccaaatttcatccttgcattagtgtattattaatgtccaccccaatttttaataaaaccttatagacaaatctttccagtcttaatcagtttaaccataaggtgagattctcataaaccttttataaccctttacaaatttttgttaaagagcatattagtactttaagaaaatcctgtttgtgcttttatttcaatgttcagtttacggaaaatacacctttaaatttagtcaatatattcacacacagaatttttttacatgattaatttttgcagaccttccataactgttcaaacctttagcttattcttacttaatttaaaacaatcctttcaccctctaaattaggcaaaaatttgcattcctatgccatcttacagtcttttaccacaaacgaatttcattctcctcacacaccttgcatgtaaaaccattttttcagtagtctcaatcatatgttataatggtaactcagcaacatttacttttgatgcataaattttctttcacaaatcttttcacgacttacacagaccatgtttggacttcttgacttgtcctgaacatccctgtttttaaacagccagttattttactttaggacaagaatttactatacaaaatcctttctggtataaaatccattttctttataaccttctttgcatagctagggggcatggctaattctgaatgtcctcaggccttatctagaatctaatgctccaaaataggtaaactgaacaattttcaaaagcctaagaagcagtttatgaccttaaagcatttagcaaacctaatatctgacctgcctaatttagtccaaatgtctttattttaccaataatctttaaagctgtttttatttcccaaagattactaaagttacatggactaagacattacagtttttgcttttctgacaaaatatttaagcacttatttttctggaagccaattaattagagctcttttatataaacattacacacataacacatataactacacagacaaattttttatttgtcagtttttaattttttaaattggattactggctttagggtggagtccttggaagaacagggccaggaaagcatgcagtttctagggcctaataagcaggcacagctggaaggcaaaacagctgcccaaaaattaagggtcttgtttttatactagatcttggatcccaaaaagaccagagccttagattttgagggagatttatccatatctaattcctggggttccatgaggaaaacagattttttttccaaatggggtctctggcacctcctgtttttcccaaggagtcccaggctgttaaagctttaatatctactttttattaagctgactttcaactatagcgcctttttacaaaaagtccttttaaatcttttattatccaaccctggctagccaaatggccaatatttctgtgttcagaaaaaggaaaatttaagatggttcgtggaggggaagagaattaacaaatggtaaaggccacacagttatggtgccagaaagtactcattcctgaagccaggaattgaaccctgaacccgggccgccattgtgaaaagagaaagcaaggccacatggttacaagatcaagctcccaagaacctaactgaccagtttgctgggctgtcttcatcagcaggcttatgaggtcctaggcacacgttttatcctaagatacccctctttatggcagaacaatgcagaaagacacacaaaatacaccagatttactatagctcaagatcagcctcagaattcttttcttgtggtaattaaaactttacaagagagataaacagtgacttttaccactcattaaaccagtttgcacagagagaggccagagtctgactggtaagaaattcttacccttttgccatcatgccaggcttctgggttccctttcccttagcagccctagtgaccctgcttgccacactgtagccctggggccaagccacatcataaaggaaaatcatcttttttttgtttgtttcatcaaccacaggcaaaaagcctctcaattttgcaagttgctgcccaaggcgttgcatggggtaacccaattaacattttttgttctggccagagtaaaatacatgagacaaaacgcagacatcagccactcagcattgaactggcaaggctcaaacttgcccctggtggggccctgtcttgtttaatccatttttaactgagagagactttactgaggggagggcctctaaccctatcccttcctttactcaggtaaaatgtaccccattacttatccaaagtcagccagttggtgctgcagtctttttcctttgtattgggatagtaactaagctgaaagattagcagatttaatttttcatttttaaatgcacttccatgcattgctgtttattcagaacattccgcagtaagttacctttagtaagagccatttctgtaagactctactgctttctgtacctaatgtgtaagcatgaaggaactcagtttttcagaaattaaggatctcatttttacctaaaatattggcttttctcttgggttcccttgattaacttagcaaataatttttttcctacctacgtgcagaagaaaaatgaaacaaaggggtagaacacaaaaatccccacaaaattttaaaagccaaattttacacccctacaatattatcatttgctaccagtttctttctgacctagtcagatgtaagaggcctctaactggatccaggccagttagttaccagattaaatccattcctagacccagtccagtttgtgtcatgacttccaaacccagtttggatcagaaatttgctcaaagaaactcagagaactcaaaacacaaatccactggacctccaaaatctgagagagaacttacccactatctccagccgctccgagagattagtggatacaagtgggtcctgcagttaccttgcatgttcactcagtgctcctgggggtcattagaagctcttcttcagatcccacttctgacaccatctgtcaaaagaaaaacttcagccaaattaaatttaaaggactttaattgagcaatgaatgattcacaaattgggcagctcctagaatcacagcagatttagagagactccaggggtgccttatggtcagacaaatttatggacaaaaaaaataaagtaacatatagaaatcagaagtgaggtacagaaacaactggattggctacagctcagcatttgccttatttgaacacagtttgaacactcagcagtgtatgactggttgaagtatggctgctgagattgagcttgttacaggcgcacactcctaagttaggttttcaatcttgtctgcttattaagttaggttgcagttcatccacaaggactcaaatatagaagtacggagtctttctcaggccgtatttactttgctttaacagggcaaacgaataggattattgcttaggagacaaacgtttgtagaaactttccaaaacaggaatagttcttctttcagagagtctcaatttggggttcttagtgtcttagaatcctctaaattgtatgcaaacttttgtgagcttgtgcctggggagagggccttgaggatatttaccaaatacggtgtactagacattgtgctgggcactgatatcacaaagattcatttttccatatattcatgtattcaacacagattgatatccgtctatgtcaggcactgggagcatagtagtgaacaaaacagttcctgtattcattggagctcattttctgggtatgtggagttggtaaagggccgcatccagaaataatgtataaatatatatagcatatcaggtggtgataagtgctatgagaaagaagaattctgggtaacgagagagtgacgggatggtgggggtgttaatagggtagccagggacatttgagcagaaactgaaagaaagggagggaggcagtcatggagtcatggaggaagaacatttccgggagagggaatggcaggtacagaggttctgggcaagcccctgccctgaatgctccagggtcagcatggaggctgtgtggctggagcaggagcagcaagggagagagtggtgagggataagaggagagaaggagcaggaggcctgatcagatgggtttggtagaccattgtagagaccatggctttactctgagatggaaggccaacagagggttttgaatagataagtaacatggtctgcctacatgttagaagcctcccctgccctctgggtgaagtctaggccattgagggatcagggtggaagcagtgagaccacaggctactggacgagtctagtggcaagttggtggtagcctcacttggggagcagcagcggaggtggtgagaagtcattcgtttctgcgtatgtggatatatttcaaagatgaatgttttacagagatgaataagattttttctgggttttcagagtttgaatctagtggggaaatcaggtatgtgacagattatttcagtacacgatgataagagtgtaggggtagagagctggaggagaatggagttatggaacctttcctgggaggattcagggtaggaaatggcaaaagataagctggagcggttggccgaggccagaccatggagggtctcactgaccatgttaaaaatttggactttatcccgaagttgatgggaacagttaaacagcattgctcaaggaggtaacacactccaattctcaatctaggttatccagtaactctggtgagtattagaaagagggctcggaggaggtaagaccaaaggcaaggtaaaccagataagatattgcaattgtccagggcagagaggaataatttattaaccacttgctatacatcaagcattattctaagcactttatgtgtgtgaattaatcctcaaaacaaaccctatcagtgaggcaccattaatatcttcatttcaccaatgaccaatgcatggccttgtgcagaaagaggaggctaagtgaacttcgttcaggaaggtcacacagctgtgagcaggaggaggatttgaaccccggcaccctggctcacgaattcaggttcttatacactgtgctacagtgcatcccatgaagataagagcctggagatttagggaaaataatggggtgaatcttttattttgtcccaaactgagttagtaagttttctgtatgcgtggctggatttcaaagaaatctaattaaaataaaattttaatttatattagtgttctagcagtatccataagaaacctaccctcgtaccatctccttttctccttacttagagcttggattgtctctttctttgcaatctcatgctgcctttctgcatcaatctattcagggtgtctctttggataaaacaatattttgaagtcatcaccttgtcaggtaacccaagaccatgcttttgtctaatgttagaaatttcttactattggaagtagtacattagactccgtgttcactggttctcttttccccatagcttgtgtttggaaacagctagaattaagtgaattaactcactgttaccagaacatggggttgttgtgaaataagctggtatctcaggaaaaagtgtatcttttgactgattactcagaatatagacgtagactgtaaatagtaatataacttatttttctaactgtcaaaatgtgaataatttctcaaataacttaaaacagaactagtatttaacccagcaatcccatgacttggtgtgtatccaaaagaaaataaattgctctaccaaaaagacacacgcatagtatgtgcatcacagcactattcacaatagcaaagatatcgaatcaacccaggtgcctgtcaacagtggattgggtaaagaaaatgtggtacatatacagcacggaaaaccacacagccatgaaacagaacgaaatcttgacatttgcagtgacatggatgcagctggaggccgttatcctaagtgaattaacacagggacagaaaaccaaataccgcatgttctcacttgtgagagctaaacattgagtacacatggatacaaagaagggaacagacaccagggcctacttgaggggggaagaagagaggggggcaaggttgaaaaagtattgagtactatgctgagtacttgggtaacaggatcagttgtaccccaaacctcagcatcacacaatacacctaggtaaaaagcccgcatatgaacccctgaatctgaaataaaagttgaaattatattttaaaaaatgtggagaatttgaatagtgcaaggaatgtatacagaaaacagtgtctggagaatgcctgacttagtttgccaaaaaagtgtcggctccgctgccttgcctccagtggattacccctaggatgatcttatttccctttctgtttagattcagggaagtactgagcatcagcgtcttttccgtgtggctgttactgatattgttacagtttcataaagaacaatacttatcataccttaggccaaatgttctccaaaacaaaaaaaaagtaaatagaaacttccagccctgacaggtattcaagcctaaagtatgatacagagaaacaaaaaaatagaaaaaaaattaactgttcacataaagataccctgtagggacaggcgggtgggaggagtgttggtaaagccctagtgacagggcttgagggccacagtccctgggggcctcagtgcatattattggtgtccctgtttgcccaaatggcagagattgtgggctgggaagggagggactagttcaaagaagatagcacaatgtctgctgcagaaaccaaggggcatgagttttatttgggaaaaccaagagggatttgaaatgagtcagtggctactgagcaagcagggttcagaagtcccacattttccagaaactcgagtgtcttacaacacaaaggtcagtgttctcagcacaggctcaggcagctctaaagcaacagccagccctacccagcccttccttctcagctcacgttccaggtaaggagcgtttttatttttgaaatccaggtgcacagtcaggagatgggaggaaacagtgacacccatctttttaatgagcattgctactggaaaagaaattagcatcaccctgaattttatgtgatgtcagttaaatgaaggtgttttatagcactttacaacaaattagaatcaaccaaattgaaaataagcctagcagctgggataagtaatcaggtaagtggccagttttgcttatttttactttgagctgaagacagaatttgaatttttaatgtcccagaggtgtgagattcacaactggggagtgtggtttctgggatgattgtttaagatgcaggcagctccatcttgcccttaggtctccaagttgcttgacacattccctggaaattggcccttgtatatatacgtgtacaccggagagagggttgtgaattagtgtaggctagagctctgcttttgactgaacattagagagcagactggaaatagatgacccagaacaaggcagtaaatcatccacattaactgagaaactaatgaaaggactgaaatttatacgaagaatttatggccactcatgaaatcagcccaaatcagaggaactattagaacacttttatgttttaagaaaatgggtactgtgttcatttgctgtaatttgcatgtagtcagagtgccctgacatgataaatactggctttggtggacaggattttacagcagagctttgcactccatgagccaatgtttcttgcataaatgacttgatgattttagtgtctaaaatatgttcagaaaactgttgaaaggccacaggaagctttgcgatgataactattctggaattggtgccctggggtgtacccgatatgtgtgtgcttgcttatgtgggcaaaagaaagaggagaaaaagaggaggcagatgggaggagtgttggtaaaaatgaaactgcagatcactcagaatggaagtattaaaagggcaacaaatgaagataaaatgatgcttgcaattatggtttataaagagaaataggccatattgagtacataatttttcttttttctcctctgcagctgatggattaaatgaaataaactaatctgcagaaaatccatgtatctaggttgttgtcagtcgaccttagagaaaattaaaacttgcgcagatttcttactactttctacttaaatttttctacttgaaacacttttctcaaaatacttgtatgtgtactattttatcttaaaatttttttatcttaaaaaattcaggtaacttcaatacctaactactgaagcagcagataattttactcataaaaaaataaaaatgacaaacacgacattctcccataatttcttcagcagtaacttctccttccctaagcaatagcccttatttgactttcaggactttatacttcaggtgtggacatggaaaaagtaagttttaagtttccatcatcattagcttttgataattctgttcattagcagtaccctgagccagaggagtaagcagaaaaaactgacttctctactggagtatcagatagatcattacaccgtgaagaacaaggacagatctccaatgaatccagctaatactgaaaacatatctgcagcactgagctccaaactgacagcgtctactctagtgcttgaccctgttcagcaaacttgggtattattcaaggtggcacttccctggtttgacagatcactgtgctctgaaagccttaaaacatgcgcttgagttgtagaggttatccactgtattttgttgccttgataaaaatgggttcagagaattgagtgaatttataggacaggggttcaaatgtgctgaccttctatttccagagaaagcctttgtttttttttgttttttttttctccccactacctctcctctttgttttgtactgccctctcctggctaataaatttcttagtaatgaatatttagagaagccaagtggcggaaacactgggggctgctatcatttctactttccgttagaaatttcagattttattatatgaaatgcagagttgacatacagtgattaattcagatgtgcatagatacaagattgctgaaatgatatcaattgttgtagaaatatctgtatgagagtaatttggtcatttatatggactttgcaatgtttatgaaaaatgattttgcagtttattgcatcattagtcaaattttctgagtcattgatgtgaaaatccactgttattggaaataatctggaaactttctctctacgtttatattttacagtggctgctaatttacagaagattgtagatgatcccaaagctttaaaaacattgacatttaagttggtaagtggaaagttatggaaagaaggaggtaatattttgccatgctgtgccagcagggaataataatctagtttaataacctactctgtaattttgctgttgttgttttcttttagaatcaatttttgcatttggaagcatttgactctgcagcgttagggaacgttttctgattgtgactggaagtgtcctcttctatgagcatagctttttcttatcgtcacacctttgactaagagcggccatataagaatcttgaagcctagatcattttgcttgcagtttgtattgcaacttgaccataaagacaaaattacactgaattcaaagcaacactcttaataaagctttcctaagacaaaagccaagtggttctaacttttaaaaatagaggctgattgttgtagaaatggtttaggtaattggaagcaattgtagaacaactcaccaaaggctggcggacaaagacacaacaatttacttccacatttcaaatcaacagtaacagatttttgtagaaaggagatatttcaacagttattctgcactagtagattgtaaacttaagtactaggtggccacagagatacagagtgccggacattctggggtcactgtgagaccaagatggtggtggtcagaaatggagagaagtccagatagtcaaaagtgaccgttttccaaaaaattttagcgaacagtacattaaggtacattttaaaaatcgtaagttaattttatcaaaggctggtcagaatcccagaagcaattttagatctagatgaccaacactttgctgtgcacaacatagattgatgatcttttttatatttgtgaaattaaatggaaaatgtgggtgaccaaaaatgctaaatgattagttacagtaaatgtgagcctggtgctaattaacttcctgggtcttgcttcccatctaattttagatagctaggctgtgtgataaaagaaaaacacaaagattttcacagaaaagatatatctgaaggaattctttttgctttgataagaaagtaacattttattcagatgtagagtgctaggttaacaaataggaaaatcccttttctggtttgggatgacactgtcacctcttaatgtgtgtgttttttttttttttaatgtgagagtatattgatgagaaaatggcagcctgtgtcagcatttcaagccaatatatgtccctttattcatttttttaataccacctcaagaacattttcctaatttgtaatatgcaaacagagataagagtttgaaactctcatgctggacttttctcattttattatgaaagaggaacagtaaccctggccctttcctactaccgaagattttgtgaaaacagccgctgtacaatctctaggtaaaccataagaataatgtaaaactctccctcatctcctaatcagcttatatgtttcttaaattctctctggattctgtcctcttccctgcatctccatttcctgcacccaagcaggattctctcatcttcacaaactaatcttcctgccaccagtttgtcagcttttggctctgtttaccaccctgtgcctgtagccagagtaatcctcctacaatcccaaaatgtggtagacacagtgtttccactgccctattgtaaaccgcacacccgggacaggctaatgaagcctggtctgcccccactcctccagctctcctgctttaccattatctctggtagtaggcccatttcacatctcgggaacctcgggctcgctggggtggatttgcccaggatcacacagcgatcacacagatcctgagtctggaagctgcagactcccccctggtctagcctcagtgcccacgctctcaacagccattcatcttggaggcagacccctgcagccttagggctgtacagttttctgtcattttgtagattcctcattttggatgactgggtacatttacattggctgggactgaatctccattggctgagactgaatctcctttgtaccttcagcagattgagtaatagtggcctgtcaggcacaggggagttttggaaacaagtccgtgttttccttcccattacagcttgaaaacgtagtagtgtggtgttcacagtaaatggaaattgatggcttattctccccaaagataaagatggttaacgaaaaccaaactcaggagggaccttatttctgtcacttaactttctgtccagcccttgttaggccccaggagggtttctttgttggtatcagctgccagccggtttgagatccacttggcagagctaatttgaactggtttttggcctgatcttgcataggacactaacatcccaataaactgcagagattcaaatgtatttaccttcattcatcaacttggttattttattcaggaataaaagatcaaagtatttcagcagcgtttttcctcgtaagctgctgctgcgcatggtccctttatctctcagctttttatcattattttcatctcagtgcctttcattactttttaaaggaaaacgtcaggggcctgaaaattgtctaaagaacagcagtgtcatgatactgtggttctttacctccctgcacagtggtttcactcaggggagcactgggacactttaaaaaattaatgcctagggccgcaggggtgcgcctccaggaatgaatggttgttgagagcatgggctttgagtctagaccaggggtgagtctgcagcctccactgtgtgatcctgggcaaattaaccccagagagcctggggttcccaagatgtgaaatgggtcctgttttaggacctaatgtctggtcttacgacagatattcttatttaactgctcttggtgcagcctgggctttgggaatgttaaaaggacttcatggtggttccagtgttcagcaaaccctgagaagcattccacagggaagataataagtaggatttccattgttggtatggccaggggctgggagatcagattcttctcttcacttttaacaaagtggttcaggcatagagggcatttcagctcaactattatgtgctttgagtttgatgtatttttttttagtagtgttttattgttgtaaaccttgagacaggtctttatttttaagccatttttgaatggactacttggcagttttgtaagtaggtgaatcttcctgctttcaatgtggaatttttgaaattgcattagaaaaaacatgaaataagatacacttaatttgcctttgaagatagaatacaaattttgagaacatgtaattaacatctaattggtacacattaacatgagcattatagactttagttactgaagtttaatagcattatatgtattgcagatagaaatttcataagcattttcacagtgactaaacggacttatttttagaggttcttagcttctgcataattggaggctgtatgactaaggcaacattttgccaagtgcaggtaaagtcaagcctgaaactgggtaaaaactacctaagcgttttaactttctcctcctactgaaggggtagaaaagtgagacaaagatcttcaaggaaacttccagttccagaaggtccatgtctctgtgcctcctactcccagcctaaaagagtggctgtccacatgtggcccccagactgacagtgtcagcttcccttgggaactggattacaatgtaaattctgagaccccatctcaggactaaggaatgagaatctcttgggggctgggacacaggcatccgttttaacaagccctccaggtgattctgatgcaggctgaagtttgagaaccaatgctttaaaggaaacttgtagtttcacactgggaagcactgggatagacgagtggttctcagactctatggtgggggggtgggggcacctcacactctcctagtgattccaaaatgcacccgcatttggggtggaggcattccttttcagtgacgccaggtaaccataacttcagctcctccatggggtgcaggccacacctgctgtcatggcgggaggggtgaggagatggagtgttcaggaatcagaatacaccctgagtaagagcgtgcatgatgtcatacgctgtcacattaggtccctgataatgtatacattttcctttggcaggggaggcaaactgttatctctgccttcttagggttttttggctgggcctggaagtaaaccgacataaaacagattaacaggagaaaagcatacatatttatttaatctaagttttacatgacatgagaggcctcataaagaaatgaagacccaaagaagctgttagaatttagcacatatattgagttggatgaagcaataaatgatgaaagggggcaaggcagtggggggctgggacgagggttcatcgtggagaagtgactaggaacacgaggatgagtttaacaaggtttgtttgtgtagatgtctgtcaggggcttcagctccccatctctggtgatcagaatagctttcttcttccaggtgcagggaggaaaccttccacttgggagttttaactcctgcttttaggaaagtcagagggcccttcctgcatctgctgctgttgttttttaaagtgtctttaacgcaaaaccatgaaatagaagagtggcatattttggggtagcgtgttctgaacttctccttcactttgaaattgaggctcacaaagcgtgggcctcaaacttctgagtttccctgagacccttctaggggatcctggatgtcaaaactctttgtgacttgccttttccactgtgttgacgttggtgtaaagccgtggtgggtaaaactggtaatgtcggcacacatgcagcaacatcagactgcactaatagtcactgtgttcctcagagccaggcactgtcactcactgtaaaaaagcaaagccaatttcacttgagaattttcctaacaaggcaggaaacattattgactttattgaatttcagctacaggacacatcttttgagtgttcagtgctatgaagtgggaatccctccttcattatacgggtgtacattgacagtcttcaggaagagcacttgtgagattgtttggtttgagcttacctacatgttttttctttcttcatgaaacatcatttttacttgaaagaatagctgacaaactggtttttcagactcggatatttggcagacatttttttcagaatgaagtaagactgacacttaaaaaaaaacaaaacaaaaagctgatggccgggcgcggtggctcacgccagtaatcccagcactttgggaggccgaggcatgtggatcacgaggtcaggagatcgagaccatcctggctaacatggtgaaacttcatctctactaaaaatacaaaaaaaaaaaaattacctggacatggtggcgggcacctgtagtcccagctcctcgagaggctgaggcaagagaatcgcttgaacccgggaggcggaggttgcagtgagccgagatcacaccactgcactccagcctgggtgacagagtgagactgtctcaaaaaatataaataaataaataaataaataaataaatctgacaatatttgttgttgataataaattcaagctttcaagcaaaaataggattttggaaaacttgtatcgctactgtaagcttgacagtaacccagtacttaaagacttttctgatgagattggtgatgggtgatgttaatgggtatgatttgttgacattgtataatgaattgttcatattgtataatgaaacatgtcaacatttagaagatctgcataagtcagtgatgcttaaagtcatgcatgggtaaaagatccactcaaagtgcaaggtagaccaatagattttaaggtaacagggtatgaaaacttcaatactgtggtttcagagtgtacattgcaactaacattaaagaaattgccacttggaaagttctagtgcagtaataaatgatatccacaactatttggaaaagctatcaaaatactcttccctctttcatatatatttgtatgaggctggatttttttttcatgtgcttcaaggaaaacagcataaaacagtagattgaatacagaagtaggtatgagaatccagctgtcttttattaagcaagacattaaagaggaaatgtagaagtcaggccactctttgagttttcttgcagtgggtaggggaactatggttattttccatgaagattttatttatgtttgtatgtaatgagtttattattgttaagtttaatgaattagtaaaggaatatttttaaaatgttttagttttaatttaagatagtataattaatttatgtaaacctattttatgtttttaaatgtactgtttatattattacttcaatatcttgacataatttcaaataatatatttaaaatactttttaaatctctcagctttaatttctaagacagtcagtctaacgaatataacccacataagcagacactttttggagtcctcagtaattcttgaagagtatcaagagatcctaagaccccaaagtttgaacattgctgttttgaagggtcattggttcctttctctgaatttcagagtcatttgcatatcaccctcatttgtgctttgcaagctgagagagccctggactcagcagtgagagcccaggtagcagaggaaggagggctgagcgccttgaagcaaacacagccaaaggtcctggccaggagacagacatttcagtgtagctatgggaggcactgaggacccagggtgggtaggaactttgtgaagactccttctgtgatgttctcaccgtaaccactggtttatcacctactctagtaagttctcatttccattactcttcacaagaaaggatttaatattcccatttctagtcagttcaaccactattggatattgtagttttattctagtcattttaacctcctgatattcacattgccaaatttctgatgaagatttgaagtacattggtgtacttcacatttggcaatgtgacctttttgtcaccaccagcagccatagtttgtctttggatgtttgtcagttgcctgttaattacacaggttgtctgccattattcagtgggttgagtaaatgatgttaacaagagctacacatgagagagaagggatgatttaggaaggtagataaagaaacagtgataacacaaggagaaaatggatagggaaggtgaatattacagtgtcagtgtgacaccaccagaaatacctcagccaaaatgccctctatgcctgtactactttgttgaaagtgataaggagaagagcatttcagacctcatcgcccctgtcaacacaaacaatgacaattttacttctctgaacatctttatctgtcagatgaaaccagagatatcactggataggtacaaagtaaattcctttctttaaatactgattaatatttttatcctttaggctagtgacttttttacataagcataactacttacataggatgttattttaaagataatcatttgaaaatattcaaggtacaaacattatagttagctgattatttaatagaaaatgctagagttgatgctggttttctgtactgtttttttgaacagttcaaaaaacagtacactatgaacagtacagttcaaaaaacagtatagtacatattctaaatgtatacaagcagtgctatgcagcttaattgtggtgattggaaagggcacgtttccatgggaaactaattgttgtgacaataatttagcaggaattaggctctgaaaaggtttgtatgatcctttggtaattaattgcccattcccagtcattcatcatacttttttctcccttccttgttgttcttatgtaatgtccaattctgatttatgtactataggatgagaggcagcttagaatggtggatctgagggggcggggggggagagagagagagagagagagagagagagagtgtgtgtgtgtgtgtgtgtgtgtgtgtgtgtctaaaagcaagcaagggggagaggtcacaagaaaaacgaaataacttattaattaggaccagtgagaggtttgaagggaaatggcttccttttttttttttttctgaggtggagtctcgctctgtcgccaggctggagtgcagtggcacgatctcggctcactgcaacctctgcctccccggttcaagtgattcccctgcctcagccctcagcctcccaagtagctggcactacaggtgtgtgccaccaaacctggctaattttttgtattttagtagagacggggtttcaccatgttggccaggatggtctcgatctcctgacctcatgatccacctgcctcggccccccaaagtgctgggattacaggcgtgagccgccatgcctggccaaggcaatggcttttttccagttctgtctgattctgaagtaagaaaaataaagtatttgacacaccataatttttgccaattttaggcaattaatatgtctgaaaatataaacaaaattcttttatagaaaagaattgttataatacctttccctgtaaaacttattcactggtatttatatagcagttctctctaatgagcccatcgcagtacttggtgatgactttttcctggcaagtttcatagaagaaatgagtttggtaaaaactaaattactcctgggtgacctgttagatctcttctgcttattttcatgttgttctcagaatgattactaaggtgatttagttagaaagtatatttaaaataattttatttagtttttgaaaaatttgtttgtggtttcttagcaggggtgtttcactgactgttccaaagcttccagcctgggcatggtattttaatggataacaaatcccttcccacctctgttctgtacttcatagcatgatggccacagtgctgacagcacttagcttccagtagtcattcgagagagtggctggcgtctctcttctggaagaaatgggacacatggtcccataccaactgtgcctttgcttagatctgccatcataggaacaagactttaacaaccagcagcagcagcaaaccagcattgaggctttctttttcccttttcaggcttctggctgtgatgggtcggagattcctgatgaagtgaagctgattgggtttgctcagttgagtgtcagctgatgtatgtcccttgatgtcaccctgatctgtcatgccccaccgccacccctactcccttcaaccctccctctttctgcccatttcctcccaccccctcactcccatttcctagcaaaatcagaagattgtgaagaggccggcttcaacaaaatgggataaaaaaataattttttaaaacttacaacactccgagttctgctttattctctagcaatccacagtacaagaacaagcaaatgccacagctgcacgactgttgctcatttttccaaaagctatttaatattcttagcaatcaatttggatatcccttaagtgaaaagaatctgaaatacactcaggtggtcttatttattggcaacaaaaggaattttctatccagaagcctatttctcctttcattgttgttatttctgttataatactttaattgtacatctgacaatactgcctcttttatgttgtatttagaaattaatatacttataaaattaagatttattagccaaacttgaattctagttttaaaactgactgtgaattttatttttcatatatttatgcattacacaccttagctataagaaaaaaagggttttgattatatgcttcttgcagttaatctcgttatttaaacaaaaagttttgggtctgtctttggagtatttgtaacttctaaattttgaaatgactgaattaggaatttggatgcttattcttttagtctgtttgcctaaaaaccaatttacaatctgactgtctcttgggagagggaggtgccttgcaaactttcacattaagaatgtgcctgaggctgctttactctggaatagtctcagatctaaaatttcctctatataaggtggcatatgttaagttttgcttcattggaccgtttagaatgctatgtaaaatgttgccattctgttagattgctaactatatacccatctctgatttggctctccttaagtgataggatttgttattctaaaggtgataaacttgaaaatatcagaatctgagttttacttgaaattttgcagaatacccaggtggagtgaaaattggaagggttttgtgcaatgactaaaaggtaaaacgctgttaaggttcaagaatcaatactttcaacccaagtagccctctgcttgactgtatattatggaactagtaaaccttaggattttgaaaattggagtctaatctttcaaggaggtgggctcccaggatggtaccattgctctttcctagctaaccctagatatggcagctctttaatgtacttcaaaaagcaaatatatattactaaggaaaaaaagttatttataattgccttgtcataattgttaaggtgttctagagccatttgcatacaatttaatgtaatttcattccattctattgtttacacaacgattactcgaagatgactgcaaaggtaaaaggaaaataaaagtgtattgcacaatgagattgttttgcattgtttctttcctcctttagatatcatctgcattactgcaatggcatttagcactttcataaaatgcctagtaagagttaactagtgaaagtgccctagaggcagagtgaggaggcatcatgcatccagtacagagaactgggtttgacaagtaacttgaattagcatgaggagagaatgaaaggcaaacatttctactccatatagacagatggtcttcgaattaaaacccctatagggctataggggacaagagagaatgattccttccaaccacttcattcattttaatgctgttagtccctgaggctcagagtggttgaatgacttgtccaaggccctttacaggactacttgcagagctaaactcccaggatcctcacttcctgacattcagagcatgttctttacactcttctgtacaacttgtgggtgaaaagacaagacccttatcttctactaagaggataaaatgtacatgaataactggaggactttgcaacatggagactaatcaaaaatctttcagaggggtggactcccaggatggtgccattgctttttcctagctaaccctagatatggtggctctttaatatactttaaaaagcaaatatatattactaagaaaaaaagttatttataactgccttgtcataattgttatatcatttaatatctgtatttagacatggttataaatatcatttaatgtctgtattaaatttccacccatattttcatatccatcctaatggcatttgaggtagtttgcatacattcatacaataggatagagatgtaaaaatgcataaagaaattaggatgaagggacaataagaactgccttacaaggtgaatgcaaggataaagttagtacataaaaatcaccacgagggcctatataattgctagaatacacagatgtggactagagcttcctacccaccatactaccttaattcccaacatgcagagcaatctacaaattcagtataatccttatcaaaatttttaaattgtattacccacagaaatatgaaaaacaatcctaacatttgtatggaaccacaaaagaccctgaatagccaaagcaatcttgacgaaaaagaacaaaactgaaagcaccacacttcctgattttaaattacattataaagttatagtaatcaaaatagcatggtactggtataaaaacagaccagtagaacagactagagtccagaaataaacccatacatgtatggcaatttttgacatgagtgccaaaaatatacaatgggaaaaggacagtctcttcagcaaattttgttgggaaaactgtatatccacttgcaaaacaatgaaattggacctttatcttacaacttaaaatcaactcaaaatggattaaagacattataagacatgaaactctaaaactcctggaagaaaacaggaagaaatctccttggcattggtcttatcaatgacttttttggatatgacaccaaaagcacaggcaacaaaagcaaaaataaagtgggattatatgacactaaaaagcttctgcacagcaaaggaaatagtagacaaagagcaaaagcaaaaataaaatgggattatatgacactaaaaagcttctgcacagcaaaggaaatagtagacaaagagcaaaagcaatctatggacttaggaaatatttttaaactatatatctgataaggggttaatatccaaagtgcataaagaactcatataactcaagagcaaacaacaacaaaacattaaaaataggcaaaggacttgaatagatattttcccaaagaagacatatagttggccaataagcatatgaaaatgtactcaacatcatttaatcatcagggaaatgcaaatcaaaaccacaatgaggtatcatctcacacctgaagataagtgctggcaatgatatggagaaaggagcacttacatgcctgttgggggaatgtaaatctggtacagccatatggaatacagtatggaggttcctcaaacattaaaaatagaacgaacatataatccagcactcccacttctgggtgtatagccaaagaaaaaaaaatcaatatcttgaagagatatctgcactctcatgttcattgcagcattatgcacaatagccaagataatggaaacaactgaagtgtccatgcatgtatgaatggataaagaaattgttgtgttgttttgttaagagacagagtctcgctctgttgcccaggctagagtgcaatggcatgatcacagctcactgcagccttgacctctcaggctcaggcaatactcccacctcagcctcccgagtagttgggactacaggtatgtgccaccaggcccagctaattttaattttttttttttttttttttttgtagagacaaggtttcactatattgcccaggctggtcttcaactcctgggctcaagcgatcctcccacctcagcctagaaattgttttatacacacacatacaatggaatactcttcagcctttaaaaagaagaaaataacatcacttgcaatggcatggatgaacttggaggacattatgctaagtgaaataagcagatacagaagaaaaattctgcatgatctcatatgtggaatctaagaaagtggtagttatgaggggcaggagggcaggagaaatggggacgtgtttatcaaagggtatgaagtttcagtaatacaggatgaataagttctaaagatcaaatgtacagcatgggtagtatagttaataatgtgtacttgaaatttactaagagaatatattttaatgttctcaccatatacataatggtgactgaagaaatatataggttaattagcttgactgcagttcactgtattaaaacatccatttgtacaccttaaaaatacgcgatttttattttcaaaagttaaattaggagaaacactttttctggcataaattcttaaaaattcttctaggaagtagaagttgtgtattcagaaatttttaaattctcaaaaccttcatacaatacatatacagcaagttgcggacaatttccttttatggatctttcaataggggcctagagttaaactgtatggtgagaaatgcaggtcagcaaggagctgaaggagcatggtccaaggagtgactctctcttttgatctagaaagataacaatcatcaaagctaaaagtttaaaggaatgagtagactacatatccttcaagaaatcctctgtgcctgtttttcttaaccaggcttttgattaaagatgacatgccacaattgaatgttgtaattctgttcagcttccctaaacacagatatttggtattacttatttggacagattcacatgctttgagaaactggagggttcacaacctcttagtaaaatcacggcacccacatctcatgcctaaacatgtacaaaagctattgtgcctctagtgtgcctatactgtggtcaactcaaaaagatgtaaaatagaaggaagttctcattcattttacctccaatatacagggttggttggtttgttttttgaaacagagtctcactctgtcacccaggctggagtgcagtggcgcaatctcagctcactgcaacctccgcctcccaggttcaagcgattcttctgcctcagcctcccgagtagctgggattacaggcacccgccaccatgccaggctaatttttgtatttttagtagagacggggtttcactatgttggccaggctagtctcgaactcccgacctcaggtgatctgcccatctcagcctcccaaagtgctgggattagagatgtgagccaccactcctggcctaacaccaatatgcagttcttatatgaacaaaatggttttctgtatgtaaaaaacatttaaagagactttagttgttttttacatgttagagaactttagggagactttaaatgcttttaaaacattagagaactttaaacctataaatcgtgtggtgaagagttcttacaaatttttttccccaaaatttccctcataaagctgggaagttacctatatgttatatatcttatgtgctgataaatatggttgatgactgcctcatctccatgaccatgaaaaaaaaaatctactactatatgcaatgaccttaacatggaagaatttcacatcaggattgccattcattcatttaaatactgtacctatggtctgtttagtattaagtaatataccttcctgatgaacccaccaagttgaactagtaaacggaatctaccattaagtaattaaattattcagtccatacagagatgatgaatatgagtcaatgaacatcggaggacttctgcctaagttagcatttgcagttgataataagtgatcttcggtcttcttttttcttgtaagtatattggacaggagaagctgttgcttagcaaggcctatttagttcatcatagaatcctatcagtataaaataggatgtttatccattctttacacagagggtatgcttccagctcatcccaaaatggctttatataattaagattcaatttaaatatacccctgtttttgtgttccacacatttattgtccaacttgttaggagatcctagctatgaattctgataggtgtcagtggtgcaccaggtgggtgatatgtcaatattccctcaggaccagaaggttctaaccaggaggtatgtaatgccttccagggttctaagtttcaagagatctaatactaggcctaatagccataaacaaacggttttcaaatgacaatttccattgtgtattggcatgaaataaaaaatcaagtgctatgagtttgattttaagagatttcctttatgttgatgccgtacttcctggagttttcagcttggggtgtacactaccaggtatgattaaaatgttcaatgcatccaaagtgaaaggattggaagagcatgtgtttaaaatatgataaagtgactgactctgtcaacatcctacacaaaatatctgccaattaacatcaaacaccaccaagaaaagggcttctcccaacccactagacaagccataaaagatggtctcgaaaatgccccagtgattgccctgatgctattttgctgcagagaaaatgcatggtcaagtaacagtgatgtccctttatctaccatcttgcacctcgcccaccaaatctacccaggctagttgaagctctaagagcaatggaaataaaatggacacaatcaggttatcaacaactgtgcattttttaacaaaccaatggatgtcttaatggagcatcttcaggtgaacaaggatcttatactgaagcaatgtacacaaaacttccccctacatgaattgtagcctacaaaacaagcatcattagctgaagaggtttatcgaacccatatactttaactcataattcatcaaagggcaagcaatgttattaaaagttactaccctgtgctattgttgattgaatttggtacagaatgatgaaaggtcagtaatagaataatcatttctactgtgcatttatccctcatgtaaagtactggcttgagaaacaaaagcttacatcacacaggaaatttatcacagaagaaacaggcttattgtttaaaaagaatcttcagtaaactaatgggtccataatcggagaagtaggatagtgcctttcttcaaaaagtggaagagataatactgtggtccaaccttgacccaaatgaacaatttggtattgaactatttcagcagcaggatgtagatgtgttaggtaatactaagttcaaaatcaacatgtgatcagaatcagattgagtacattcaggtagttttttatatacttaagtcttctttttctcttccacactctgtgggaaaaaaggaactcagtgaatcaaaatgaaatggagaattgaggaaaagcacaaccacatggcctactgagatgccagtgctgttcatgcttattgggaaaggctgaattcaggtccaccacactattttcccattctagagcattgtatgaagcttggtcctatacattattgagtttgagtcccacagtagttctgtgataatgtggatacgtgcactaaggaacagtattaagatctatgtcttactgtgtgttgtaccaaaaagtttgaaagccactgctttcagccattttgaatgttttctggctattacttgcagcccaaagcagtcactctgctaagcacattatactatctcatttaatcttaactctgtcagttaagtgttattactcccattttaaagtggagaaaactaagtcttggaaagactaagctgcccaagataacaaaattagtactacaatatgaagcaggaatttgaatgtaggtttatggggttccaaagcccatgctcttaatcattatatcagacaacctcctaatataagacaagacacactttacttcaggtttgctgtgggccagacattaagccaaaagcttttcctacattacctttcttaagcctttccaacaactttaggaaactggtttcactatctgcattttatagatgaggaaatagacgtacagagattgtaagtaacttctccaaggtcagccagctagtaaacggcagaggggatttgaacctaattcagtctgactcgagagaatttccactataccgtgctgcctttcaaagggcaaatccaggttttgtggagcctaaagtttatacattttggagtaagagactcaacgttttgggtacaaaattatttgcagaaaattaggtagagtcttggaagaggccttgaagattattgctggtcactccaccaccgtgccataggcttttcattgcacttgctttttattttgttatttgtattataactagcttttatgttcttcagtcccttttgtgatatgccttccaaatctagaaaggtaagtaattttcccaagatcaaagaacaagaaatagttgtatgaaaagggaccatttcagtgtgattctttatcttaaatagacttaaaaaatacaactaaaattttttaaataaaaataaaccaattacattctgtggtagtaacatgtaaaacccgaaggtcttctgctgcagctttgctgctgactgtgtgacctcactcaagttccattttacttcattaagcctcggtgtactcatttttagattgagagggattaattagttgattattaacttcctttccaagatgaacattctagaggcctaattgagcagaggaaggagtaaaccggttgctgcttgactgaactggtccatccattcagctgtaacagttgagctgttggtgaatagggctttagaaattccaatcagctaattagggtcttttgttatagcaaagaattgtacagggagagtcagggacaatctactggaagttacaaagaggtggagggtcattgctctacaatgcggctttattgctttctgctttttcccctggagcctcttaaagaaagctggtgggcaggaggagggggagagaaagagacagcctcatcttcatcctgcagaaatctgcagacagctctaggctccaggtgagcatagccctaaggccttctctcaggatctgggctgcttttgtggatattattggtggcaccatccctcttgcttggagctttccccttcttttgggtgtggctgtgaatcggggcatgaatggccagaacagacagtgggcataactgaggaagcgagaagtgaggaggaaagagtctgacaaatagtcctacccactctcaactggagaaagataaggttcatgaatttggaaaggagagctctatttctcataaacggttgcagcctgcagggtgaccttctcacaggctaggcagcatagcctctggccagatgccaggaacagacactttaagggaggggcaaagagaacaagaatttataatcaacagggtggccaaatatacatattcaataagctataggaggagttatgaatatttataagaggagaaataggtgcatgtgcaattgagcttcgtgccccttcatttgacccatattcaagaaatggcagcctcaacatgatctgagggtgaagttttcacccctctgacgtcaaaaagtgaagccgaagacgtggaaaccctttctgcacattctctgtggactggccaactcagtggttggtagtctctcatctggcgaaaaaggagaggcagggtcaggtggttgggtcgtatcagaggaggagtcttttgaaaaggtctggtttctgtttagcccttagggaagaaagcccaatagctttcttagctattaacgaagctaatcagcttagttagcaagggatggggttcaacaagatgtgtcttactcccccgattctgttgcttctggaaagagtccagtctagatcccaagagagggctcttgtacttcatgcaagaaagaatttggggcaagtccataaagtaaagtgaaagcaagtttattaagaaagtaaaggaataaaagaatgactactccataggcagagcagtggtatgggctgctcaactgagtatactcatagttatttcttgattatatggtaaacaaagggtagattatttatgagttttccaggacgggggcaggcgattcctggaattgagggttccttccacttgtagaccatatagggtaacttcttggcattgccacggcatttgtaaattgtcatggctctggtaggtgtgtctttttagcatgctaatttattgtaattagatataatgagcagggaggatgagcagaggtcacttttgtcaccatcttgggtttggtggtttttggcctgcttctttactgcatcacgttttgtcagcagggttcttgtgacctttatcttgtgataccaggccttacccacctcctctcccatcctgtgactaacaatgtctgacctcctgggaatgcagcccagtgatctcaaccttattttattcagctcctattcaagatagagtcgctctggtttgaacacctctgacaccattatggcgaagaattcagtttttaaggttactctgggatccccttggccaagagatggttggttcggtcagttgggggacttagaattttatttttagtttacaccacttaccctgaacatgtggataaaagcagccatattgttcttgttgattcctaggattgaagtcaaaacccaaatcttggaaactgcatattcctagtatttctagcattttcctttgtgaattgttaatgattaattaaaactattaaaagatagttatcattactaaaaatagtaaccacagagtgcctaccatattccagttgcttttcatatgcattttgttgttattaaattatgcaaagtaggtattcctgtgtccaatttacagctaaaggaaatgagactcacagaatttaagtaacttatccatcgtcacacagccagtaaatggcagtcctggaatttgaacttacatgtgtcttcccaccacgccaaatcgtctcccagttaaatctccattttcccttatttattatgctatttgattgcctttcaatccaccaatatagtgtaagcttcttataggaattatttcatatgaagcttgaaatggtaaacaatgtggtatggacctttatttaacatttgttggaaaatccaataatacaactggtaagaaacaaagaatctaccgagagaaatatattgttgaaaaccaatgattacagtcagaccagcagagaatccagactataaaaattgcaaatggtagttggaggcagctcaagaaaaggacagtctggctgggtagtaatatttgcagctgttcctctgtgctggcagcctttcaaagccacaactattaaatgcattaataaaaggaatgctgtgatagcaccagtcagctgtgcaaaatgaagttaagagtgattgacagataagtagact

SEQ ID NO: 49 - DNA, 3340 bp, Homo sapiens
cgagcgcgccggctacctcccttccccgcctccgccggcgctgcctcctccctccgcccagctcggcctcccttgctccctcccctcctagctggcttcggcggggacggcggcggcggcggcgggcggggagggcgtgcgccggccgagaggtgtcggcggcgaggcaaaggaagtttcaagtggaaggtcgtccgtcggccggcgcgtcctcctgctctcctccgcagcatcatggcggacgagcggctcgcccgtgcacgtccagcttccccagcaggcggccccggtgacagcggcggcgcggcggcccggcgccgcgacagcagcgcggccccggcagctcccgctgcccggccccggccccggccccggcggcacaggctgtcggctggcccatctgcagggacgcgtacgagctgcatgaggttatcggcagtggagctactgctgtggttcaggcagccctatgcaaacccaggcaagaacgtgtagcaataaaacggatcaacttggaaaaatgccagaccagtatggatgaactattaaaagaaattcaagccatgagtcagtgcagccatcccaacgtagtgacctattacacctcttttgtggtcaaagatgaactttggctggtcatgaaattactaagtggaggttcaatgttggatatcataaaatacattgtcaaccgaggagaacacaagaatggagttctggaagaggcaataatagcaacaattcttaaagaggttttggaaggcttagactatctacacagaaacggtcagattcacagggatttgaaagctggtaatattcttctgggtgaggatggttcagtacaaatagcagattttggggtaagtgcgttcctagcaacagggggtgatgttacccgaaataaagtaagaaaaacattcgttggcaccccatgttggatggctcctgaagtcatggaacaggtgagaggctatgacttcaaggctgacatgtggagttttggaataactgccattgaattagcaacaggagcagcgccttatcacaaatatcctcccatgaaagtgttaatgttgactttgcaaaatgatccacccactttggaaacaggggtagaggataaagaaatgatgaaaaagtacggcaagtcctttagaaaattactttcactgtgtcttcagaaagatccttccaaaaggcccacagcagcagaacttttaaaatgcaaattcttccagaaagccaagaacagagagtacctgattgagaagctgcttacaagaacaccagacatagcccaaagagccaaaaaggtaagaagagttcctgggtcaagtggtcaccttcataaaaccgaagacggggactgggagtggagtgacgacgagatggatgagaagagcgaagaagggaaagcagctttttctcaggaaaagtcacgaagagtaaaagaagaaaatccagagattgcagtgagtgccagcaccatccccgaacaaatacagtccctctctgtgcacgactctcagggcccacccaatgctaatgaagactacagagaagcttcttcttgtgccgtgaacctcgttttgagattaagaaactccagaaaggaacttaatgacatacgatttgagtttactccaggaagagatacagcagatggtgtatctcaggagctcttctctgctggcttggtggatggtcacgatgtagttatagtggctgctaatttacagaagattgtagatgatcccaaagctttaaaaacattgacatttaagttggcttctggctgtgatgggtcggagattcctgatgaagtgaagctgattgggtttgctcagttgagtgtcagctgatgtatgtcccttgatgtcaccctgatctgtcatgccccaccgccacccctactcccttcaaccctccctctttctgcccatttcctcccaccccctcactcccatttcctagcaaaatcagaagattgtgaagaggccggcttcaacaaaatgggataaaaaaataattttttaaaacttacaacactccgagttctgctttattctctagcaatccacagtacaagaacaagcaaatgccacagctgcacgactgttgctcatttttccaaaagctatttaatattcttagcaatcaatttggatatcccttaagtgaaaagaatctgaaatacactcaggtggtcttatttattggcaacaaaaggaattttctatccagaagcctatttctcctttcattgttgttatttctgttataatactttaattgtacatctgacaatactgcctcttttatgttgtatttagaaattaatatacttataaaattaagatttattagccaaacttgaattctagttttaaaactgactgtgaattttatttttcatatatttatgcattacacaccttagctataagaaaaaaagggttttgattatatgcttcttgcagttaatctcgttatttaaacaaaaagttttgggtctgtctttggagtatttgtaacttctaaattttgaaatgactgaattaggaatttggatgcttattcttttagtctgtttgcctaaaaaccaatttacaatctgactgtctcttgggagagggaggtgccttgcaaactttcacattaagaatgtgcctgaggctgctttactctggaatagtctcagatctaaaatttcctctatataaggtggcatatgttaagttttgcttcattggaccgtttagaatgctatgtaaaatgttgccattctgttagattgctaactatatacccatctctgatttggctctccttaagtgataggatttgttattctaaaggtgataaacttgaaaatatcagaatctgagttttacttgaaattttgcagaatacccaggtggagtgaaaattggaagggttttgtgcaatgactaaaaggtaaaacgctgttaaggttcaagaatcaatactttcaacccaagtagccctctgcttgactgtatattatggaactagtaaaccttaggattttgaaaattggagtctaatctttcaaggaggtgggctcccaggatggtaccattgctctttcctagctaaccctagatatggcagctctttaatgtacttcaaaaagcaaatatatattactaaggaaaaaaagttatttataattgccttgtcataattgttaaggtgttctagagccatttgcatacaatttaatgtaatttcattccattctattgtttacacaacgattactcgaagatgactgcaaaggtaaaaggaaaataaaagtgtattgcacaatgag

SEQ ID NO: 50 - protein, 443 aa, Homo sapiens
MDELLKEIQAMSQCSHPNVVTYYTSFVVKDELWLVMKLLSGGSMLDIIKYIVNRGEHKNGVLEEAIIATILKEVLEGLDYLHRNGQIHRDLKAGNILLGEDGSVQIADFGVSAFLATGGDVTRNKVRKTFVGTPCWMAPEVMEQVRGYDFKADMWSFGITAIELATGAAPYHKYPPMKVLMLTLQNDPPTLETGVEDKEMMKKYGKSFRKLLSLCLQKDPSKRPTAAELLKCKFFQKAKNREYLIEKLLTRTPDIAQRAKKVRRVPGSSGHLHKTEDGDWEWSDDEMDEKSEEGKAAFSQEKSRRVKEENPEIAVSASTIPEQIQSLSVHDSQGPPNANEDYREASSCAVNLVLRLRNSRKELNDIRFEFTPGRDTADGVSQELFSAGLVDGHDVVIVAANLQKIVDDPKALKTLTFKLASGCDGSEIPDEVKLIGFAQLSVS

SEQ ID NO: 51 - DNA, 111836 bp, Mus musculus
  misc_feature (1)...(111836): n = A,T,C or G
ttttacaaattgcatactcacatccatttggatgtacttataaactagtagctacaactgcatttcttgggttgtaatacaatgaggaagccatcagccatctacctctaactactttgtggctaattacttatatggaatctttgtacataaataatgtaggtcatgagcctcaagtcttcaactagagcaaagtagagaacaaaaagagtagattataaagaaactgggatcataaaatacacagggaaaactggggactcagggcagggactggagagaggcttaagatttcctaggtcgcaggtctcacattttcacaacaaaattttaaataataatctcaattaccgaatttgcagtaggaagcaaggtatattttctccaggacttccnnnnnnnnnnnnnnnnnnnntggtttgaagatcttgagccatagtggctatggattccagaagattgaatctccgagttaaggaacacacctttaatctgggctatgcctttcatctgggattaaaggtgtggtggaacacacctttaatctgggctacaccttttgctggagacaatataaggacattggaagaagggagtctagctcttgctcctgctccttcgcctgcttgctgcgtgagactgagtaactgctagatccttggacttccattcacagctgtgactgaacgattgttgggaattgagctgccgactgtaagtcatcaataaattcctttattatctagagactatccataagttctgtgactctagagaaccctgactaatacagatgctaagatggctcagtggtgaagagcacttgttactgttgcaaaggatccagactcagttaccagcacccacatgatggctcacaacctccagttccagaagatacaatgccctcttctgacctccatggccactgggcatacatggtgcatacacacacatgcaggcagaatactcacaataaatgaatgagtgaatgaatgaatgtatccataaaaccatttttaacataagaacattcaaaccttagaaatatccagggctggggtacagttcagcggggagaatgcttgcccagcatgcatacacctggctcaacaccagtacagaaaaagctgggtgtgctatggatgcctaaaatcccacaacttgaggggaggaagcaggagttcaatgtcagcttgagagccagtctcaaaaagcaagcaagcaagcaagcaagcaagcagcaagcaagcaagcaagcagcaagcaagcaagcaagcaagcacgcacgcacgcacgcacgcacgcaagcaagcaagcaagcaagcaagcaagcaagcaagcaagcaagcaagcatgcacgcaagcaagcaagcaagcaagcaagcacgcaagcaagcaagcaagcaagcaagcaagcaagcaagcaagcaagcaagcaagcacgcacgcaagcaagcaagcaagcaagcaagcaagcaagcaagcacacaaacaaaatgccccctacacgcttgcatgtccaaacacacaaacacaaaccatttctaatttatttttacttatttcttcacttattttggttttttgagacagggtttctctgtgtagccctggctgtcttgtgcagaccagcatggccttgaacttacagagatccacctgctcctgtctcctgagtgctggggttaaagacatacgccattacactcatttccaatttaaagtgggagtcataaaaagcatgaaaaatatcacttttacaaattgcatactcacatccatttggatgtacttataaactagtagctacaactgcatttcttgggttgtaatacaatgaggaagccatcagccatctacctctaactactttgtggctaattacttatatggaatttttgtacataaataatgtaggtcatgagcctcaagtcttcaactagagcaaagtagagaacaaaaagagtagattataaagaaactgggatcataaaatacagagggaaaactggggactcagggcaggactggagagaggcttaagatttcctaggtcgcaggtctcacattttcacaacaaaattttaaataataatctcaattacctgaatttgcagtaggaagcaaggtatattttctccaggacttcccctgtagttgcggatatacgaagcagccaattatgagcagtcagggctatgagtgaggatttatagtctgatgggtcaggaagtatgtctccctaaacaacaaacaaacaaactaaaccagggtgtgaaaacaaattgcttggctatgaacaatctgcagtactctatgtccaaagaaaatggctagttaccttgtcaaataagtaaaccaaagaaatatcaactgcacaaatgaagaaagtgggacagacgaggctgtgcctgttactttaactggtctttatgttttaatgcgtttacattttatcatcattatcattgtgtacctgagggtgcacaagccccagtgcacatgtggaggtcagaggacaactgggtagactcagctttctccctccactggtttgtttgcttggatgcaggctggccgcatactcagaggtctgcctgcctctgcccgcctagtgctgagactgaaggtgtgcatgctcagctctcctgcctttctgtgggttctgaggctcaaactcaggctgtctggcttgcaccactgggaagcaagagctttaaccactgagccatccactagtacagctcgactgcagaagggaaagaggagcaaatgtgctgactttcaattagtaaagttctgaattgagaagttgaaattaatacggcatttgaacaggaaagaagtggctattggcctctgcaaaacctgtcttccctctcaaattccagggagacaaccatttgcttttagtctgcttggctccatttatttttgttgtttctcaggcaggccctgtgcagtgcagactgggaactggtcctcctgcattcatgctgatgctgtgattttcaaatgtactagccacctgtacttaactcaaaggccatgacatgaatgcttctatgctacatgacttatgtgtcatttcatgtagattttaaagttttaaaatatctactattcctatttagcccattacagagacatttaaaacaagtatcttacaggtttgaacttttttcttaaaccaaaagtggcagttcatacattacttcagaatcaaaacaaaataaacagagtattcattttaaagtagttttgcattcatataataatgcagtgctcctctgagttcttcataaaaaatgttgtcaccacaaataaaaacaaaatcacttaagtgtttatggaataagagtaggttaactttattttttcaggactgctctatattttgggagtttgaattggtatattcaatctttctcaattaagaaacctatcatctctctaatctcccctcaagaaaatgattaaaaggctctaagtggtttaaggcacaattatttacagctttcaattaaagagaaaaaaaccaggcttctaactttctaatttttaaaaaggtggtttctatgaaaagagtaattatggggggggggtgatagtttaaaaaaattatagctttatggaaaaacaacaacctagaaaaaaattaacattaaattctgaatattgctgctcatggcttaaacagtacttctgggttacttgaagttctcttctcttgaagagcaaccaactagactttcagacgttgattaattcgctgcagtcttcttaggaggatttcttagaaacaatgttatggaaaacttaaaaaagatgaattgtccctcaaaagtgggctgtgattaaaagagtttgctgtgagggccccacaagcactgtgcatgcaggcagtattagaaacagccatgtcaaagactgaggaggagacggacaagcatccttggaactttcaatgtcccgtatttatttttccccagaccaatcactcctagcttctcgggtctctggatgctgacatcccaaggaaacagtgtgcaggagggcgcgtgccagggcaacaccggcctcacggcatgactttcactatgtagctttaacttttatactattttcctaactacagccacaggtgggatttacctactttcaaaaatccacataatagttgccctcagagtaatttgtcttagtacaagggtgggatgatctcgaacaggaagaacgactataaactacctcagagtgttataaactttaatcagtttctaccttttcaaaatttacaaatcatctctaatttaaaatttttctgatacatgtcttccatccaggtagtcaggggtggatgaactccaaggttcaagctcacgctcagctatacctgaaattttaagctagcctgggctcatacatgaacgtgttcaaaataaataaatgagttccaaatactgacttaaaaaaattacgtgtatgtgtgtgtgtgtatctgtatgtgtacatgtgtctgtctgtctgtctgtcgttgtcgtgtgcgtgtgtgtgtgtgtgtgtgtgtgtgtgtgcgcacacacatggggaggtcagcagacaacttttagaactcagctcttacttctcctttgtgcgtcccggtgacagggactcgtacccatgaaatctcaacaatacagctgcctaaacaagacctgaacaatgtaacagtagctgacatctgcacgtgaatggggaaatctcacaaagccccacccctaggtgaagagctataggcaattaacggcttctaagagagagaaaataggcccttgccaggggctaggttatccaatccacagtcagccctaaacacatatgcacatgagcacagtaaagggattcagcaggctctatgtatatatatagtgtgtgtgtcccataatcaagatgaagccaagaactcgagataaagtgtgtataggtaaacacggaaggaattgaaatgggaagagggtgaggcagaaattatgtaaatacagtattcatgtatagaattctttttaaaaaatgaagtaagtgtaaaaacaaataaatgaacaaacatttaggtatgggggaagctttaaaagccaatgctctagaaagaaatcttaccactgggcattcccataataaagcatcctcaattttttctgatttggaacattttggcatttcataaagttttcttggctctgatgcaacactggggaaaaaagaaaaaaagcactagtattaatattattcattattattatcattattagttgtagtagttgttttaaactgaggtagtctttgctcagacatttcttttgcatgcctgtagcacccagatcccaactttctattgtcttccttaactgttctgtctttttttttctaatcacaaatttgtaatacacaaacacaagaaaaaaatgttaaaaaaaaaatcaagagagatggttcagcagctaagagcactgctactcttccagaggactcaagtttggttcctaccctcacatcaggaagctcacaactctgtaatccaattccagggcatccaatgctacgggagcctcactcacacatgtctatgcacacagaggcatacacataaataaaattaataaaaataataaatcacttaaaacaaacccacattttggtttatcttccagattttccttatgtaagtaaagtcacctggagattgctttacaaaatagtattatactgaattcttaattaaatccttaaacattcactgtaaatgtctgttgaattcactgagtttatcctcttgctcttaagaaagataatatacagattaaaaatagaaggtcctgtaatgtgtcagctagttttatatcaacttcacacacaagagtgaccagacaagagcgaacctcaaataagaaaaagtctataagattaggctgtaggcaacaacaacaaaaaagagccagtgctcttaactactgagccatgtctctggcccttagcatttaaaagccgggcgtggtggtgtacgcctttaatcccagcacttgtgaggcagaggcaggcggatttctgagtttgaggccagcctggtctacaaagtgagttccaggacagccagggctacacagagaaaccctgtcttgaaaaaccaaaaaaaaaaaaaaaaaaaaaaagatcaggctgtaggaaagcctgtaggcattttcttaattagtgactgatgactgtaccactgtgggtggtaccattcctaggctggtggtcctggtttctctatgaagcaggctaagcaagccagagggagcaagtcagtaagcagcattcctctatatcctcctgccgccaggttcctgtcacgtgtgagttcctgtcctgactttcttcagagatgagtagtgatggagaaatatatgccaaataaacctctttcctccccaagtttatttgatcatggtgtttcctaacagcacagtaactctaagacatattattttgactgcgcacttgtggatacaaaaagaaacactctttatgcctactttattcctttcataaatattaaatatatgtctatttctactatctttgaacatatatcttccagcaacttcaaggtagcctgggaaacatttcaggggctttgccagtgccccctctctcaggccaccatcccccaaactacatacaccctctttacctaaacagtgaaaactgtatcctggatgcttactttggaaacaatcttgcccaagctgtcctcaagcaatcccccttgcctcagcttccctgggctgacgctacaggcccctaccccacctccagctagtctctactctgacaactactgagatgcagtcatagatgtctttttttctttctaactgacgaactttaaagttcaactactgagaagagaaacaatttccaggatgacattttattcacctctggtattctctcagtaactcaaaggtttaaatcaaactgaatgtcacaggagtgaaagcaatctcatgtgactctaactgtgggtgccaccctctgcaacagaacggtgaagaacacctgcatcatttatcactgcgacagcaatcaatggcatttactctgactgaactttttaaaatcaaaataactgtctctgacttgggaaggcaacaccctgggtatgaaacggtgcctaagagtcactgttaacactgcaaggcagaggatgggcatcatgagaatggtgtaagagaatgtccagactgccactgctagaatcagaggcttatagacactgccttctggaaaattgaagaaatgaaaggaaaccacttaaagcctttggctgttttcgtaaaagcatagggagaagcatttattccagaaaatctcctggaattcagtaaagacagtggaagcccacagtgtttgatccaggcatgttcccctgcatccttcttctagctcaacaagatgctatcacagctctaaactgttatgactgactgagtgccaggatctgtcccctgctgctctgacttggaaggcaatctctggagaatgggaagggtgaccctgttttcatccagcccaagccatgagttgttggggctgagtcctaccttagtatagttgaaagttggggctcccatggagactctaccttgggtataactacagtgtagagtaacagggccctaactacacttttctttgtaaggtcccgattggccttatctttctttcctggcctgagcattccctcagcttcctaaactgctcagctttttctgttaggggagtcactgcattgactcccatgaccagctccgtggagtcgacttgaagactgcctgggaaaagaagcaggccatgaaacagccccaagttctttctaataaaactgactttacctgcaacagatgcagagaatttcaagtatgtgtgtactctgtcaatcactggaagttacatccaagggcgaatcgagggacatgggtagattcaccagcactaaaggctaataaattgtaggttgggcgatttgccaaagaaccaaaaaaaaaaaaaaaaaaaaaagatacctcctggagtcaaggcaaacctcaaaaatcactagtctctctgacttccagtttctgatcccacaagaaaagaacttaggcgttattaatcacttctgagatagttccagctggtgccctgcaagcatgaggaccggaatttagatccccaatactcatggttttcctagagttgtggaggtggagacaggcaaattcatagcacttgctgaccaggctgtctacaggtattctagcttcccagtccagtgaaaggagaacctatctcaacaaggtgatttgctccggaggaacaacaccactgaagcttggcacacagaaaaatgcccataattcttacagatgcaaagtgaaagataaagagcggcaattccataatcccttaatccaggtgacgggcatggaagcatcaattcactgtgtcgttctcttcagtctgaccttgaatggatggaggctggctgttaaatactatttatctacaaatactatacttttgtttgaacattttttttctcttgggaaaaaaaaaaaagtacttctaaaacaaaatgcctgtctcctaagcagcatctaattatttcacaacccattttctggactctgatctttaaatgggtataaaacagcaaactgtgctgagaaacgtattattttgcccgtgctataattttgtgtgaaataaaagtatttacaaagatgaagtccgaaactttagacttaacgagtttttaagatcacatgcattttccacctagttttattatggactcattttttttttttttttcatcttccaatttcactaagtactaaagaagccacgtggttctataaaaactagggtcaggtggattatagcaaaaaaaaaaaaaaatcatcaccaagaatttacctgctgacacagcaccggtaattgtcaaaatatattcttcctctctcataggctataggtgacttggaatgagttgtccaaacattcttaaatttagtactctcctgaaagacacaaagaatttcagtttaggaaagaactcagtcccctgctatggaaccattttcggtgggtagttgaaatctacagttttaaagtacattgtttctccttttttttttttttttttctccctctgcccatagatgtcggtttagttggatgcccaagttttgaatcgattgtttgcaggaaggcaaaagaagctttttaaaaactacgccaggcggcggacctgagtacctattttctaataccctaattgcgggacacggatgcccctccccacgtaagaccctcaaaggggtatcagagcgcgtaaaaaactgcagcccggcaggaggttggaccccgggcaccccgacttcggcgggcgtcacctggcacaccagcgcccgcaggatgcccaggttcgtcctctgcaccacgcctgcgtcgcgtgcatagaagcccagagcccggcgactcagcctgcggcacacattggccttccgggtccggcccatggagactaggggtccgcagggcccaggaggggcgcgcccctcacttccgcgaggggtggcagccgccacctgcgaacctcaagggaaggctgacgcgggaccccgcgctggggactcggggcagagaccaagaggtagcgacacacggatttggcgcaaaggaacagaatcaacggcgccttcctggcccttctttctgctctcgggattaacgctgcacctcgcggccctccgtagccactccctctcccggaaatgtagtccccttggccttttccgcccctctggcttctttttcagaactacaattcccgtcaggcagagcgagggctggcctggccccgccccacccctccctgcccctagcccgcctctcctggccctaataggctgcgccgtagggctgcgcagtgggtcgggtagccttccgggctgcacgcggtaaacctggatagctttggtgggtgctgtgcagccacctggtggtgtcgcttcacctgtgtgtcccaggaagctgtccctttctgccctggtcgtgggacgactgccaacccctcctttggccctgcaaggctctggccacgcgtccagaggggcgttgtggccagtgggaccctccaaaggtacgccccgtggctttccctcagccgcacttgggacgttgtggatgaggttgacttcaacatttagttgtgtaaccactatgcttttgtatggtaattagtggtgaaagttgctgtttttcccatcaaagtaggattgaatttctccttcccaaaggctcgtccttgtgtggccagcggggaccctgactggttttgtggtaattgctgtgttttcttcctccttccatttttcccccttatagggaataaaatatgaaatgtttgcattcttattgaactgcctaagataatccaggttgacttctctaagtaaaaaataacattctctgtgaactagctcagcctgcgtgttcaaaattactaacatactaaaaatttccgtaactgtataccaaatgcgacccgtaacctcattgtaaacccctttagtgtggtgtctgcatctcccacatagacttaatagacttggcatgccactccgtgatcttaagtgcttaaagaaaaagtcagtaagcacaccagctttctgatcgacagaagtacagtacaggatggatgtgctggatcaaacgttagccgtttcattttgttgttttaaatggaaaactcttatacccttgatgcatttccttcggggtctggcttttttgtttgtttggttgttttgttggagtttttttttttccccccctgatatttcatgacctgcttatagcatacggtggagtgagtgctttgtatatttttagaaagctccacaatagttaatttggtcattcatgaatgcagctgtcactgaaatgctggaacccagaaaaatatagctggattttctttggctgaagcgaaatgcaaatcattgctgaattgcactcatcatttcctttttgtctttcttgtcgcagctcttgtctttctgtgctctcccaccacggctgagctttggtttctgtgcttgtttttcacatgacttctaagatgccactatgctccactattaccacaaaaacagtagcaagtagtgggcatattgtgatcataccttccgcgcattcactttaacatattaagtcccaacaactggatgcagaccacccattcagacatgagggccatgcccctcacttgctgctctactgtaatggcgctgtctgtcttggtttggaccaaagtccccccagtttctcccaggtctgaatgcttaacctctggaagctctgtgagcttgagaagtctgtttacttgcttctccttcacgtccactcttaccagggtggtacttcaaggccagttgtctctcagtgtttttcaggtttttccacgaggcatcaagcctggcccctaaatcatcatagtaagtggtttctttcctcacagtcgacagccagtgagccggctgagggactgcacaatattcacggcttgggcagtccccattctttcttacctggccttctgaatactcccttcctgtgctattgatcttgccactgggatccctaaggagagtcattagaccatctctgcctctcccacaaccaagtacttttgattctatttctgtccagtcttttcatctcagtagttttatgccttcctgttttctatcccattattaattagccttctgattgttcttcctgcctacacttggagactctcggttcccaacctgccttttagagagtgatttcactaatgcacaaagctgtcacatcattcttagtggctcctagttacccaccgcagaatgtctcaaaccagaatccaacccagagtctttcattgttaaagtatttttagtatgttaaatgtatgcaaatataaaaccatatataaaaccctatgtagcttttgtgcaactataataaccaggctttttgtgaactaagtgaagcagagctatgtaaccagtaaattcaagtgcacacttattctttttgtttgtttgtttgtttttgcttttgtttttgtttttgtttttccgagacagggtttctctgtatagccctggctgtcctggaactcactctgtagacccaggctggccttgaactcagaaatccgcctacctctgcctcccaagtgctgggattaaaggcgtgcgccaccactgcctggctaagtgaccacttactcgttgtgatcatttgtactgttttactggaccttaaaaatccagaaagcaaatccatctgtcctggccttcttggtacacttctcttgcattgagacctatatatatttttctaatgttacagattaatcagtgctcctagtatttatttaactcacgatgagactttcccttgctcaatgtgccttgactttctttgaccttccctggacaacatcatttacatacagtaagtgtcctagttactttttttctattgctgtaatgaaacactaagacccaaacccaggtccaccagcacagggatggcaacacccaccacagtgggctgggacctcccccatcaatcagtagttaagaaaaagacctacaagcctgcctgcctgcctgcctacagcctaaggctgtgaccccaactataaaattattctcattgctacttcataactgtcattttgctactgttaagaatcataatgtaaaatctgtgttttccaatggtcataggtgacccccgtgaaagggttgtttgaccccaaaagggcctgtgacccgcaggttaagagttgccattatggaggtatttttctcaatttaggtatactcactgttgattctagtttgtgtcaagttgacataagactagccaggacttgttaattaatctgcatgttgcttgttgggtagtgcacccataatctcaaatgtggggccccaaacccaaaacagcagtcagataaaaggtgggcatctagatgatctgacctgttttgttgttgttgttggtttttgtttgtttgtttgtttgtttttgttaaaattcttttttcctttttgaagattttttttttttaaataaaagcaagcatccatgcaaagggatgctcaatgacaggactcttgaggcttgtgacaacagagtaggtttgttctacaatgtccagaaggctgctgtggctcttgtgttaggaggggaatatattcagagcagtaggcagggacctagtaagtcgtgtccagcctttcaggttgaaggaaagagcctggattcgttctgttgagacagaaagccacaagaggctttgaggacgtgggtagcctgttctagtttgttttaatgacatccgtttggctgtagtgtgaagaatgcaccggtgggcccagcttcttaaactgaatcccacccattatgggatcccatgtctgaatgtggggcccatgagaaatttggcagtagtaaaaaggtttctgagtgcacagacaagaagtaattaaaacatcaaatgtgggttgaatctgacaagtttccagcagtacttgttgtgtacattacagcctgagttctgaacgcacagtgtgcacactttccactacacatgctgttacaccacagaacacacttcctgaaaggtattagctcagatgcaaggctattgtatcctaggagttgccgtatttgtactgtctatacaagctcttctgttcttacagaatcataacggttttaaatatggaaaacatctttgtattttcctgccatcaagcctcagcatgtgaggaccaggttattatattcttaggctacacggtgttagaatttgatttgaaatttgctgtttgggttgcagactctagtttcataaataaattgtgagatgagttttggcttgtgattagggcaggatttccaacaatatctgaaaaggtcctacacatgcctcctgccagtttgttctaggtatttatgcaaattggtattctcagcagtgataattataaaatctatatcttatcacgcggccaagatttaactctctcttattaattgatttgtgtgtgtagcatgtgcatgtgtatatgagtgtgaatgtgttctgattacctttgaggcagggtctcattgaaccctgtgctcacatctgacagtctgtccatctcggctcccactttgctgggtacagatatgcacaaccactccttgcatttttttgtgtgggtgttaggatccaaactcaggtctccatactcattgagccgtctcccaagcactgagattcagctgtttctacaaatatacacaggctatgctgaacatggtggtgcatgcctttaattctagtattccctgagaggcaggtctctgtaagttccaggctagccaggactacacagtgagatatagtctcaaaaacaaacaaatataagcatatctatatcattagtatgaaaatttgcttttatctttaaaaaaattaatttttattaattttaaaaagtctcactgtatatggttcagactggcctcatattttctgtgtaattcagtctggtcatcctgaggtcctgatcgtcctgcctcagcttcctgaatgccgagattgtagctgtacactgccatgcctagctacaggtgtatttcagaagcacaggttagaggacttcttgttgtgggaaatatttttaaaaaaaaattaaccggcaagcttcctgcgctactgccagcaactctcctccctggcacggtttccccagctctcctgctgggccaaagctcccgagtcccctttgctcctggccagccccacgcaaagaccacaccctaccacaatacccatttacacggtagaaacaaaattctagaagcttataattaacaagttagatttatgtaccaataaattctcagttcacaagatgccattacaataatttcagaaacaattgataatgataaaagctgcccacctagattagacaaatcatcccaaatattctatccttttatatcataactacctgtggctaccaccctggatctggctcatcttcctgtccaccaagtcttcatcttggctcttctcttttctcctgagactctctctggctctgcaactcttaactccgcctccctttcccctgtccaatcacagaccttctgctgtgctaatattttaatgtaattgaacagggaaaatcctgtcacaacttctgatataatggatgttggggatgggaagagaaaccagtgcggctgtggctgtgacacagttgggagtgtgcttgctctgatatgaccctgaggtggtttgttactgtacagaaaagcagcttttaacttaaatcgagttaaaatatttagaacttttctatggtgttaaagctttgtgattcttgtttaagaagcccttaactttatgtcacaaattcccccccccccccgcgccctaaaaaactttaagccaggtggtgatacatgcctttgatcccagtacttaggaggcagagatagatgaagctatgtgagtttgaagccagcttggtctacagagtgagttttaggattgccaggactatacagagaaaccctgtcttgactcccctctccctccaaaacacaacaacaacaacaacaacaacaacaacaacaaaaaacctttgaaaatgttgttnnnnnnnnnnnnnnnnnnnnnnnnnnnnnnnnnnnnnnnnnnnnnnnnnnnnnnnnnnnnnnnnnnnnnnnnnnnnnnnnnnnnnnnnnnnnnnnnnnnnnnnnnnnnnnnnnnnnnnnnnnnnnnnnnnnnnnnnnnnnnnnnnnnnnnnnnnnnnnnnnnnnnnnnnnnnnnnnnnnnnnnnnnnnnnnnnnnnnnnnnnnnnnnnnnnnnnnnnnnnnnnnnnnnnnnnnnnnnnnnnnnnnnnnnnnnnnnnnnnnnnnnnnnnnnnnnnnnnnnnnnnnnnnnnnnnnnnnnnnnnnnnnnnnnnnnnnnnnnnnnnnnnnnnnnnnnnnnnnnnnnnnnnnnnnnnnnnnnnnnnnnnnnnnnnnnnnnnnnnnnnnnnnnnnnnnnnnnnnnnnnnnnnnnnnnnnnnnnnnnnnnnnnnnnnnnnnnnnnnnnnnnnnnnnnnnnnnnnnnnnnnnnnnnnnnnnnnnnnnnnnnnnnnnnnnnnnnnnnnnnnnnnnnnnnnnnnnnnnnnnnnnnnnnnnnnnnnnnnnnnnnnnnnnnnnnnnnnnnnnnnnnnnnnnnnnnnnnnnnnnnnnnnnnnnnnnnnnnnnnnnnnnnnnnnnnnnnnnnnnnnnnnnnnnnnnnnnnnnnnnnnnnnnnnnnnnnnnnnnnnnnnnnnnnnnnnnnnnnnnnnnnnnnnnnnnnnnnnnnnnnnnnnnnnnnnnnnnnnnnnnnnnnnnnnnnnnnnnnnnnnnnnnnnnnnnnnnnnnnnnnnnnnnnnnnnnnnnnnnnnnnnnnnnnnnnnnnnnnnnnnnnnnnnnnnnnnnnnnnnnnnnnnnnnnnnnnnnnnnnnnnnnnnnnnnnnnnnnnnnnnnnnnnnnnnnnnnnnnnnnnnnnnnnnnnnnnnnnnnnnnnnnnnnnnnnnnnnnnnnnnnnnnnnnnnnnnnnnnnnnnnnnnnnnnnnnnnnnnnnnnnnnnnnnnnnnnnnnnnnnnnnnnnnnnnnnnnnnnnnnnnnnnnnnnnnnnnnnnnnnnnnnnnnnnnnnnnnnnnnnnnnnnnnnnnnnnnnnnnnnnnnnnnnnnnnnnnnnnnnnnnnnnnnnnnnnnnnnnnnnnnnnnnnnnnnnnnnnnnnnnnnnnnnnnnnnnnnnnnnnnnnnnnnnnnnnnnnnnntcctcctcctcctcctcctcctcctcctccttctttgttatttgtacttttcatgtggttttacacttaagttccacagaaaacctcactagaatttagaaagtagattgtttcttattttatgtgtatgaacgttttgtctgtatgtatgtctgtgcactacattcgtgcctggtagaaaagggcattggatcccctaggactggaattatagacagtagtgagctgtcctatcacttgtagaaactgaatccaggtcctctgtaacagcagcaagtactctgagccatctctccagctccctccctcattgggattccgactgggatatgtcaaactaaagaggatgtatagccaagccttttccgattattctgtaaacagtctttcctcatttctttagatcttctttagtttctttgcagtttgataatttttccttcaaggacttaaatatttttcatcttaatatcatatattttttaaaagaattatttatttattttatgtgtatgagtacactgtagctgtcttcagtcacgccagaagagggcatcagatcccattacagatggttgtgagccaccatgtggttgctgggaattgaactcaggtctcctggaagagcagtcagtgctcttaacctctgagccatttctccagcccttaatatcatatttttttattacgtattttcctcaattacatttccaatgctatcccaaaagtcccccacaccccccccacttccctacccacccaatatcatatttttagtaaatgttataaatacatatgtacatatatgtttgttttgctttcttgtaacaggaactcattatgaagttcttgggtctcaaacttagccttccagccatgtgggattacaggcatgtactgccatgcctggctaaaaagtatggtccaaatttgatcaacattttgttttattttgtaatgtatttagtgtgtgtatgtgtgtgtgtgtacacttgccattgtgtatgttcggaggcaaaagacaagtttacagggtgtgttctcttctcccactttgtgggttccagggatcaaattctgatcatcaggcttggtagcaaatgcctttacctgctgagccagcttgctggcccaattggatttttttttaatattacacttgttttgagaagataaacatgcataggtcttctgtaaccttgtcagacttcctctttaattgtaataatggttgctgttggtgtccgaagtttttttccaatgttgatttctctccggaaattgtgacaattttgttaattctctgccctttgtctttcatctttatttccccttttactgtcttgacccaaatttgcagatgagtttctactctggtaacaataatgataattcactctagtatttataaagagagtagctacaactgagaataacgtttcattttctctgccagttaaagttaaaagacaggaaaaacctcaagtgcagctggtagcagcagagaaacctcaagacacaccaacaggatggggtcaaaattggcagatgaagaaaggcttgtattgggagttaggaaacacattcatgtcgtggacacagagaaaaggaccctctgtcactcaggagagctgagatgtctagtctcttcccaaggaccggggtttaaaatctctgaagggtcttcctccctgacttaagagttggtcagtttgaagaacacaggaccgctgattggcttacaaccattgtgtaaacatgtcctgatctgccaagatctcccttcctgcctgctggagcatctgtgtaactcttagtcccttaacactgcaggttgctgacggctcatcttttatcaggttaataaaattctctcttgtttcctattggctacatgttttgtttatctgatcaactaggcattgaatgttatcagcgctttctgtgtatatgctactgtggtctatgactttttctctctattttgataatgtggtaacgttagagttaaatgacttcatttaggtaaatacggtgacatattttgtttttgtgcattgtgggctttgggttcctgctggctccagtgctcaatcagctctgaaattttggtttctgaacatttctttctggctttctggctcagtgatgtatgttgttaacataatatctattttttgcttgtttacacagcacttgtggggggtgcagcatagcaaaaaggcttctgaggtgtcgagttcaccaagtttccagaactacattccatttcctcgtttagtcaacaaagaatagaatctaaatgaccctctgagccccttcaacactgcgcaagcaatcccactcgaacggctgcaaaggagtgtgtagttggaagagcctcatagcaggagtgtaaggcatgttgttgtgacagcagctcacttactgagaccttgactgagtcatctgctgagtggatacttcaggactgaagtgagatcacagatgctcacagatccaagcatcacgtaagggcaaaggatgagatgcaaatgtgatacacagtgcactctgttagagaaaggacatcaggggcagaaagggtttagcacactgggaactgttctttttagggtgataaactattttatctaaaactataatgatggtgtgtttcagaaactaggatccttacattccagagagaggaggggaggggaagaagggcgagtaggggagggaggagggggagaggaagaggtagcatgcactaggatcaaacccaatctcttgtatatactacatactctgtcactgagctatgcctctggccctgggtcaaagcttaaggtatatataagctagggagagtaaggacagaatgcatgaggaaagaatttaagtatttatacatatatgcaatgtggctgggaacgtgtagcttaaggacagaacacttgcctagcaggtacaaggtcttgagttccatccccagggctatacactaccgcctatccacagaacagcagcgaagtccagagaaacagaagcatacactggttctcctgcaaggggccaggagaagagcactgatgtgagcagctctgtaatactggaggtagtgtcatggttgctggggagacacagatggtactgccgtaaattcccttaccagtagggacttccactcagatacagcagaatccttgactacactgtgagagcagccggagtaaggcaaagttcaaatttcattaagataagagagtgtgcacactttaaatttaaatgcagacattagaaagatttgtacattttggtgtctctaatggctctgtatgtgattctatgggcttctaaattgttcaaggggtgtaatttataacagtttgaagattaattaggcaaagcttaaaatttaagtagagtttaaataagtaaaaatgggctaagtgttggcaggcagttctttgagagttcaaggcttgcctcatctacataatgagctccaggccaacctgggctaaatagtgagaccctgtctcaaaagatacacacacacacacacacacacacacacacacacacacacacctcttaaatatatttcttatattcttaaagaatttccttttataaatgaaattgtaagatgttttaggggtttatggctgagagacagatactaatactggttttttggttttttttttttggtggtggtgggttttttggttttttgtgtgtgtgtatagccagggtttcactttgtagccctggctgtcctggaacttactctgttgaccaggctgatctcaaactcagagatctgcctgcctctgccctgagtactggcatgcgccaccaccacccggcagtactaatactgctaaagtcaaggttatatttggccctaagtaagtagtttgttgattttaacatccttgtctgaccagttttttgaaaaggcaatgttgagtcagtaggaacctgattcccagccaataggaaaggcaagctaacttcagggtgagggccttccttcccatctcacatcccttatgtctttccctggctttctagattgcttctgttcgaggtgacaacagaagccgttcttccgtggacattggaattgaacaattagtgattaggtggaggtgatgagaacagagtttcttatgatcagagtggaaagatttaggtgagaaaataggggagctagctcgatgcctctagtcattagggtcagggacgctgctgctgctagaagtgaagagagagagaatggtaggtttcaacattgttatgttagaaaagagtggcagcgtcatagaaggaagctgacctgaggttacccttcagaacgagaaacagactcagggccaaagacagccaagaccaggccttgaaatgggaaagcattagaagaagagagagccatcgtgtatagccagatggaagacctaaagagacagacccttcagctctgaacacaagagggagtttctgacacttgtagggttttttttggagggggatgggaaagagggcaataagttccataccccatgatgcagcctggcctagcctatgtgagaggagtcacaaggcaggaaggcacagttaaaaatgaagccatgattcaaaattgccttggtcttgggcagcaagggagacatttggcttgatttttcccaacctgcagtcagtgctttttttgagaggagagactgaagaggacatagcctgacctgtgaggcagcagctctccctcgagcaggttcaacttctggtttggtggagatgtagatgtgtatatatgtaaacacttataggcatagatgggaatctggttgcttgcttgcgtatgtacatgtatttgcctgctttgccaaccaagagggtacagaagcaaagacagagtagcaaagagcacactccctcagcacccagactccaataaaaggaaaaaggctatttggagaaacggctggttgtagtgttggatcgagaataaatatgatgagcttgtagcatcctgcaatatcagggcgtataaagtgctaaaaacagaagcataatgatggaggtatatcaaagggtgtgtgtgtgcgcgtgtgtacacgtatgtgtgtgcttatgaaaggcagatgttgactttaatgttcttctctattttagttaggtttctattgctgtgacaaaacaccatgaccaagaggaacttagagaggaaagggtttatttatttcagcttaaaactttctggtcacaatctattgcagaaagaagtcaggtcaggatctgaagggaggaacctaaagcaaaggccatggagaggtgctgcttactggcttgctcagcctgctttcttaaagtacccaggaccaccagcctaagggtagcgccacccatagtgaactgggtcctcaaccatccatcttcagtccaaaaaacgcaccacaggccaatctggtgggggcattttctcagttgagcttccctcttcccaaatgactagcctgtgtcattgatagtaaactagcctctatcacactctatgttttgaaacagggtttccctcttgctgttttggctacgtggactggccagcatgtccccaggatccacaagtctctgtccaccgagctctgggcctacagacttgcacctgcgtacccacattttacgtaggggctggagatcgaagctcaggtcctcatgcatacacctcaaatacttaaccactgactcatctcctccgccccagctcccacttccttttggtttttaaattcctatgttttatttgaagggaatagcccagtatcctagtgtggcctttccccatcccttttctggtctgtcttttaaaaatgtttttaaatagcataattattagacgtaataacgagtttcattgagccaatttcatgtacccacatgatgtactttatccacattcacccccatccctccctccatggctgcggatccttttctcttcccaaccacaagcctccctgcaccttcagtggcttttgttttaacccaggaagtttgattagtggtgttacaagagtatgggtgtcccaccactgaagaaaatgtctttctccccactgatcatgagctgtgtataaatactcaaggaagagtgtggggtcctgtgagcccctcccctcccgtgacacagcgttgaccaggctgatgttgtgcacatgttgtgcagataatcccagctactgtgagttcaaagctgcagttgccatgttgtgcctaagttcagcataccacaccgctcccagtcacttcaggctcttaaaatctgtccatcccttactctgcagttttcctgagccttaatggtggcggtggagtgggattcaactctcccacttaaatattatattgattattaaaatggaagtgacgtggcggttagaaaacaacttggtggagttgggtttcctttttcacctttgtgtgtgatccagggatcaaactgaggtcaccaggcatacacagcaagcgcctttctgccgagccatgtcaccagccctgggagtcccactatgactggacattcagcagtcatttattctcagcacgttgacccgttaagggcctgagctgccctctgactgtgcaaaaagaaacttctccgaccgaagctgacaccagcattaatgtgagtgcaaaccatagaggtttcttttaaaaaaacagtacaagtggggaatggagggggagtgacaccacagtaaaggaactcatctgactgcttcagccggcaatcacggttatcagctgtgacagccatattgacagcagtgcctccggtgggatgtgtcattgtacctagtatgtgttaaggcctgggttcactccccagccccaaacagtccccagcaaacctcatacccttactgtagtcctaagaaaaaatgataaatgtccaccaatgacattctgcaaaatacccacgcctcaaaacacagggtcctcgaaatacaagtctcacttttaagaaacagacccggaagacatggcagccagttgtaatgtggcatcccagctgggattctgggagagaaaaaggacctgagggtgggggtgggaagaaggaaggaaactggactgaagtatgaagaagtttataataatgtattctactgttgtcagtggtaacaaatgcaccaggatgattcaagagccgaacaggggaagctctggcacgtgagcaggaactctgtatatctatctgtagagcggttctagactgttatttaaacttgtggagcagttatataaagtttaaataagttacttcgaggtctaagtgagatgatagcaggatgaaacgatttagagcagtgtgtggtaatatatacagattctgtttaccatcaccaccttgttctttagcttagggcatctttgtggttacagctgaatctcactgccttgctcttctgcatatcggttttggggttagcatgtcaacagagcggtatccccaatgctgtattcttaaaggaggaaacagcaagattgtaaagattcatgagaaagcaaggccagaacttaagaacccctcccttttttaaaatgtatatgagtgttgtacttgcatgtatgtctgcgtaccatgtgtgtgcctagagcctaggttggtgacaggaaggtcttagatcccctagaactggagttatggatgttgtaagccaccatgtaggtgctgggaactgaactcatatcatctgcaagaacaagtgcaccttacctctgagccatctctccagtgtgaaagttcttaactttagtttcctgctttgcaagaggcagtgactgagcgatgccgaagccacgagcctggcaggggcttctttctaagcgcatagacggctgcaataagatcctgaagttgacgttttgggttttagcatatttctgattaagatcctggttgtttgtttgcttgttcgtttgattttggatttgctgttttgctgtttgcttgtttctttgctttttgaaacagggtctctctgtgtagccctggctgtcctgaaacccactctgtcgaccaggctggcctccatctcagagatctgcctgcctctgcctcccaagtgctaggattaaagatgtgcgccaccatacctggcaaggtgtcctatttttttgttttggtttttgactcagtatctcaggtatgtggcactgactggtgtgaaactcacctttgtagtccaggctggccttgaacttgcagcagacttccttcctttaccatccaagtgcaggtgtgagctggaactcagtgccaggcatgtgaggccaggcccttttcctgatgagccatcttatcagccctttttcctttttttttttttttttaatttttgaggccaaggctcaactatgtagccctggctggcctggagctcaggatccttcttcagccgctggaatcctgtggttatcagtgtggtacgccatgcttggtttctttatgatgctttcttattactactctaagttagtacaccaagtcccacaatgtctctgatggaatatattcaccgagcagcttcaatttgatatttctgtttggtatgaagaacgaaagcaatgttttagtcaggaattgtctttttcagcaagcagttccaagaaccagttcccaaattcctcactgaaaaccaaaaggcaaataaaatgcctgtgattgggaagttgtctctctggagatgcccagcagagggcgggagagctttcccggggctggcttccgcttccttgcaagactgggcagacctgactagggccatctgtgtttgcagtctgatgattaacaagtactagaaatgaaccgagcgtggtgcatcagaaccacagttgctaaatgaggagagaaaacgctataatgccaagtggccgtgtagagctgtggtcagtagagcacaggaggggagggaggagcaagcgggatgcaggcaggtgtcccatgcctggtaccaaccaaccaaacacagggactgtagctacaatgtcatgggaagcgtttaatgatataaagcgttaactatccctatttgatatataataattttgtgtatagttttgtgtgtataattttgaaggaaaaacaaaaaggcaaggtggcaaatgcctgctatggttggtgaataggagaagtttctagatcactggaatttgacatcctaatggggcttcagaaacctttctagagagaatgccacctagtgcccgggctaactgcttccccctccttctctccactcatggttattatacagaacttgtatactttgtaattttaaaaataattgttctgtacgtaaaaaggtatttcgagaatatttttgttgttgttctttgagaggcggagacaggaggatgagttcaaaaccagcctttgctacattgcaattttgaggccagcctgggttacctaagaccctatctcaaaacaaacagtccaacaaacaagcaaacccaggaaggaacatttcaaggctcattgagctcatctgtgagcctgagttaaggtccatcatcctagacagtacctgcgcgtgcgcgcaagcatatgtgtgtgcgaggtccagcagaggagaccattcataaggctttgttccttcttctctcccctactcagacaatgtttttctatattaataagtttaaggttttggcagcgttttgcatggatacttggttttcctctctatagatatgcatttaataatttaatcagcacttataaaaataactatttatactttccagcatatgtacaaacagtgctgtgacaaatatttaacatattctgattattttacagaacatctttctaaaaataaaattttctatcatgtgttggtatggtggtgcgtacatttaatccccgcactatggagccagagccagaggcctaagccgacttctgagagttcaacaccagcctgagctacacagagagttccaggccagcctgggctacatagagacccctctccccccaaatctggaaataatccgacagagttattgatttgttttgtaggtggagcaaagctttttccaccctgagtgtggtttttcatcttgatattatggaaaatattagttcatcaattagttggtcctccaaatgttgacagatttaattgttcaaaaataaaaagtattttacccttagcaaagcaatgcacaagtactagaaagctgctacctcccactggttgacacacgtttactagaattttattttatttatttatttgcctaaatgcttgaattctatcaaagacaatgtatggtgtctgttattttcctgacaggcatactttgattatttttttggaaaatgataaagtaaaaattgtgctccaggaagacactttttatggcttcattaaaagagatgtgtgagtatctggctcccctgagagtatacagttagtgaaggagacagtggctctcagtgtgatttgttgcctctgctttggttgaggccagcctgctgtcactatggccatattatctgtacaccatcaatggactacggcaattagcaaaaggtaaacagcatattaatgttattatgataaaaacaaaaacaaaaacaaccttagccgggtgtggtggcgcacacctttaatcccagcactcgggaggcagtggcaggcggatttctgagttcgaggccagcctggtctacagagtgagttccaggacagccagggctatacagagaaaccctgtcttgaaaaaaaaaaacaaaaaacaaaacaaaaactaaaaactccctgacctctgaagatccttcgtgggtaagtggaggcctttggggaccacatgagaacctgagctcttagtggctcacagaacccattctttcacctaagagtggcttggggatcatttgtgactcagttcctgtgaaacctgagagtgtgggtcttggggggagggtgtgagaaagttcctcattcctaaaaagggacggaagaaagaagtggtccttttctttctcgggaggcgccgtgtcagtgtgagagctggaactgctgcacccattttgtaaccaacaagggcactcagcctcagggtacagaaatctccaaaggcgtgcggtcagtggggtaaacatttcccaatggcacttcaggacatcagcatatttttactgaggtcatcattcctagttgttttctaagcattccttatgtttggtaataaaagtggtggcgcacgcctttaatcccagcactcaggaggcagaggcaggtggatttctgagttcgaggccagcctggtctacaaagtgagttccaggacagccagggctacacagagaaaccctgtctcaaaacacacacatacacacaaaccaaaaaaaaacaaaaaaacaaaaaaacaaaaacccatcctaatagtctgcaaatatccccaccatccttgataacattcccgaaatcttttctcatgcattttatgagtgtgcaggtccatgcacctgtgtgtgtgtatgtgcagatatatcactctctcccttattgccttgagacagggtctctcactgaacctgaaggctgctgtttcctccgctgacagtccagtaagctgtctgctgtcttctgcctgggatttcaggcgcacacagctatgctggcctttcacctggggtttaacttcatcttcccactgtcggagcaagggcccttaccactgagctgtctgctcagccctgttgtgtctgtcttttcatgtgttatagtttaggatcatgtttaaaagattttttttcctccccactttttagaaatatttgtaatttctctaagcctattaaggtatattaggagctggagagaaggctcagaggttaagagcactggctgctcttcctcaggtcctgagttcaattcccagcacccacatggcagctcacaaccatctgtaatggttgccctcttctggcatgtaggcatatgtgcagacagaacactcaaatatataaatcgctttaaaaatatatatgtgtatatcttttaaaaatgttatttatttattttgatggaggggtgtgtctgtgtgccctggcacagatgtgcaggtcggagaacagcttgcaggaaccagttctttcctaccatgcaggtcccagagatggaactgggactattgactagtggagccttcactgccttaagacgtgattgctttatgttcagagtgtaatttgtccgcagttttgatgttccatgtggagcagagagagactatttctcccaaatggcaggtagcccattttcttaatgtacttctttgaataagccatttctatctaatccactgactcaaaatactagctattacaggcagactttttatatgtattttgatcagtttctgggcttcctaaatctcttgcttttgctgtggcattagagacatggcctggactggctggttttagaggatgctactcggcctggcagagaagcacactctcactgcaccgcccagaagccctgctgggtcttgccacattgcccctctcccctctaatgttctcttggcacttctgtatgcttgtctcccccccccccaaaatgaacctaatttacttacactacttgttcagattccccccaaaacactttcagaattttgactgggattactgtaattttatagatgatttttgagaaaatttacctttttctctctcttctacagccatgaatctttacctccagaagttcacatactgtctcttcattaaagtactcactcatgtcattctgtggagtaaagtagctttcttttaccagtcctgtatgctatttcttggttggatttgtaaagatcttgccctgcctgctgtgtgtgcaagagtacatgcgcgtgagtgtgtgcatgaatttgtgtgtgtgtgtgtgtgtgtgtgtgtgtgtgtgtgtgtgtgtgttttaaagaacatttcttcttgtttgtttggtttggtttggtattggcttttcaagacaggactattttagaactcactttgtggaccaggctgcccttgaactcatagatatccacctgcctctgcctcctgagtgctgggattaaaggcgtacactgaagaatttttaaacacactcagctcaaaatggcttcctcaagcagaggcgcacagtggtgtggtgtcacagtatgcactgtgaggtagatttataagctataactgttgaaggctgtttaaggaacctaccagaaactgttaccttaatgaacctggtctctggagctggtttctttgggaatctgcagcaacaactcagaaaacaaaggatattgtcctagtgccaagagcttgcccaggttgacagtatggaagagaggactagcctgctgggagcagctccggaaatggtctttcaaagctaccccgttattattgggggagatcgtaatgtcttgatatgacttattcaaagggatgcttgctgtggtcacagatacagtttggttaagcagcaagcacgcccactgtgttgtcgggcagcagggagatggctgacaggtgttaggttttgttgttgttattgttgttttaaaagaagcatcatttaatcagattgtttctgtgttaaataagattcaagttgccccaggcagtatggattggcagggtttcagctatctgggaagatgaaatttgccagctttctaaggccatttgaaataaacaaacacatttcttttcatccacattatggatttaaaaagcatgtgtgaactagcctggtatcttaattaccacttcaaatgctcctgtggagaatgtgcttcttggagtgtagttgtagccgcgttggtgtaggagtcgttgcctagtgtgcgcgaggctctgggttcgatccccggcccacttgaagtgggaatggggctatgggaacttgaaagtggctaagtgctgggtcatccttagctacatgcagttttaggccagcctcaagtagaagaccctctcaaggaggaaagggaaaaaagtgcttgtgagccttttgctgtcttacttttggaataagcccactcataggctggagattactaagacatctgtatataagataaaaatggaactaacaatctcattatctgtcatgacatttttattcatggaagtttccaaacgttttttttgtctgcagtgctagagattaagccaagacccctctgtgcccagcaggcattccaccaaccagggttacagggccccagccctaagctatccacaaatgtactagtcgggtttttagcttatatggtttcttgggctaaagtgtcttatgtgtccatggctatattcttccatgccttggttcgtgggcatcatttcaaatgtgacctttcagaatggcccggaaggtgtctgtgaggacaacgcctcctccctcagatgctggcacagccagtgtgttacaagtattctgggagaccagagcatgttcatctgtatggctgcattcccagctcagagcctctattcagaagactctcaggggatctctgataagatgcttcgtcctcctctgtattattcagttctgcccctcccctcccaccagcttcagccggctataataggcctttatttttccaggctccttaactattttctcatctatgcgagacccacctggtcttcacccggtgctattcctcaggggaaccggaacacaagcagctgcgtcctccctctgtttctgcccgcactgttgcagcaagagacttggtattactgtcagtttgacttgtcccaactgagcccttcaacaccgaattactcgcaggggttggtagggattaattattcattaattttattgggtttctttctcttcttcaagcattaaggggcatcctttaaaaatgttctggtggggtggctggaaggaaaaggtgtttgaaccaaacctaatgatcttggttcagtttctggaacccacacggtaagagagaacttcctcaagtttccttctgagctctnnnnnnnnnnnnnnnnnnnntatatatgtatatatacattcatattctctctctcatgagtgtgtgcactctaaacaaaattgttttaaaaagaacgaactccattttacacgtgaacctctaggcttcagtacagtaagtagtggggctgatcctgtcatcagctttagcattctttcccagcccagtgtgttgctggcttgggaagttgggactcccatagagctctttaagctaagaagcttcctggtgaagagcttggttcgatagccacagagccctgtggacattctaaggagagccaaactgacgctagccatggtgacatttggctagcatcagacgcctgccacgaacccagcactatgcctatccctcctggaagcctcctgtattttgaaaacaccatattggccacatttattaaagaaaatcaaaatgatcaaagtatcatgccggaagttgtggagtgacagtgacagaccccagatgcagctcaacccacactcttcaccacatcaagcaccacttcccaagagtcctcccgtgctcctgcccaacttggagtagttgactgctaaggagaactaagagtagaaccttctggaacagaatctcctgacaccatatttattcctcaatgctgagaagtaagggactgttacaagaaaaaaaagaccaaaaaccaaaaaaccaaaacattctcagcttcctgggttgacgtaaaatgtgtttactatgttgtctgtgaacacaaatctaggtatgtgctctttgtgcacagagcgcctattcagccataaaactggaataagtacaaacactacgacaaaaccaataaaactcaaactaacagcattatactgtgactgctgttttcccagggaagctaaattgcagctctcattataaacaaggccatggccatcaccacacaggttcttttgaccctggcccatctgtgccgttgtgtgctgtgtgtctgctcaattccctcaccgcctttctctgttcagagtactgcggaatctttttacagtgcactgtgttctcagatgcatcatttacatattacatctgtgctgcttgttgccgacaagatcataaatgcaaacacaggcgctgaaaccaagcagcggttacacgtgtgctcgtgttgatttggctttcagattattatcataataaaaacccagcgacatcatcatggaacccttgtttgacaaaacctacttgagaaggcgtgccagtggggaaactttaccgccggctggcttgcagaagagggaagtaaggtggtgaatggggagtccagctttgagcttttctccaagcccaagtgtttcnnnnnnnnnnnnnnnnnnnntctcactcaaaacagcatgtccctctcactgttagtgttactgcttttgttactaggagacacagggtagccaatttagaaggctcagttactaaacagttcctcctgtctgtttcggccccttatttctgttaaacctgggctgccaccacatcaagtctatcaaccacgtgcgcctctttcacgtgttcctttatcgcttgtttacttattttcagtgctggggaacgaatttgaccttgaacgtgctggataaatgccccaccactgaactacatccccagctttcagagattgagacagagtgcagggtcttctgaccagcctgagtttcatagtgagactttgtatcaaatgggagtgagagataacagaaagatgaagctgatttaaataactgtgggaatgtgttggctcaatggggtgaggagacagaggcaggactggttccagtgacaatccatctacgggatccaggggacatagcttctcatcgccttcttagttttctgtactcataattgcctttcagcttgaatttatatcatgctctgctaaggccaagtccatctgtatgaaacatgagtgttctcttgccattctagttcctgacccatttgaaacctcatgagcacattcttaaaaaaaaaaaaacaaaaaacaattctcctctcatatattaattacatcctgaccacagtttctcccccatcctctcctcccagctcccctgccacctcccctcctccccagatctactnnnnnnnnnnnnnnnnnnnnnnnnnnnnnnnnnnnnnnnnnnnnnnnnnnnnnnnnnnnnnctcttccatttcccttcaggaaagagcaggcttcccagggatatcaacagaagaaggcataagaagctgcagtaagactcggtacctcccctcatattaaagctggacaaggcaacccaataggaggaaaaggctctcagaagcaggcaaaaagagtcagagacagctcccactcccgctcttaggagtcccacaagaacaccaagctacatatgcagaggacctaagtcagaccttacaggctttctgattgttgctttagtgtatatgagtcaggcctgtgagtcttgattagtggattctgtggactgttttcttgtgtccttgacacactctggctcctacaatccttcctcctcctcttctgcaggattcctgagctccaactaatgtttggctgtgggtctctgcgtcttctcctatcagctggatggagcctctcttgattatgcaatctaacaagtatagcagagtatcattaagaatcatttcattgactccttccttccttccttccctccctcccctctctgtccctgtctctgtctctctttttttctgtttttgtttattaattttttattttttatttgccagttgtgcttggttctaccctaggtctctgggctgtctagcctctggctcctcccactccaggcagtgtcacgtcaagtgtgggctctctcctggtgtgggtctcaagttagatcagtcattggttggccactcccacaagttctgcaccacctttatttatcccagcacatcttgcaaacagtacagattgtaggtcaaaggttttgtgtctggattggtgtcccagtccctccactggaagccttacctggttacaggagatagctggctcaggttttgaatctccctttgctaggagtctttgtaagttccagggagtttccattgccctaggtttctatatctctcctgatttgtctcccaattccagtcatctctcccagtgctccctccctttatccccacacctgtgcacacctgatcccacctgccctagggcaccaggccacttcctatctctattctgtttctccttcccagggagatccattcaacctcctttgagccctccttgttacttagcctttctgggtctgaggagtgtaacacaattatccattagcttacagctaatatccacttataagtgagtaccctaccatgtttgtctttctgggtctgggttacctcactaaggatgatttttttttcttgttccattcatttgcctgcaaatttcatgaggtcatttttaatgatcttttttaaagacaaccgagtaatactcagttgtgtagatgtacattttctttatccactcttcagccgagagacatctaagctcttttcagcttctgactattacaaatggagccgccatggatgtagttgagcagtgtccatgcagtaggataaggcatcctttgggtgtgcccaggagtggtatagctggctgtggacgttggtactctcaccagcaacggaggagggctctcctcgtcataagcacattcttgtttgtttgtttgtttgtttgttttccgagacaaggtttctctgtgtaaccttggctgtcctggaactcactctgtagagcacactggcctcgaactcatagaaatctgacagcctctgcctgctgagtgctgggattaaaggcgtgcaccctcaccacccagacatgagcacattctttactattggcattctggtcttctaaactcccaccggaatggcccgttaagttctgcttacaagagtctaggacttctttggccagaatttccaacctctttcacattcttcagaccagttcccaaggcctgtgatccacatggtcagatccatcatggtggctatcccacttcttcagaccagtgttctgtattagttaccttttcttgatgctatgcaaaatacctgactcaggcaacttaaggaatagtttattcagacgtgtggtttgaagggtacagcctgctgtggtggcaaagcacggtgatggggacttgagttaagggatgacattgcgcctgttgtgtagaagcagagagaccactgtcctcagactgccctgctttattcagtctaggtgcccagtcgacagggtggtgccactcacatccaggggcaggggccttccctcctcagttaagcttctttggagacctccttacagacaacatgcccagaggtgtgtctcaatgaagactaacggctacagtgtatgcatgggacatgtatatgcacatgtataaaacgtgaagatgttttctttgtattggcctctgtttatattaaactaaatatgacttcacgttgctgacctcacttctaacctggggccatttgaactagggcactttctccctgtgtctctggcttcccccttgagcgtgagaaacccagcttctgctgctttccatctgcccatcggctgctgaatcccggcttgcttccagggctgcagagctttcctgcccagctcaccgagcctgtattgcccacatccttccatccagaattactcatttgtacacctcttctcttccttccttctcaaaaaaagtttgtcagtttttaaaactgggctactttttggtatacgctctcaactttctttcctggcattcagttagcactgtttacactacattcttatttatttgttggggggcatacgcatgccaggcccctgtgtgtggaggtcagaggacaacttagaggagttagctctctccttccaccatgcaaggcccagtgattgaacacatgtcctggggctttacctgctgatctatttcaccagctaccttctctctctctctctctctctctctctctctctctctctctctctctctccctccctccctccctccctccctctctctttcttctctccttcttttctttccaccctctgcatgctggttcttacctgaaatgtcctagcttttacctttttctccctggctagcccttactttttttattttctatttttgtttttttggtgtgtgtgtgtatgtgtgtatgtatgtatgtatgtgtgtatgtatgatatacccgtgtttatgcacatttgcatatgtgtggtcacacatgtgtgggtacaggtgcatgtggaggcacaggtggatgtcaggaatcactcccaattaggtttccgccttattcagtgaggaagggtctctcagtcaaaccaggggctcaccaatattgtaggtctcagtagccagcttgctctgggagcctggaagactagaaggccaacggaaatgtaaagactgctcatggtatttcaaaggggccaggactgtactgggaactagagttgtgagagactactcatgttctatattaatgtccttggcctgagcagagcatagtataaattcaagctgaagacaaattggctaaaacatctccactttctgaggctggaattacagggaagccgcagtatgtatccgctcacagtatgtacgtgggttctgggcatctgagctcctgtccccatatatgcactgcaagtgctttaaccactgagccatctctcaaccccctgctcattcttctttgctcaacataaatactgcaggtatcgggcagtcctgagacacaggcagtaactcacagctcaccgtaacacaggcaccgcttacccactcttccgtgctttaacactggaccacacttgcttctgctccgcttcgcctttaccgcacactgtctacaattcataaggttccgttttgttttgagcgggtctcattgtatatcctaggaccttgttgggttggttgctcaggctggcctcagacttgaaatcttcctgcctcagcctaagtgttgagaatatgaatgtgagccctcagaaccagcaattatagttctttaaaatagaattatgcagtgctatagcctctgccagagtaaatcgcatctgattttgagtttgtagatatacattcatttggatgtatgtcatctattcattgacgatatagctcaagtttttcagatctaatatgcgttcatgacatgaaatttttataatattctcttctcagccaggacaagcttattgataaaggaagtccaaacatgaccaagtaaatcttgcatatgggcacaagtgtctctaaagagaaagacctcaacaggggatgggaaagcagggtagaactccagggtcttagccatgggaactttgagcacacttgtaacggctgctaataggtgtgcatgcatgtgccttagggccatttatcagcacaccaaaccaactaacaatgagagggctgagttagcagagccaggctgaccccaggacaagctgcaaactggcagtttgggagactaggcctaagcttctgtttcccagaaaggagaaccaggaacctgtggtcagtccactgcagccgcaggcagccaatcggaggacgccttgtcttctggcctgaagtaagactgggtagcttgaatgagtgagccaccagaagtcgccagagcctaaccaattgtcaggcccctggagatagagctaaccaatcaacttaaaagggcacacgcccctcctggaattctcctacctgacaataaaagctgggtccaccagaggtctccattcccaaatggggagacccctacatgcaggaaattcagctaaataaaagctctttgcttttgcatactatttgagtccagcaaatcatggaccctaacattacctccaaatgttactgtagcatagacatgtaaaataccaattggatgagtttaaacgagttttattctgatccatcataatgtatgtgatgacattcccagagtatctaaaataataatcccttcagatattttggattggtgggaattcctgaagtccctaacttagtctcttattcctgagtcctttgtgtgggaaaagactgatgtagccacctctcaggacgatcccggaaaacactaaccatgagattcccattttgaagctgcagggtgactgacgtcatagcatgatcaaagtgctctgcaagcacttactgtaattattgttgttgttctgttcctgctaataaccttatttataccctgaaattataatcatgcaaagaaagattaaaacaagatgtgcaagttgcggagctgtttgccttgcagatggtcaccctcggagttctctgaaattgccagggttaattgaagcttcagctttcgccccagtgtagttgatacttaagtgtttcttacctgtcgacttttactctccaaaatagtgcaacaatagcactttaattccctctcgttaatgctaacctctcgggtaatgtttagcgtggctctatctagatgatgtttgcgcctctgactaaaacctttgcaccagcttcccagctgagaagaaaagctaaacagttacagaggtgatttgcttatttcaaagcggctcagaacctaggaaactctgaagtggagttaacttttaagtggtgggcagacagttagcatctgattagcacgcctctctcctctcccctggctttcagggagccgagacaactgggaatcattcttggggagtcttacaaataggttttgcctggagtcggcacattgctccaggggtagctcttgaaagtttcctatgaacagaatttcttgctctgtttccttggcgtgcctctcagccctggaaccccttgtaaacttaggatcaagcttaaaaagccaggaagttaagacctcttccttcctctgtgaggccgtgctgcttgcccagtggaaaaacctgtggtaaaatgtgactttcagtgatgcaagggccctttgcctgtctcttgaggtttgagctctgcaaagaaaatgtactctccttgtctggggctgggagctcccagctgcattccttgttgactgatgaaggcccaagagaagatgcagcagtgagaggaggagggagagaaggaactctgggcttccttaaatcagttgcaaaaaattagcaactgggtgaaaacccaagaatcagtactgggatacctttggtagatgtggcattcaaaagtagtatgcacatgagtctctctctctgtctctctgtctctctctctctctctcttctctcacacacacacacacacacacgcacacatatacatatatattctctaatatatgtatatattttagtgttttataagtaatatatagttttataaataaaatatttattttaaaaatgctgttctaacacaaaagggtagagccgagggagagagggagggagggaaggaagggtagaatgtggcttctatgttagactacttacattggattcatctgttcttttttttttaatttttatttatgtatgtgagtattctgtagctgtcttcagacacaccagaagagagcatcagatcccattacagatggttgtgagccaccatatgcttgctggaaattgaactcaggtcctctggaagagcagtcagtgctcttaaccactgagccatctctccaaccccgatttcatcggttcttattgggcgataaatgagtatatttaatttgttattccagttcagaacacagatttcctttgttctttattgattttttttccctaaaataataccctttggtggaaatggaggttcgaactatttatgattacaaatatttgaaggttggcctggcggttcagaaggctcctgggggatttagagtctagcctgagtaactggtgaggcctctcagaaagattttttttctaaagggtggtggggatcagggaagtggctaaaattcagtggtagagcttgaaatgtgtgagacccttggttcaatatcttaacaccagaccaaaaaaacaaaacaaacaaattttgggggaaaactgtatgtgtactgaacacatatagactaattccttatccctgttccctcagttgtacagtaaaacaactgtatacgcagcgcttacttgtatagtataactgtatatacaacgcttacattgacttcaccagtgtaagcactggaggaaaatgcagatagaggaaggacttacggcctggctcatcaccttctggttggcgtcctcagcacaacaagaataaagtatgctgggaagctggtcctgtcactaaagtgctcgacatacaagcaggaaaacctgacttcagacctacgcactcatgccaaaaacctgggcatggtggcttgtgcttgtgatcccagtgtgcagaggtgacgccaggtagatccctgggactcactggccacacagagaccttgcctcagaaaaacaagcggcagggagggagatgaccaagtggcttagagcacttgcagtgcaagttaaggacctaaacttgaattgtcaagcacccacatgaaaagccaggcatggctgtgtgttcttgtagccccagtactgagaggggggggggcggcggggaggtgtcctagaaatctactggctagccagcccacccaaacgagtaagcttctggtccaatgagagaccctgtctcaagagaatgatagaagacatacggtgttctactctatcctttatatgggtgtgcaatggacttaacacacacacacacacacacacacacacacaacgtgagaatcatttttatgtgtattatgtacattttacctataccagtagactgtgttgtagttggtatgggtcggcagttatatgaatccctgaagagggggatacatttcaatagggagcatagcatttggcaaaagttgtgagtcagagcaagctgtttcccacaagctttccttccggtcagggcggctggttctgtaactaagtttaatgtggtagtagtggtagtggttggccactggtcagtgggtatcaaaactatcttgtcctcggcttgccctaatctgtgcgggacccaagccatttcagacattgttttttttttttcccccctcaaattctaacgtagagagacactgactcagtcagtgttctattgctgtgaaaagacaccatgactatgtcaccgcttctaaaggaagatatttaatgggcggtggcctacagtttcagagggttagtctgttgtcatggcgggttagggagcatggtagcacgcaggcagacgtggagctgctgaagtagctgagttccagtctgggtctgcaggaagacactctcggcttggcgtggggttttgaattctctaccaactccagtggcaaagccgcatacctcctaatcctttcaaatagaaccactctgtggctaccacacccacacattcaaatataccctatgggggcctttctcattcaaaccaccacaccttcttacacctagagctggcaggaagcttgctggctaatcactgcacacctccatgaccttggtagcataaccactgctgtgggtggggacgctgtcaatcttgatgcttgtgtgaccattctctccctcctgggtttctgttccttaatgactcctatgaagcctaggctctgagctcagaagggttttctcttggtcacagtcagttcaccatgccccttacaggattcacgaggaaggatcatggcaaggtgctgacaggagaaggaaaagaaacgccatgtggtaacatgtgggcttgaaatggcacactgcgatacgtgagggcatgcaaccacatctccagctgcagaattaatcagagctcagacgaggccatatttctctgctctgaactgggaggagtaccacaagctaaatgtagtcacgtaacgatggggctacacgttctgagaaacagggcaatagaggatttgctatgatatacacatgatagagcgcactacaccagtgtggatggtatagccgtaggtcacagcctgtacacctcgataataaacaacctatgaacagtgtccctgcacagctagcccaggctcctgtacaacaaccgtctctgttcatgtgcctgtaggaaaggtgtgctaaaaaactaggcaataggaattttctttttcacgttattatcttttctttttcccccaccgtaatcttagggaaactactatatgcaatttgtctgtaaccagcatattgctatgcagctcatgactatatcagcctcagcaattaaagtataataagaaatgctgagaaaactcttgcctaggctttcccttgtagatatcctcaaattttattccttgcaaatttctttataacctgagaatctaatgggaggcaccatcagtgggaaaattgcgccataatgatgtggccacattcagtccttttttcatacaaattcattttaattctcccagcgacgctagcctcaaaagaggagctgaggcgtgtgctcatctgctgtagggctgtgactgttgggttgttttttcctccatcacgccccacccctggatgtttggtgttttctagtgaggccatgtggacctgcaccctcttagtaggaaaactttgttttttaatgtgggaaaatatacctaaaagaagatttagccttttaatccttcccaagtgtgtggtttcctggcattaagcattcatgttgtagaagtattgccagcatccatctgagggcttttcatttccccagtggaaactgcacctcgttccttggtccagcttgttttatcttgactttgtttgttttgtgttggctgtattgtttgtatttcatttgttctattggtctgtggtaggggtaggttttgctttggtttttgaagacatagcctcactctgtagtccaggctggccttgaacctttgatactcttccatcagcgccccaagtgctagaattataggcatataggcaagtacagtgacatataggccaccatatttggctagcttccttttaaaattgtatctgtaagatgtgcagcaaaacatttctatatcattgcatgtatgtagtgaagtcttacgtagttactctttgtgtgtgtgtgtgtgtgtgtgtgtgtgtgaacatgtgctttttaaagttaaaatttaggttagcatataaagtattgaatctgatcatgccatttccatacataagaacataaactttaaaaacccgtgttgtaccttagttctctagatgtgctcatcctgcgtacaggttgatgtgttctccctgagatcactgcatgctctatggtctgacctgtgcccacgagacgttctgaccccctagcctcccctcaggccagcaccactctgctttctgacaatatggatttttattactctaagaacctcctctaaaacgaacagtgcagcctgtgtgtgtgcgtgtgcacgtgtgtgcctgtgcatgtgtgtgtgtatgtgtgtgtatgtgtgtgtatgtgtgtgtgcgtgcgcacgtgtgtgcctgtgcatgtgtgtgcatgtgtgtgtgtatgtgtgtgtatgtgtgtgcgcgtgcgcacgtgtgtgtatagcgtgtgtccttctgtggctgtcctgtttcactttgcttgaatgtctttaaagctcttccctattgtagcccgtgtccaactcctgtgccgggtgtgccttattcctccttcagagaacgcatcactgtctactttgccactgtgaatctgagcgtacagacgtcttttccggtccctccctgctctcattccttctggatatataccccaaaatggaattgctggctccgggtctcatttttgggaagttcactgtactgtttccatagcagctgcatcattttacatcctatcagcagtgtgtgaggtttccagtttcctcatatccttgccaacactcgaattttctgatttattctttacatatatgtgcatgtgtgtatatataagtacatgttagtcatcatgattttttaattgaaattatgcactcattattaagtttaggcctgcttagattttttttcttgtgatgttttagaaagttattataggtaagttgtttttcaaagttatatatcccataaataaatgagtaaagaattgtctgtaatatattttagttttccagtatttatgaggtctgtggtagcatctcagctttcattcctttatgtcagaaaagtaccatttttatgcagtcaaaccatccacaaatagcagtcctgcttctagaagcttgcagtttaatttgagaactttaaatatattaaaattatgtatttaaaagattttctgtgtttctgctagatttattagatatttatctaattaaggagattagatagtagtatagcgccagatgtggctattaaatatgataaagaaatgaaagagatagatttctgtgtagtcggttatagaagtaactgcctaaacaaggaaatcgccacttgcttaggccctgaccacgcagagctctgtccactgtccagcagccgtcaaagcacaggcctgacattctgttcatagccggtctgtttttgtcgttttttctgtggtcatttaagtgagagggactttgctttccttccctttttttgaacagtgattagaatcatgtgatcatttgaattgtttgcatcattttacattttgagcatattgcctgtctctgtgggtgtaatcagtctctgctctccagcatgcaggacattgtatgaatagataatgtggaaaggtctaaagatagttctgtaggtagagtgctgctggtgttgtgtggggcactgactggaaaaagaacaaagacacagcagggtaaaggcagcagagctgcatccaggagaagggacaaacaaggagctggggtgggcagtggctgttgctcactggtggagccttttaatgcccaaccaagctcttttattaaaaccccaacaggaaaaatcttgatttttttattttattttaattaattaattaattttttttttttgtgaaagtgtagtgagatgtttttgacattctgcagttcgttttgagcaggatagtaaagggtgtttactacagcgtggttttatgtcgagtagcacctctgatagccctcgatgcctgtcccatacgtgttacccagagccggtttctcccaactggttacagcagtaggctgagtgccatgaggaacagctgagccaccagacagcagcagcactgacacaggaggctccctgtgaacacgtttccataaagacttgagagcgctgtgtttaccagaacacacttacagtgcaataacctttaaattctagattatcaacaccagcttcaactcatgattcttctcttgagctagaactgaagtgcgtgtgttgtatgggaaaataaatatatttgcaacagtacaccaactattgaaaagtccacatgcgtagactactgatccaggagcacagagggtttcccgttgtttagtagctctgtgatttccttttttagacgtagtctgtagaagactttttccttgactagacatattcctaaatacttaatctgggggtggggatgcattttgaatcttttttcctaacttctttctctgagagtacattcttgctatacatggaatctatcctgcaactttatgtaggtgtttattgggtctggggttttttaggggacccaatagtgtcttttaactaaaaaatcatgttgtctgctagcaagatagtttgacttctttctttcctgtttttatcattttatgcctttgtcttgtctaattgctacagcttaaactttgagcactctatcaaatggtcccattcctgattttagaggaaatggcctcagcttgtccctggaatggtggctgtagatttgttgtgtatagctttattattttgaagcatgctgcttctattcctaaagtctccagtactttccttgtaaacacatattggaatttgtcaaatgccttttcagcatcaactgaatgaattatgtgatatatatatatatatatatatttatatgctgtattacttttatatatttacatatattgagccaacctttcctttcatggatgaagcccacttgttcataatgtttaatcttattatgtctctaaatttggtttgcaggtattttattgaaaaattttacatatacattcaaagaaattcatctatagctttctttttctcgttgtgtctttgcctggttttggcaaactatttgaatgcttgttgagtagttaattagctgtttgtgactttgcaggtcctgcttaggatgaatgtgatttggagaagttgcatttgccgactgaggcaggggaaggtaccacaccgatgccagagtggcgtccacccggtagcccctctggggtcgaggattttaactgaccccgccaaagtttttgaacacaacatgtggtgagtttccccccactcccctattcatgtatttatttgtgaaacaggaccacagagcacgaatggaggccagaggacaagtttcgggagtcttttctcctcgtccaccatgtgggttctaaagacccaactcagatcatcagactgagcagcaagacgtgggaatttgatattatttatactctttaggtgtctttttcccattatgaccaaggaaggattttttttttttaagacagactcttctttgtagccctggctgtcctagaactcactatatagaccaggccattttctgattcctgagtgttgggatcaaaggcttataccaccacaccctttgagaaaggatttttttttcaagttgatgatattaagtgaggttgtaaaagtccgaaagcctgtgtaaccaacactgacttacgtgttctgaacttctttgcaaatggaattgaaaagagacgttccctagtatatccagcagcctttgtatcctttatgccaaggtccccgcccctgcctggccaggctaccaccaggtaatggagtgatggccaacaggctcttctctaaatgggggcctcctctgtatggccctgttggttgaatttgtcatctccagcctcagcctctttaagtagcttgtgttacagccgacatccactgggccagccttcctggtgctccacaggtgtgcgtcatgtgcacattctgtaccctttgcctttcagtgggaccctaatgaatgctttgaagaaatccctgttatttgggaggatagatgtctataaaaggcaaaaaaatgtcaacatgaagcctgaagttcaaagggcagagtgctatagaccacttgccatatgaaaaacaactcagtcatgagaagctgcttccaaagtgggtatcagaaaggaacattgttgtttcaagacagtttcctgtatctccggcaggccttgggctctctctgtagcagaggaggatgtgaccttgacccattgacctactttttccctcctcccaaaaattgggattacagggtaagccacctgtacagcttagctaggaagagtttgtaaattgagaacatctaaaattagggttatttattttgccatcagtacttggggcagtgcctaacacaaaagtatttgttgagagccaggtgtagtggtacaagcctttaatctcagcactcaggaggtagaggcaaatggatctctaaggcaagcctgctctacatagcaagtactaggctagctagagctacagaataagactgtctccagcccccagccaaactccctcccaccccaccaaaagtttttgttgatacttatagcatagctgggtacaaacataaaacagcacagatgaggatatataaggcattttcaggaaatggtaaataatattttgtttcggggtattctttggatcttcagaagatctgtgaaagataaggttggaatggtagaggagagaggtcgggtgagagcaagtttccttgtggtgctggggccagagctgacatccaggcaccgtagagtcactaaggagggatgacgttgtagaggctggatttgctgacagtactctggacagattagcagcagcaaagggccaatgaaaaagactatgaaggaagaataaagagaagttggcaggataaaggaaatggaggaatttgattttgaagttttgaacttaggtcactgatagaaataggtaaagtcatagtttattttttagaaaaagattgtatagatattttcgataagcttttagaggacattccatttcaaatgtccaaatactatgcttgaccatagccaagattcaagaatccattaaaatgcctggaatacagatccctctgctaggaagaaggtgatgtgtgccgcggggctgaagatgtatccaaggcgactcccgagggagggagactcagctcaccgcattgcctgctgtacggcctgagctctcgtcagagacgcctgcctgccaaggggagctcatggtcttggcgcacatcacagggaaagatttcagggaccagtgagtacgaagcaaagtcaatgtttattaaggaaagtgagggacttgtgaagaataattataatacatgctaggggtggatgtaatggcccacacttttcaccctggaatttgagaagcagaggcaagacttgaatttgaggccagccttgtctatacagtgagaaccaggacagccagagctacatagcaagactcggtctcaaaataaataaattataggtgatgatgatgatgatgatacatgctgagattaaaatattttcagaggaagagagcaggagagggttagaaagaatgttctagccttaagaaaaaagnnnnnnnnnnnnnnnnnnnnnnnnnnnnnnnnnnnnnnnnnnnnnnnnnnnnnnnnnnnnnnnnnnnnnnnnnnnnnnnnnnnnnnnnnnnnnnnnnnnnnnnnnnnnnnnnnnnnnnnnnnnnnnnnnnnnnnnnnnnnnnnnnnnnnnnnnnnnnnnnnnnnnnnnnnnnnnnnnnnnnnnnnnnnnnnnnnnnnnnnnnnnnnnnnnnnnnnnnnnnnnnnnnnnnnnnnnnnnnnnnnnnnnnnnnnnnnnnnnnnnnnnnnnnnnnnnnnnnnnnnnnnnnnnnnnnnnnnnnnnnnnnnnnnnnnnnnnnnnnnnnnnnnnnnnnnnnnnnnnnnnnnnnnnnnnnnnnnnnnnnnnnnnnnnnnnnnnnnnnnnnnnnnnnnnnnnnnnnnnnnnnnnnnnnnnnnnnnnnnnnnnnnnnnnnnnnnnnnnnnnnnnnnnnnnnnnnnnnnnnnnnnnnnnnnnnnnnnnnnnnnnnnnnnnnnnnnnnnnnnnnnnnnnnnnnnnnnnnnnnnnnnnnnnnnnnnnnnnnnnnnnnnnnnnnnnnnnnnnnnnnnnnnnnnnnnnnnnnnnnnnnnnnnnnnnnnnnnnnnnnnnnnnnnnnnnnnnnnnnnnnnnnnnnnnnnnnnnnnnnnnnnnnnnnnnnnnnnnnnnnnnnnnnnnnnnnnnnnnnnnnnnnnnnnnnnnnnnnnnnnnnnnnnnnnnnnttcaaaatatagtaacatttttttaaaagttaaaagcattctttcttctttttcttaaaatcttttattatttaaattcattttatacatcaaatatattaataatattattttgagaatctaataatacataaaaattgttcaacttttatattcatatcctttcataccctaaaaatatcattaataaatatttaatactatccgtagttaaaatcattcttattatccatagtccatggcagatgcaggcatatgcttttactataaatatggttcataatcttgtttataatatttttggtttttgttttttgtttagaaaagagattgtagttctttgcaggtggtttggaagttctaatcaagagacttaaacaggatcccagagtgaggggctccttgtccttcctgggagtccttcattccggtccttctgtttgtccgaggtctatggagcagggtctgtagaggtgggaatgcagtttgggtgcttcttaggaatgcagtggttttctaattagccctgcgttatgcagtgacaaaggtaataaccacgcatggttacagaacactgggcgtgggtcgtctaggcttgggtgtgctggaagggcttaggagatgacttggagcttgccacacaggcctggggacctgagatctatccccaagatacacctggagagaaaaaccgaagctggctgtggtgtcacatgcttgtgatcccagggctgaggagggggagacaagcagattcctggctcaggaccaaccagcaaagatgactcagtgaaccctagggctcactggccattgagagagactctacctcaaaaagcaagatggatgaccccttaggaatgacagctgagtttgtcctttggcctccacaagtgcatgtatatgcacacacacaggcaagcactcatgcacagatgtgctgtaagagtttgaaaagttagcacaaaataaaaggtaaatgatctcgttttatattgaatttcattttaaactgattaatatgttgggtattttgagttaaatggaaaaacgtatttaaaaaaatgtttttttgttttttttttaaacttgttttgcttgttttgttctgtttttctaagacccggtcttcttatgtagatctagttgtttacaaactgcaaaccctcctgccagcaccttccccaatgctggaattacaagattctttttacttacagggttttgttttgttttgttttgttttttggttttggtttgattttggttttggttttttcatttaattttattgaggagggtgagatacgttttcacattataacccaagctgtcctagaactgactgtgtagcccatgccggcctcagactcatgagcaatcttcctgcctcggccttctcagtaccaaggttacaggtgtgagcgacacacttaacttttctcacttaaaaaaattgcattaagtagaaaacttgaaattacgggttgcttcgtgatattatatttcttcacaatttataaaagacaagttaaactgccttgactgtcactttcgatgtctggtacatagccttagagagcacgggtgccttgctagaccatgaatgctccagaggactcccttgctggctaagtccccaactactctgtctgttgtccttgcatctgcggccgctgtccagctgcacaggattcttgctcgctgacttacattctgcctcatcaaggactcttggaaatccatcatcatttggtcctgggaggcttagggctttgaaggactagagagttctgttgctctcagctacagagatggtccagggtgttccaaatgaaaagcatctaggaatgctactagcagccagggtagcagctctaaatctagtccggtgcctggacaactcgccctctgcaagagaaccttgtttatgtgatgttttaacgtgaaatttagtatttaaaaggtgaagacacaggcacagtgatgcacttgcataatctcagcacccaagaggctgaggcaggtggcttgctgtgaatacaggccagcctgggctaccttatctccaaaaaacaaaacaaaaataaaccaccaaggtggacggacggttggaggaagtagatgagacccaggacatcccttctttcctcctccccttctcacacgctctgggagtcaagacgcttgttggggctcacatctagatagctttctttgtccataatgtgcttccgtgggggtccaggctgcactggagtgcctgtgacagcagtaagaatggcctgccccaaggagcagtgaaggccactgctgccctcagccctctgcatagcctctgccatctgtttccttccttcctttcctttttatttctaaagtgtattattgggctggtgagatggctcagtgggttaagacacttcccaccaagcctggcaacctgaatccaattgccaggccccgcacggaagacggagagaatcaacttctgcaagctgtgctctggatgctctacaccacccctctcacacattcacacccgcaaacacacaaacacacatatacacctcatacacacaccacatatacacataccacatatacacacatacacttacatatggcacacacacactcttacaagcacacatgcacacacatacacacactcacaccccctaaatacacatacacagacaatcacacacatatacttcatatacaacacacacgcacacacacacagacacactcacacacgtacaattcatatataccacactcacatacacatacacacacacacacacacacaaccagtcaatatatgtgactttcagcatttattattgttactgtcattttggccttcttgagacagtctcactgtgaagcacagaccagcctcaagtgctgtctctgcttcagcatgcgagtgccacattacagactggttagcaccaccacactcaatttgggttttgatttacagcagatttataagtttattcttttttttttccctgtaagtccacagttctgtccaaaatcactcgttttcctccttattttttttcagaatgtgtttattgttttgacacatttgatttcttaaaatgatgtttctagaaaaatacagtttattgcatggatcagcatgtgtagacagtctatgcacatataaaatagaactgagagtagaatagttagttttcaccatgtgagctgtgtgtgcacccatgctttctggtttatttgggtttttttttccctgtttctatttctaaatgttagactagcaaaattgactttatgactccccaaagggttgtgacctttagctaagaaaacacagagctaagtcattctctggagactcaaggtaagacctggatgttgcaacatggcctgttacataaatcatgggaaaatggaccatttccaggatcagaagatggcatgagttcttcttcagtatataatcttccttatgtagtcatcgtatttactgtctgagtccatactgtgttctatccttagatcttcaatacagttaatagtgcatatctcctctagcatgacttaccacaagagacactgtctggacatggagagcacagactcaatggtttcctaactttgagaagctgcttaatccatcccttgctcggtttttttatctgtgagataggataataatgtaataataataggataataatgtacctatcagggattgtaaggattaaatgattacatataatataaaacatcactgtttgtatactaaataagaaatatgctacctaagaattagctctcagtattatgatttatgtagactttatttatacagctgttttcatagctattattagaccatgattttgcagaaaaggacttagatctgtttcatagcagttatctttgtatactgggtacccagtaaccgtgtcctagtaataaatgcattgtagaaattggaagatccagtccctggctatcagaagtttactaggctgaaaattaatgtagtggctaaaggtgggcttcagagtccaagaggtctaagttcctgtcccaactccatccctgtccagtggacttcagagtctaggagatctgacttcataccccgtgtctgtccctgttcagctatgtgagcaggttccatcatggacctcctttgtttaaagaaaatgattcaaggacagctcttagcaactctgactagaactcactaaaggcatccttatggccactatcaggtgaagaattgagatgcacaattataagtaaacaagaaaaaggaatgtcactatctggtgattaacccagtgcagagcccactttatatgagtggttagacttttacctgagttttgaaggatgagacatgctaaagagacttttcttttcttttcttttccctttcctttcctttcctttcctttcctttcctttccctttcctttcctttcctttccttttccctttccctttctttccttttccctttctctttctctttccctttcccctttcctctttcccctttcccctttcccctttcccctcctttcctttcctttcctttcctttcctttcctttcctttcctttcctttcctttcctttcctttcctttcctttcctttcctttcctttcctttcctttcctttcctttcctttccttttcctctcctttccttttcctctcctttccttttcctctcctttccttttcctctcctttccttttcttttttttcttttttctatttctttttggtttttcgagacagggtttctctgtatagccctggttgtcctggaactcactttgtaaaccgggctcgcctcaaattcagaaatccacctgcctctgcctcctgagtgctgggactaaaggtgtccttttcttttcttttcttttcttttcttttcttttcttttcttttcttttcttttcttttcttttcttttcttttccttctctctccctccatttctccaccctcacactctctctctctctctcagatttatttattattatacctaagtacactgtagctgacttcagacgcaccagaagagggtgtcagatctcattatgaatggttgtgagccaccatgtggtgctgtannnnnnnnnnnnnnnnnnnnccttttccctttccctttccctttctttccttttccttttccttttccctttccctttccctttccctttccctttccctttcctttcctttcctttcctttccttttcctctcctttccttttcctctcctttccttttctttttttttctttttctttttggttttttgagacagggtttctctgtatagccctggttgtcctggaactcactttgtaaaccaggctcgcctcaaactcagaaatccacctgcctctgcctcctgagtgctgggactaaaggtgtcctttccttttcttttccttctctctccctccctccatttctccaccctcacactctctctttctctctctcagatttatttattattatacctaagtacactgtagctgacttcagatgcaccagaagagggtgtcagatctcattatgaatggttgtgagccactatgtggttgctgtaatttgaactcaggacctttggaagagcagtcagtgctcttacccgctgagccatctctccagcccccttcttttccttccttccttccttccttcctttctttctgatttgttttatttgatgtgtatgagtgtttgcctgcttgtatatctgcacaccacactcctgatgtccatggaggtcagaagagggtgttggatctccaagaactggagttatagacagttgtgagcccccgtatgggtgctgggaaccaaactcaggtcctcaggaagagcaaccagtgcttttaacccctgagaccctagtcccctggcccccagtcccttgtttttgaagtactcagatctgctcagtcacatgacatgtctcataccttgaacagaatgatgtaaaaaaaagaatattgagggacttggttgaatgcctgcctagttcacttgaggcctgggttcaattcccagtaccataagaaagagcaggggggatgtcttaagcttttattgctgtgaatcaacatcatggtcaaggcaactcccttaaagaaaaattgggtctggcttacagtttcagagattcagtccattatcatcatcgtaggaagtatggtagcatccaggcagacatggtgctggacaaggggctaagagttctatatcttgatccataggcagcagaaggggactgtataccacactgggtgtagcttgagcataggagatctcaaagcccaactccacaatgacacacttcctccaacaaggccacacctcttaatagtaccacttcctgtgggccaagcattcaaacacaggagtttgtggaggccaactaccacagggaagaaatatttaggaaaatcagtatggctcttctttggatacccaaaatttaaccattacagcacatgggatgtcccttatcctcactatagtctgtgtacagatccatgctccacgctggacatcatctatttcatagatacacaagggccttccaggtaaagaagatgaagtgaaactgagaaataaagtattccttcttcaacccattccttcaatgggtgagaattagtaaaaacaaaacaaaacaagcagaactatgccaacagccatcctcaaaagaccatacagacagaaaactaggggctgaggaagttctaacttatcagctcttacatgactcagtggtattggagtcacctatatccctgagaagccatcctgggcaggacagttgaccggcagactacaagacttcttcctggtactcagcaggcattggcagagcttgcctggatccttgagaagaaacttataacttattgcaggagtatttttgacctcaccagagcccatccttttcagggccctgagctgaactgagcaatgcaaagctcagaagatactcttttagagatggagcatagcataacctaactaggcacagaggcatagcacaggactcacatgaacccttaaaaatgagcagtaggatggctgttcagatgtccgcttggagaaggccaaggtgtagcttccctcctatgctgtacttacagggatacgtactcacagctgcctgtctcatccaggtcaaccccaaagaagtcaaaggggctgggggatacacaagcagaaggtagcacctcctcttctcagattcctggtgttactaccaccccacccccaacctcccaaaaaagttgctgacagcatcaccaggacagctagcaattggaaagatttagagtggagtttgcattcgggacaggcagtcctgagttgaggtgatacctctgccctgaccaccaaagccttcaaacacctactcagaggcagtgaagacagatcaatgttagagtgggaaatgcactctcagtgagattgtcagccttatgtagagattccctggaactattggagatagggctcgccagttcttgggctgcagtgttgggggttgctgccttttgactccatagaggacaccaagagtggtgcagtgcagtgctcagctgcttaaagatcacttgacccaccgagggaagaagcaggcagagaccctcctgaataccgcctggtactcagtggtattcagtgagcccgcctcccctctcccactcctcctcactcctcaggctacagagaaatggagaagagccacagagccagactctgaaataaagtcacacggagagatgaaaaggtctttgaaatataggaaaatttacctacaaaacaaggaaaaagagaggagagaggaatgcaaaatgtcttgagagttaatttataccttctaatattttctgtaaggagtcacacatgcctgcttactcagcatagctagtctcaagtttacccatgctgatgaatgtatcaatagtttattcctttttattgattgtgatgaatttgtgatcagattttttttttttcaagacagggtttctctgtatagccctggctgtcctggaactcattttgtagaccaggctggcctcgaactcagaaatccacctgcctctgcctcctgagtgctgggattaaaggtgtgtgccaccacacctggcagaatatgtttttatagttctcaaagtttaataataatcaaagcaataaaaatgaacaaaaaattttatcattttgccaaagaaactacacagacaggaaataagctcgtggaaagatggccagaaaactagtcatcagagaaatgtaaattagcaagatgcaaatacaacctcatactcattagaatagccaaaattcaaaataccagccataccagtatgctgagaatgtagagggactagaactttctatactgctggtggtgacataaagcaacacggccactctggaatagagtgtggcagtttcttgaaaactcacgtgtatacctactattgatacacgcggcatgggactagagaaatggctcaacagttaaagcatttgagactcttttggaggatctgactgagttcagtttctagcacccatgctaatcagctcacaactgtctgtaactctagccccaggaaatacaataccctcttctggcctccatcggtgcttacacatgtggcaaacacatacatacgaataaaaaatttaaagaagagggctggagagatggctcagtggttaagagcactggctgctcttccagaggtcctgagttcaattcccagcaaaccacatggtggctcacaaccatcggtaatgggacccgatgccctcttctggtgtatcaacaacagtgtactcatatacataaaataaaataataaaacaatatgtgcaccacggatggactttaggttgctctaatcagtaaaaaaggctctgtggatggagaacgcagtagtcatctcctccccttccagctttagttatgcgtggttggttgcaattgacacctgtatgtttggattttgttcctgcagtgcacggtaccttctgtactattccagaaagcacacgttaacttttagagatagatagcagatcagtgagtgctgttgagagtggagacctgatgaggaggggagggagtgggatggaggagttttgctctgtttttcaggttttcttgtctttatttgagccatgataatctcattatgtagcccatgctggcctcaaactctcagttttgcttcctccttccccccaattctgcactggtagcatgcacacgctacattttatgtgcacggcagtggttgaactttaattacaaggaaagaattgccgcctttgtatctgcctggtagtgcattgtatatttttttagtgcagattagaacccctcaacaattttggggtttacctcatcatcttcatcaatgattcacagcttagcacctaatgcgtaatatgatgcccaaaaaatatttatttagcgagatcaatactgcgggttccttaagctagccccatcgcattgcatttagaagtggtggcttcagtgttttccatgttatagctgttagtcacttagtcccaagtaagaagctgacttagtaaccagtaaccaactgggctatttaatatagctacaaagagaagtgggcaccccagagtcagtaatataagttagcataaatagtggaaaggaagatttaattgaaaacagttcactgattagctgataagcctgtaaccgtcacagctcatccattctgggaatcacactcttgcactaattaatgtctctgaaatcatgacacctcgtacagttgatggcatcttacagttgtaactgaaggaagttgttttttttttttttttctcttacaggtacagaaaataatagcatcatagtttgatgaaacagaataattataatttcaattacttaatttgaatactgttttgagaagtactagtcttatttgattaatataaagcagagagacgcatacatcgggatttacatacagaatgtttgttgcattgttagaaaagcaacaaaatattttgctacatggataaatgggcagtggatatagaaaactgaatcaggaggaaatacctgtgagtactaggagaaatacccagtagtaaaagaaatagcagttgaaacaataagacactaaaacaccctttagatagtatcacttccgaaggcaacattcttgatgactttggtgacagcttggtctactagtaaattgcaggttacatactgagacctgtctcaagaagcaaacagttaaaccagaaacaataagacatcttctaaaatacacttaatttgcacacaaaagaaagggaaggaaaataaagtgacacataagatagcagccctggtgttgttgtgaatgacgcttccttattcctgaatcctgggccagcttcacacatgtatgtagtccactgatcacacttagccctatcctcttttattcccacacccactctcactgagacctcccatcctactctccagtctttctgttgttgttttgtgacccactgagttacagcagagccttcctcctgagctgaagacaatgagttcttataccccggtatccaatagttccaggagatggggaagggcccctgtgaccttcccatccatgtgtttttggccaggtttgcttgcacagtaccaggtgtgaattccctcctatgaaggtgcctcagagagagagagagagagagagagagagagagagaacacatttggaattctcatgatactcaataccannnnnnnnnnnnnnnnnnnnggagtggtgtatctggatgtatttttcacaacgtgaacaccagtcttacataatacagaaaacaaaggagtaaggtgtcacagcagacatggtacattaaagtatctgacacaaaacagaggaatgcctacaaaggactgacaggaatcaggtaatgtttacagtaaagataaaacagccctgcctagagtcagctaatgacaggtaaggatttcacaccctagtcactgagccttgtgaaccttcccatccatgtgtttttggccaggtttgcttgcacagtaccaggtgtgaattccctcctatgaaggtgcctgagagaaagagagagagagagagagagagagagagagcacatttggaattctcatgatactcaataccactaggccattaatatcttttctcccccagttgcctacgtaacagcctctgttggctctatgccagctactaggcaaggaggaaacttccagttcagtctcagcttggtctctctgtcctgctacaaagtcgtgtggtgacttcagccataggtttaatatccaggtctatttaaaagtcaagaccacgggcggtggcctgtattgttttgggggtccttgaggccttcctgcccaactcatagagatcatcctagcactggaatttttacttgatcacccatggcttctgggactggcattattcagctatgcaggacaccttgcaaacacacactctgtgtgtgtgtgtatgcatgtgtgtatacatacacgcacatgaaacatatctgtgcatatgcccatatgagtttgcttatagagtagtagactccatgtgaccaatagtttcaaacactttcatcataggatccctttatattcttaagtcacaaggattacaaaggtctgttatttatgtgaattatggtttttttatatttttcatagcagaaattaaaatggacattaaaagtatttcttcatgccaggaatgcataccttgaacttaagaggcagaggcaggtggatctctgtgagttaaaggcatcttgatctacatagtgagtttcaggatagccagggctacaaggagactgtctcaaaaaaataaccttcccattagatatatatgcatatattatatgtgtgtatatttatttatacatatatgttcatttcaaaatagtaatgaagcttactaattcaaattacatgtgtaaagaaaatatctataaattctcagaaatatagtgcagagattgttgctgttctaagtgtttgcatgtctcttaacatctggtttagctgaggaagctggagtctcacatctgcttctgcattcacattttgttacatgttgtttaggttgacttgtatgaagaagttgtcctcacacagatatgtacttataaagtaggatattcctgctagcctctttagagcaatttaatttactttggtaataggggtatgaccttgaacatgccaggtaatactctgctactgagctacccctctgtatttatttctgtattttggaactgactttctctaaactgcacgggctggcctcgaatttggtctatctaggattgcaggtctgtactaccaggcccagctcaaagctcctcttggtattctatcagttccagtgtggattgtaagccatgtgaataagcgttcatattcctcagtgttagactctgttggttcactttggactttggatggagtctttacccgttcctcattttcatattagtgtgggtgaattggagagagactggttttccactttatgtaaaactcccaaatgttgacacacttcattgtacaatatttgaaatcacgttcattaatatcatcaccagtctcatcagaaaacttttaagtatcaggctcatggtagtaaacacaaattttttaagattctaattttgactgatttaccattgttttccttgaagtgataggctcacttcattttcctttgagaaaacatgtgccaaatacttagataactgtagttttatctatagttgttcttttaagtaaaaatagccttgtataaaaaaagttaggtttgcttcggcactcacacaggaaagcagctgtatttgttaagagcacaccaatactttccctcaggtcatcacattacagtgtgagcatacagcagcacttttcctcaggttatcacacccacagtgtgagtcacaccagcacgtcctctcaggtcatcacattgcagtgtgaatcacaccagtgctgcttcccctcaggtcatcacaccacagtgtgagcacacagcagcacttttcctcaggttatcataccacagtgtgagtcacatcagtgcttccactcaggtcatcacactacagtgtgagcacacactagcacttcccctcaagtcatcccattacagtgtgaatcacaccagtgcttcccctcaggtcatcacactacagtgtgagcacacaccagcacttcccctcaggtcatcatatcacagtatgatgaaatgctatgtatatgagacctgctttgttatattgaatattaaaacggtatttccaagcatcaattttattttaaattttatttattaggtcagacatggtgctgtacacctttaatcccaagattcaggagataggtagatggatcgcttgaagttcaaggcagcctgatctacatagtgagctctgggctagccatgaatatacagagagaccttgtctcaatttaaataaagagagacagagagagggagagagggaaacagagagagaaaggaaagaaatataaaatgtacgtttgtgttgctgggatcaaatctaggctttatgcattaccaccgagctccttggtcccataggtactatcatattccttcctgagggcctccagacctcagcttttaaaagctcaccactcccaacatctccagctggacagcaagccaccactacatgaacccttgggggacaaactacactcataccatagcagtattgtcctagcattcctgtttctgtcctttaaagtccctcagtttgaatgacatttggactcctctgcagcatccattagtgagttcactttcagatatcatgtgctggctcattgcagactcctcttttacaaagaattgcttccatttctttgtggagatttcgccacccattcattctgacagtcttttcctttagatctgtttctttgtaattgggcctcagaaacccaggtgtgtctagcactcactcactgtactaggtgagcagtgagcaagccctgtgcagccagagtcccttgagcttccaaccctcctgaatccacctccggagtgctgaggtctctggtgtgctctacctgccatgcctggtgtatgcagtctgggcaaacacagagtttcctcacagtaggtacacagtttaccagttaagctgcatccccagctctttgcttggttttttgttttttgttttaaatgtagcaaagttggatttttttaaaaggctttaattagaatttagcacaggcattaagaggggtaaagagagtacacatggagttggtcaaggcctctcaagagacagtgttagaagattctttaaatctttacattttagagctgtttaaaagttattggatgctaattcctattatgataacgatgtccccgaagtctgtatttattgtctgctttctctgttacttcattgaatgtgtctaaccgtgtgttattgtgcgatggctatcctgagtggtatcttgcatggagtctggttatgttatctcctttaaagatgggtaattgtcactaggttcccaccaaatgctctctggggcagattcaggttgctttggctttgttttcttgctaagtagctcaggtggcctcaaacttgggattctcctgcctcagcatttgaagtgataaaatcacatgcatgtgtcaccaagccctaagaccagtggttctccaccttctaaatgccgcaccctttagtacagttcctcatgttgtggtgaccccaaccataagattattttgtcgctactttataattactgtaattgctacaattttgctattatgaatcataatgtaaaacatctgatatacaaaagatacagatacgcaaatagctgatattgaggcccacgggttgagaaccgtgcactaaggctttctttgaagtgttgttagtgtgagtctgtctcaccactccccagtgtcaggtgcagtcctcactactttagcacacggccctaaccagctacccgaggtgctgagaccgtgcctctggaactgcagtgtctctacacatgagcactactgcctttccctgcccagtcctcctttctccaccctcatccccagagtcctgcctttctgccaacttctctggagtctctccctgtggctgaacacacagttacagcccaccaacttagaagagcctgcacacagtgcaggtgccccagcccctaccctgcatctgtgcctgggctctgccgcagtcgaacatttcttagatgggattcctagtggctgtggtgactttatcctttgtatttcccttcccttaggggtcagagtcttacactgtctagtgcagtacctaaaagcatttgcttcatatattttgctcagctttatcattttttatagcaggagattgagcccactacgagttgtactgttatagacaaaatcaagtcctgtacagctaatttaatttatatttataatgaaggtcttatagccatatagaaaaaaattgttatggaattaagaattatttaaataggtttagactaaaactgcttaactcttttttttttaagatttatttatttatatgagtacactgttgtcatcttaagacacaccagaagagggcattggatcctattacagatggttgtgagccaccatgtggttgctgggatttgaactcaggacctctggaagagcagtcaatgctcttaaccactgagccatctctcgagcccaactatttctttctttaaccataagatttttaaaagaatattctaatcaccttatacatttgtcagatttgtcattaaattgtatgcagacacagtggtactcacctgtaaaccgagtactcacctggaggctgaggcaaggtattcaaagtctctgaagtaaaacaaatgagtttattaaataacataagatttaaaagcagatttatttatttacttttagacatagtctcactattcattcctggctggcctgaaacttactatgtagaccaggctggcattgaactcccagagatctgcctgcctctgcctccctaatgcttggattaaatatgtgtgctactacaacaggcaaaaaggcagattctaaaattatgtatatgtaattatgtctgtttaaagttattatacatattaaagattctaaattatagaacaattagtacaaattattatacacattgaatacatattctgaattgcagaataataatgttaaaacacagggttaggaaactcttaaattttctttaatgttgtaaagcttcttcaacttgagataaaaaatttaaaacattatttacatacaaacatgcttgaccaggtgtagtggcgccactatctctaatcccagcatgtaaaaggcagaattctgtgagtttgactagctaagtaaataaataaacaaacaaacagacagacagatagatctgtatctgttaaatattttaattgtctgcatactatccctttggtaggtgttgattctcctatcactaaacagagtgttttctgtcaacgtaaactcctaaaactttgtatgcaaaagtgtttatagccctcaccttgcaaaagttttatccaatatttaatctcttctaccagtttagctaacataaaagtcctgcagcattctcagagctggccgtttgaaaaaggtatgaggttggatcccagccaatgggagaagactcagtcagtactgtcttagataagaaccaagcaaacttcccgatcccattcccacccccaccctgcaccccatccccactgcttcgccctgcaaccccacccacctctctctcctagctcttcccttctgcaagcagcaccccctctgatcagatgcaaaatttctagaaacacattaattggaatgcagagtctttccttgagaccttgaacttacctctatcactggggctccctccatgttcttggtattatatttagtgttccctcatattttcctgcacagaacttcactgttctttcgagatactttgttataataaattccaaggatgcaatttatgaaccaaacagtagaacctacttttccatgggttgttaagtgcctggtcctttgtcttactgattggtcacttgcctgaatcccctggttgtatctgtcacttatagaagcttgaatatcctcactgctagtgttggggtttcctgcagaggaatccaacttccactggcgagagctgctctgaagcaatggggctggagagagtccctgtaaggacagcagggacacgtggagctgctgagggcagcggtccagtggggggcagtgtgtggtactgccctcacttcgggttaagaaaatgaaacatcatgaagaacaatgtgaggccattaagagaaatcaaataataaataactaggtctattaaacacttgaggcatgggaagttaaactcactgtctgacacaagtgtcttaaagatgaccacacatactctggttgctgtgggacttcattgggcacgctcaagggttttgttttttgaaacaggctctctcttctttttttaaagccatttttctttttttttttttaaagatttatttattattatatgtaagtacactgtagctgtcttcagacacaccagaagagggagtcagatcttgttagggatggttgtgagccaccatgtggttgctgggatttgaactctggaccttcagaagagcagtcgggtgctcttacccactgagccatctcaccagccccaacaggctctcttgatttagcatcagacccctatgtagctgaggctgtccctgaagtattgaccctcctgactttttaagaaatggggtctccagctattggatgggtcacacggcccccaatggaggagctagagaaagtacccaaggagctaaagggaactgcaaccctataggtggaacaacaatatgaactaaccagtaccccggagctcttgtctctagctgcatatgtatcaaaagatggcctagtcggccatcactgcaaagagaggcccattggacttgcaaactttatatgccccagtacaggggaacgccagggccaaaaagggggagtgggtgggtaggggattgtgggggtgggtatggaggacttttgggatagcattggaaatgtaaacgaggaaaatacctaattaaaaaaaaaaaaaaagaaatggggtctcaccatgtgttatccagactggctcctgggctcgagaaagtctcctgctttagtcctcatgagtactgggggcaactgacagtgccaccacccccgccacaaatgttccgttttcttctgcatatattgtaagaattatagataattaactcattctcagccttagcaatactttttatttttttaatatttgtttgtttgtttgtttgtttgtgtaagtacactgtagctgacttcagacacaccagaagagggcatcagatctcattacagatagttgtgagccaccatgtggttgctgggatttgaactcgggaccttaggaagagcagttggtgctctttttaaatgactgacttgttgattttagtgttataattgtcccagcaagtctttatatgtgtgcatataaatagaatgtaaagtacagtcgccagccaatttatatgtgatccctcctccatagtgactaaataaaaactaaagtctgttctaatcccattctttaaaacaaatgacaaagatgcttggtgatagtttggtttgtgattgggttttttaaaaaaatacttgcagttaaatttcacacgtgaaatccttttatgttttcatttgctttttatggagaagcctcagcatactttttaaaagactcgtgtacagtggtttgtgtctgtaatcccagcattcaggggactgaggctggagaattgctacaggttggagcctgcctgggcttcacagcaagatgctgtctctcttttttttttttttttttttttttttttttttttttttgagttggttgggatggggaagaggaaagaatgaaccagtttctcacttctcacctttccataggggtatttatagctaggtaagtaggtcactggaatatactcacatatctgattgcataaacagtgcttggaatagaaccacgcttctcaccgcgccacccaaggtgactggttatcctgccatgtcacccccgctttcctagacattcacgggtccgtctccacagtcacgccttttgctttcccagtgtgcagctcatgtccaggtcacaacgacagttttcagtgtcttcctgccctcttccttctcgttttccattgccaccatctcagcacaaggattcatcatcccggaccatctaactgttgtcctgtagctcttcccactcattgtcttgctcggttctcgccttctctggagtccctgtcactcaactcccagcttcacctgacccgcaaccacaaagagaaccaggcaaagtggaccttttccctgatccctgtgtgcattctgcctgcactgccatcttcttatgggaagaatagttgccctgctgcctttcctacaacccacacccagacccacctttctgttcctcctgctttcccagataacaatagctggctgatctaccatctccacccatcagtgctaacccactgataccactgcagcaccatgtcctgtcctttctctcgggaagccttggcagagcggggagggtggacgtggacgtgacccgaatctgggtttgaattcaggttgcacctggttatatttctgtttcctcatataaaacaagcaggattataaccctttcacagaagctttgaagagatcaaataagataaatatgtatgaaatgtcttttgtatgatgcctgacatgtaataaataataaatgacagtgatgacagtgactcctatagtgattatgatcatgccaactgctcagacaccgtgaaccaccaagaattttatttattccttctcactgctcagatgattataaataccatatgataacagtattagaatctgtgtgtgtgtgtgtgtgtgtgtgtgtctactctcttgagcctgcagatgtatttatcggtgtatgtgtgcatgtgtatgtatgtggaggccagagatcaacactggatgtcttctttaattgctgttcaccttatttttatgagacaggaacttactgactgggctgtactggctctctagtgagctccaggatctacctgtctcagcctccacccctgcctcattgtttcttgtaggcatctctgctgcctagtgttgttgttgtcaacttgacacaagctaaagtcatctgagaggagggaaggaacctcagttaagaaaatgcctccataggatcccggctgtaggcaagcctttagggattttcttaactagcgattgacgaggaagggcccagcccattgtgggtggtaccatccctagactggtggtcctgggttctatatgaagccaggctgaagaagccatgaggagcaagccagtaagcagcaccattccatagcctctgagtcagatcctgtaattccctcagtggtggactgttacctggaagtgtaagctgaaataaacctctccctcccccgggcgcctcactcgcggtgttttatcacagcagtggtgaccctcattgagtcagtaagctatagggcatttgaatatggcatgtttggttgtttaggaaaatgcctcatttcaggaaatagagaggttgcattcattccaagaagatgctctcctctccttcctccctctcccctcctccccctcccccctgctcctccacccctcttcctcttcctcctttgttgtggttctgggctttgaacccagggtatcatacatggtatgcaacaagaaattttttttaaaaagatttatttattttttatttacatgagtccactgtagctgtcttcagacacaaatgagaagagggcattggatcccatcacacatggttatgagccaccatgtggttgctgggatttgaactcaggacctctggcagagcagtcagtgctcttaaccgctaagccatctctccagcccaagaaacatttttatagcacaaaacactatgttctcacacaaagagaataaattatgaaactaaaaatacataaagcgagagatttaagaaaagtgaatcttttacatcctgtatcaagttctctgtcggttggctacgtggcaacacacacctataaccccaacatttggtgggctggaacacaatcatgatgagtttgaggtcagcctggccaacaaaatgaaatctatctcatataaaacagcaacaacaaaaggtatccttcatttaaatataagcttaccaatatttcagaaatcgagatagcttataagaaaaataaaatttaaaacttagagaggaactaaatgtcttaaaactttaaggacctgagtttgggtcctagaacccaattttaaagagtgtggtggtacatgactaacctcaatgctgggagtgtgcggagagtggctagctggacagtcactctagctaaactggtgaatgccaggcccagtgagatgccttacctcaaaaaataaagtatagaatgattgagggaaatagctgatactgatctccacatgtccacataaggaagcatacccatgcacacacacgtggacagaactgtgtgtgcatgcacacactgctggcagagtgtcaaatgtgtgttataacaggagcatcaagtcctattagggagtgccctgctctgacattaacagaacatcagttaacagacatctgttaacggaaaggcagcacgtttatccttagaggagcatacaccacagcagcactcaaacagccctgcactggaatgtcctgaggatatggctaaagcagccatttcccaacggtggctggctggtcccacagccagatctaaacagaaaacctgtaggagtggcagggcagcacttagcaccaggaacagaacacaggcccgacacaaacgagttcctttgacatggaatcagtttgtatcacatatgtcggccttaatctagagtgtggggtggagtccccggccacatgggctctgccttccccacttgtcaaatatgttttgcatcttttttttttccttaatagggatcacatgcagtggtctaaagaagaagaagacgcagctagaaaaaaggtagaggaaaactcagccacacgagtcgctccagaagagcaaggtaaggctggcatcctgtcccagcatttggaagttctgagctgccaccccagccagtcaacccatttgctacctttggtgggattcccagttcttcccttgtagtggaaccgaaattaatgaaataaattatgtattcaccctgtaattggtcttttggtagtcatattgctttttctgggagatatgcatatgggtggcattttaagcaagatatgaaaatataactttaaaatttcctcctaactacgccacagtgtgtcattgtgtatttcacttgctggaaacttctaacaaattcataaactttgagtaaaaagaaaaagtcatatcaaaatattgttggccttttaggataagggagtgtgtgtttgtgagttcgtgcattagtgtgtatgtgtgcatgtatgagcagttcagggcacttgggtcagggcacttgggagtcagaggtcaatttcaagtgtctttctctttcactctctgcctgagttttttggggacaaggtctgtcacagagcctggcgctcctgcttcagctagactggctgcacagtgagctctgtctctgccccacccccactcccagatctgaggtcacagaagcatattgccacaccaggaaccctagctcaagtcttcctgccttcacagcaggctctttccccactgagcctccttcccagcccaggctaaggttttaatggggatcaaaagcagttttcttgggagactttgtgtttagagtttaattcagggacccagcttgacaacttcataaatagctcttgaagttcgtcttgggctattattaaactactagtaattgacaagtgttgagaaggatgcagagaaacaggagcccttgtgcacatttggtgtgaatggtacagccactatggaaaccattgtgcaggctccctaaaaattaaatatggagggcctggagagatggctcagcagttaagagcaaccactgtactggctactcttgcagaggaccctggttcggttcctagcacccacatggcagctaccgactgcctgtaactcctgtaccggaatgcagtaccctcgtctaacctccatagataacaggcaggcatgaggagcacttacatctactcaggcaagctcgtgtacaaataaaatgaatcttttaaaattttttaaaagtagcactccctataatacatcaattcactttaaagatagatcccaaaagattcaaagcacactctcaaagaggtaatatgagttccatgttcatatcagcaatctctatgttaggcaagagagaaacataatcaaaccacaagtgttataagacaagcagcactagtaaatgatgccctgttgaatgaatggatgaaaagacacgtaagtttagccttagagaaaagaacagttcagtgctaacacctgaggaatagtgcccagtgtccgatgttccgaggacgaggcatgagcagccattttccagggcctgtagctcccgtacataaatgataatgaaatgtgctgcatgatggtgattgccaagggatggttgagtggagagttggagttatgtagtggggttcgagttagagtttgcattatggagagtccagaggtctgcttcacaacagcgtgaacagacctaacgccgtgggagcatgcacttaagaatgactaagatgctccattttatgtgcttttaccacaattttaaaaatgtcacacagaaaaaaaaaatgtttagaagtggtcagtgtccttcacagtgagtgactcctagtcactttgcctaacagctgtcctcgctgtataccattttctaccttattttctttaaaatgaccttttactttaggacatctgtgctctctccttttggtgtgtgtgtgtgtgtaggtatgttcatgtgtacacgagtgcacatgtgtgcatatgcatgtggagagcaggggtcaacctggagtgctattccttagttactagtcaccttttgtggggagggggtcaggcagggtttttcactggcctaggccccatcaaggaggctgggctggctgccagggagtctcaggacccacctaccctgcctcctcaccgctgggattattatgactagtccagctagcaagtttgccgctgggctctccattctctgcctctctggtgctgggatgacatccagctgtcatacctcttctgtgagttcagaggagttgaattcttgcacagccagcaccttgtccactgagccatttccctagcctgcaccatgttttataaagttttattaggacacggatttgttcacttgttgacatattctctgtggttgcttttgagctatttggtccaaaggagactgtaaatgtcacataaatatctgggcagtggtggcacaatcctttaatcccagcactcgggaggcagaggcaggtggatctctgagttcgaggccagcctggtctacagaatgagttccaggacagccagagttgcacagagaaatcatgtcttgaaaaacaaaaacaaataaaaataaaacaaacaaatcaaaagactaaatacctatcaggcagtatattggaagattcttccaaagctagaattctagtgctagattgaccagatatgcagaaactccccagggaaaaatgctcgtactcctccctgtaaggcgcagagtgaacatcaggagaagcacagttgaaatgatgttagcttgcagctgctgaaatctgaagcaaaggtatctgggaaggctaagagaatgggacagccctcagcctttagctggcaaaggagccagtgcaaccaatcctgctctctggagtcattggtggccttttgattcctctggccttgtttgttattccttagtggtagttcttcaccctcagcatcagtgtatccttgggtggacaggaaagacgagcccctgaccccagtggaatgactctatttctatgggctctagccagacagacctggggtggaatacagccagggagtgttgaggctggacttgaggactcatcccatggccagtgctgccttccatcggccagcaccacattccctcacaggaactctgtcactgcttctgaggaagtataacttcacttctttgccagcagctgcgtggacatattttccacattactcaagcttctgctagtggcctcctgaatacagcagagcttccagcctgaacgatgttccacattgtcagttgttttaatttacttccaggaaatgaaaactcattcatgctattatctgcacattatcctaataatatgaaaaggcagggatttttaaaactcccttttgaatgtttgtgttccgaacttaaatagagcagggctgatcatgttaaagttctctgtgcatggccgcccactttgtcctatttgagctaacaatgaacttgagcgcagctaatgaggaggttattttagagcctcagaaaccgcagtaaaggaaaaggacggttcccacagaaccacagtgggaccaaaatagaaaggtggtgacgggccactccatagaagaggaaagacaggagcaaggaggtgctggcaccactctgaggtgcctgctttgccattgctgtgacagccctttctaagtgtttcttctggctactgtgaagataaagaactaaagattccatttcagaatgactcaaagaaatagagatttgttctgggtcacctctgcatcccgccactcagtgcaccgggcgccacggtgtcaggggaccactgcaggaaaagacttgagttatacggaggatatcttgtatttaaagcaaggtagtgagtgcagagagggctaagctcccagtgggtaacaaggaaggaaactgtggtctgaggaacatcagtgaatggcagcatgtctcagggacagccacacagcagtctctgctaggatcgcagaccccactcaagtcttgggtgaggcttctcattcgctgcgttatccctctgatgagtcaatatgggtcaaggtaaatagatcgttctgctctgcttccagacttagtgagaacccgacagaagctttgacctcgacaccagctttccttatctaagagagtccctgagtgtttgaaagagccagcgctctggcatcacaaagagccccgtctgcagagcaggcacactgctattgatcctatctcctttattaagcccctgggaggaacactgcttattcttccagctagccaaccctgtcacatttcttctgctccctgtatgtcactcttccttctcccacttttcacctattgtcagagctgttggtgagaacagaagttagaaaaacacactcacaatctgaaaataagatcgcctacatgacagataatcactttttgctgttgaatgacccagcctcgtttgcataatgagaatgtatagcacccaggctccagttagcaatatttccttcaattagattgcccagactaatgacttttaattccatgttttcttttcctaattacttttcaattttattatagctcatatttcttttaaaaccaggttaacccagagaaataaaaaagatataatcagtgtttcttgagtaaacatgattatattttataatctccttaaaaagatctccagtgtgctatatgtcagctggttgtacagcaaatgtaaaggttttttaaaacttactaacaacagcagctgctgtatgcactttaaaatatctttgtaaatgaagtcctacctagggtaggttagctacattaggcagatgatgaaagaatgtatccttgtgttgtgaataccttaccactgaagagaatgttctatatgaagggaaagaaaaacagaatagttaaacaccctgtgctgataaatatagctgcctctaagatgactctggctgctaaaagtttcatgcagtgctcttagaattacacttttaattttataattttaagagttttcttttattagacagtgaacttccttcagtgacatgtggaaatttccaactttgaaagttcaggtatttgcgtaattgatgtgcaaaaataactttaaattactttttgttacatagcaacttagaataaattttcataattcatattatcacatcatatattccagatacctaaatggcttgatttgggttttcagttatggtgttcagggtaattctgatgatctgtgggcttgtgagcatgtaagcgtggctagtgtgctatgtctctgttctgctcagcagtctagaacataataagtgaagaattgagatctcccctcactaaactaggctgaaaccaattgctctatccctttcattgtcactagcatagaccagtttactctggacagctagcaacctaggatcacataagaaaaaggtgttcctccaaggaaaatccgtcacttagacgcctgttaaagtcgaggcagcccagctttccctacgctgcatagactgtggttcctggcctgaagctgtggcagttagcggcaaagtgagcctgaagtctttgtcgtggtcagagagtggcacctgttgttccctgccattacaggcatgctttcaattccagaaattcaatcctacactggaggtgtttcctgtctccgtaattatgatgaagtcaggtgcgcttctgtaaggtcatggaaacaccctcagaactacagggttgccagcattggtggaagacactgttgggtgggggaacacactccagccacgggtgctgatcctgcctagtgactacccaacaaaccaacctgtactcttagagcattttatggttctgttgctaaccatggattcatcccgtaggctcatatagcttgcattggatctcacagaaagaacttggtctaattgattctgtacttatctctctttatgaaggctaactccagccagcattatttttacaacactcctatacttattaaaacttagactggtttcaacttggtgctttgtaattgagaggaaaataagaatcagaaaaacagattatctttgggggtatttttgagggaatacatgttaactttgtattaaggagacggtgctatgtgatggccatggtccaagggctctggagtctgaccgacttaatctaggtcctgatgctgcctgccctttctggctatgtctggggggaaaaaaatcttaagccctttgacattgaatttcttgttgtctatctgaaagatattgttaaccccaaattgttgtcttctcccctccctttcccattctttcctctttcattttctctcctcatttggtgtggcaaacccagaggataaaaatgagggttcatgggaagagctcaagtttattcaatgtccagaacaccgacaagcgggaattttgtgctctcgggtctcatgccatggtgggcagggaaaacatcagatttgggatagtgacgtgaaggggaagtgaagaggaacaagaaggagggaggaggataaggaagtgaatggggcaaccgtggccaaagtgccgtgtgtgtgtgtgtgtgtgtgtgtgtgtgtgtgtgtgtgtgtgtgtgtcgtgtcacagtggaacccattattttatgctgctagttaatggggagaataggtcaatgggaggtgtatctgtgtttctcgggagtgacagttctcaggcacttctacttctttatagtgtggtgcttctaactcaggccgcctgcccggtgtgtcactcagtaggtaaattggatcacgaagaacgggcttccagaggtctctgtcagctatcttggtgccaattggctttggctaactcacctgatgaggaacttctggccttgaaacatcctgttcccaaagataaacaagattaggacaaggcagaattcagctaggctaataagcagcatactaggtaactatactgttaggagtaaatggaaaaaaaaatctaagaaaagcatttgacatagagcctaaaactgtttgtcactgttggagtgtttgtttatttgtttgtttgattgatttttgttttgtttggaacaacatcttactatgtagctctggctagcctggaactcacagtggtgtgcttgcctctgactctgtccctgcctctgtctcttgagtccagggattaaaggggtacaccactatgcctagttaggattgaatttaggtggccaatgtgtttcgtatttgaatgtagtaatttgaattacagtaacatcattacagattcataattggtaaagcttgctttccataaattcatatatagagagacatatatatgggggggttaaacaggctctacaggtatgcttattctcattaaaggaagttgggtaaggtgaatagaatatatatatatatatatatatatgattcagtgagggtgtgagtatgtgtatatgttacatgcatgtaagtatgtaagtgtgcaattgcatacacccatatgtgggcatgtagaagctacagcaggttggattcttcctcttgcacactcagctttattgtcaataaatcagaaccttgttttctgtttggttggttgtggttttatgggtatgccgctttactagccagtgaactcttgggatctgcctgccaccatcaatgctgaggttgcagaactgcacagccatgcaggggttttcctgtgggacctgaactcaggttctcatgatcgcagagcaagcgctgttacccactgagccatcttcccagcctttactatactttatctttgccaacagtgttgcaaaggatagagctatctaatgatcattatagtacactgttccaaacatgtatccaccatgggtgaatagaaaacaaatgtcagagttgccaccagtatcttagctatcacgagagcattttctccttgttacactgtttcaggtgctggccacaatttgcttctcatctctaggctgtgcctctgcgttatcaccacttctttcctataatacacagtaatgcttgcacacacgtttgtgacattactctcctggatttcctactccaccctagttaattcttaaaggaatacaccttgagatgagccaaggtgtagtacaagattccatctgatggtgattcatctcaaattcacttcacaagtacctttgtactagaaaaccaagtactagagatctgactaaatgtgggtcttgtaagctttaaaggtaggcctttgggctgctttttcttaggaacaaaatctttatctgcatagagagagttacaaagatttttttttgttttgttttgttttgtttgttttttgtttttagacaaaggaggacaagaactggtaagaaatctcttgggaaatctggaagttgtctatttctcctgagtctaattttcagactgttgttttgttgtcttgcacagtgcacaggtgcatttcgattgttagaagagaacacagaatattttcaaggcaaacatacacttttggattaaccataaataggcttcctttaggtagtacagatgagaaaatgggttagacttaatatcacataattccttatagttgtagggacccacagtcacttctcagacttaaattcaaatagaatatccgctttatttcagctgctgcagtggactcaggaaacctgcccacaaatgggtgaaggtccatgtgggacaaggctgtaaggatgaaaataaagggaactgagtgcttcagagcagttataaagcaaggagactgatcacaagcagctgcgtgttcataggttgagcctctttgaaatatgaagggagtcccttatttttatgcatggcttagtgcaatttgggaattgatactaaattcacatggatcaaaactaaacaaattctccttcaaaccacaggttttaattttttgcttgtttgtttttgttgttatttatttgttttcttaaggcagtgtcccaatttgtacccaggctggcacagttgtatgccttagactccctccccagtgctggccttacaggcatgagccaccatgcctggtgttgttttatacctatacttgtgctcacatgtgcctgcatgtttgtgtacacatgcatttcctcctcttcctccttcctgctagtgaatggtgtagcgttcgtactgccctatgccttactcttctccagcactaacccgtgagaattggtacagacccattaggaagcttttgcagactttgaaagcacttttaaaatgtcatgagcctgtctgttagggtaagagtaattcttaatccatgggttaaacctaaggattaaccttgttacacataattggaatcaagaaatggtttttgaatgaaagacagagtgaacacgttattttatttaattaactggctcattaactcatttggtttttgtttgaacttgtgaccctccttccacctcacagtgctaatcttaaagatatgtatgtgccaccatggtttatctgaggcaagaggttttcgatagtccaggctggcttcaaattctctatgtgttaaaggttatctctaactcatgatcctcctgcctcagcctcccaagtgttggaatttcaggcctgtgttactctgcttggcctgaatcgttttgttaatgcaaggtagagatggggagaagcaggaggctaagaaatgctgaggttatgagaacattgacctaactgtggcctttaaccctggaatgatatcatcagtcactaaggcctgtctgttcaagaaagcatcagtaattctcccagagactcccactgggagagcaggaggaagagatctgtctggatttggggttgtggtgggggatgaagttttggagtggcctctgcaagtagcttcagctcctttcttcaaacgtaaaaccaggcactcagagtaaacagtttcattgaaccctatcactctaaagtcatgaatttataactcccgccttcttttctgatggccagttagcacatttgtcatatttaaagtgcatttgtagagacagactgggatggtgtactttctgtaagaaaatttaaaaaccacacaaaatacttgattaaaaaatatttttgctaggccaagtgtgttaacacatacatgcctttagtcttagctcttagggggcagaagaaagcagatctccatgagtttgagactagcctggtctacagagcaagttccaggccagccaaagcttcatggtgaaaccctgcctttaaaaaataaattaaagtaaaatcatacatatataattttaaatatataattaattacattaaagtaaaattatatatatgtatgtatatatgtatatacatatatacatatatacatatatacatatatacacacacatacatatgtttcaaaaccaggctgcagaaaataattgtcagttactctattcttcataaaatggaatggccaactattgacagacaaacagattttaagtgtggctctaaatatcttgtatattaatcttttgaagaagatgagatgaacttttgtatttttagccttatatcagataagtgaaatgattataataatattaaagttattaagctgaagatgcaattagtgataaaaatctgtcttaagtcagtgttctactgcggtaaagagacatcatgaccccagcagggtcttaataaagacccttaataaagaaaaacatttggctggggctgacttacagttcagaagtttagtccattatcatcatggtaggaaggatggcagcatgtaggcagacatggtgctggagaaggagctgagagttctacatctgaatcagcaggcagcaggaagagagagtgacactggacctggcttgaggatctgaaacttcaaagctcacccccagtgacacacttcctccaataaggccacgcctcctaattctttcaaataatgtcactccctatgagcctatggggaacactttcattcaaaccaccacagtagtatatttacagtaatgttactgatacatattattttatttttgtttttttgagacagggtttcactgtgtagccctggttgtcctgaaactcactctatttacaaccttatttacaaggtttgtcttaaactcaaaggaactgtctgcctttgcctctcaaatactgggattaaaggtgtgcaccacaatacttgacttacatatttaactattaaaggtatttagctatcaaaatagcaatcaatagtaaatagaactcatagtaaaatgaatttttttcctctctgttttagttaagtttgaaagtgacgctaacaaatactgggatacattttaccagacccataagaataagtttttcaagaatcgtaattggctgttgagggaatttcctgaaatccttcctgttaatcaaaacactaaagagaaagtgggagaatcatcctgggatcaagtcggaagcagcatctctaggacgcaaggaacagaaacccattgtcaagagagttttgtctcgccagaacctgggagcagaggatggtctgctcctgaccccgacttggaagaatacagcaaaggacctgggaagacagagccgtttcctggtagcaatgccacttttcgaatactagaggtactgtatgagagtgtgtagcccacgctattttatgagtggtccagactgtccaggtggaaagatcagatctaattaaatgcttagtgttcttacatgcataagtaatacttcagggactttaatcagtcaagttttaagcttgtggctttaatttcatctatgttactttttttttttcttttaatttgttgttatttctaacttagaggcagtatttaagtcctggtacatttttggtccaaatttttgctctgtttttaccccacttggggtgcaataaaaataagcaaggagtttagtttgctgcagtctagtgtagacagtggttttccatttttgaacctaaaccccatctttctgaccctaaaggtaatagttgttgattacagagaattttcgggtgaggtcataagagaaatacagttagccacaatcccacggccaggctgtttaaccgcctttcctgcttttgtttaggctgtgcatgagccttgagactttgtgctgttctgtttaacatcacgtcatacgcagtttccacctttaattgtcctccgtaaacacctctgtgactgcacagtattttgtggctgggatattataattttacttacctgctgtcacgcagggcatttaattgtttcctcagcagatgtctttgggtatagactttacctgcatttccttttcccatcttaggttagattgactagtttacaatatttggaatttttttagaggtcttagaatctgttttaagctatataacaccactaggtgtggtgacacgaacacacaggaaacagaaacaagagtgttagacatgttcaaggccagctctctctctctctctctctctctctctctctcacacacacacactggggtttggaccgagggcctttcacatgataggcaagagttctacaatccagcccattttctgagttgccctgatgtgctcagactcactgtgtagtgcagtcttcttgtcttggccaaggtccaggccccttttaccctggtttggtttacacattgcccaccactcagtatacctcacagctcttcaccgagaaccacacgttcttcatttgtattctgtccgttccttccctctgctgtctatgagtccttccctttaccgcaactgctgcaagcacttcattgccaccttgnnnnnnnnnnnnnnnnnnnnnnnnnnnnnnnnnnnnnnnnnnnnnnnnnnnnnnnnnncaagcacttcattgccaccttggtgtcctgtcctgcgtggttcacttgctgattgagtgggaggggctttggtgggcacagactgtgaatgtccccacagtctgacgttgattgtccctcctgtgctttgtttcacaagttctgccacacccagaaatccatagaaaatccagtattgtgagagaaatgcaatgcgctcacatttgtttattctcaattttaggttggctgtggtgctggaaatagcgtgtttccaatcctgaacaccttgcagtgagttttaagtgttttcccctacacgatcttacatatttatgggaagttggaaagttctggaaataccttgtcttgcatatgccaagggagtcctgatttcccatataaaccatgactaaagcaagtgtgaaaagacgcgctctagtgactaacaccatatgaaccggggagcattccacagccatgggtctgaggtagattttaacttgtgtttatgtagaaggcagaaggggaaagagcgagagattgccaccccccaccaccaccaccaagcagtgccttgcttagcgtcagacatggcgtgctcctcctgaagaccagatggcacctcacagagagatgagtttgaagaacatacctcactcctcgtctatggtatcaacgtgctggggcaaccccaggcacagtcgccttgcatgtcatatcattgtgcccagactaggagcactgacctcaagcttcagggacatagaaatagatgaggctaacacagacatccttcttactcacccttcaggtccagcagtctcacctgactggtttagtgtttctgtgatgaggcagtgccttacaaaactctacaccattcaccacctctgatctctctagtgcctgcctttctttnnnnnnnnnnnnnnnnnnnnctcccttctttccttccttccttccttccttccttccttccttccttccttccttccttccttccttccttccttccagtttacacaagaactttcatgacatttcccccactaaaatcaacataagcgtatttcagagaacttctgtcaggggagggaaggggttctcccgtcatctggcatagctactgtacaattcccattctgcatgcatatcttttaacttaacagtttgatcttttaaactttccattgcaaaaatggaaaagcattttgaaaagcaaaatggcacggtgaatgttcataacccaccaccgtgatcaacagtcattagcacagtgccggacatcatgccagattcaaggtattctctgatccttcctacacctaatggagagacaatgcctccctaatgttatctactgggcattactgtggccagccatgggaggtgctgtcaaatgtgaatagtcttattactctttgtgtatttattatcttgactcctttttccatctcctaagatgttttctattctcctatatcacatgatcagaccctttatcctagtaatactggagtctctctctctctctctctctctcacacacacacacacacacacacacacacacacacacacattggttgaatggttggttgtgttactctatgagactgatctcaaggtattactaaacttattgtttttaaatttcttaattctctattttatatattccaggtaacctaacagtatgatatagcaagagcttaataaattttgattattaatctccaattccatactagttagttgtactttgacctctgctccaccccttcctcttcccctcctcctctttttcccttttctcctactcatccttttcatcacacaaggtcttgctctatacatcaggctggcctcaacaagattctcctgtcctcatctccccttgctgggatcacaggtgtgcctaataacgtggggaaattaattcttctttaaaagccaaacagcgatcagccttccaaagggagaactgggcttccccacccccaggttaataggttttcagaatgttttgccatatttagaccattggaattgagaagtcagatcgttctccaagggtcatttcattcctaagcctccaccaagacagttctgctggtgtggtgaggaagtgacttggacaccctgtcactgggagacgagccaaggcaatcagctgactttacagaaagactcaggaaagtcactaggcagtcacaaggcctcagcttgggatgctgatgcagtcagacttccatctcagaggtcagaccgccaccttgataggacacatggcacatgctttccttgagccgttagactattctggatctggtacatattcttctgtaactactcaaaagtaggtggcagccctttcatatgtgttagatggaccagagtgcagagacatctgaattgtgtagacaatttttagaggaccatcctagttttaagttcctgagaggcgatgcaagttttcaataataatagtaataatactaataatgataataataatagcagtaacaatggctgtaataatggctgagtgttcagtgcttattcttctaagccacgaatctttctacaaacctcgccatctggatccatttagccctcacaactaccttaaaacatcacactcatctctatttacagaggaggagacagagttaccggctaagacaccaccctccagacactcggtaacggtggagccaagtgttaggattgggccgtctggttctggaggccttccatccctaatcacagatcacacatatgaatctgagtgctgactaagcacatctcataagcacacagctctcagtagaccacaggtcacagttacacggatttcatggaagattaccaagtatctgctagaatgaagaactaagacactaatatttttccctccctccccacctcccttcctttttttgagacagaggctcactctgtagcccagactgaccttgaatgttgaatcttcttgcctctgcctcccaagtagagtcaggagccactgtgcctagcaaagtaacattttctttttttttttttaaataaatcttttatttttaagatttatttatttattatatgtaagtacactgtagctgtcttcagacactccagaagagggtgtcagatcttgttacagatggttgtgagccaccatgtggttgctgggatttgaactctggacctttggaagaacagtcaggtgctcttacccactgaaccatctcaccagcccagcaaagtaacattttcagacgagataaatgaacaacaaagcaaaccaagcacttcgatttagcactggttgacttcattaccaagtcctatttattatactaatacttgttaggacagatcgtaagttgactgcaaatcctagtgccacagacaaggttaattacatgtgagtatttatcaacaggaagcctctaagagtgtaatcgaagtccatatttttgcttgtattcttttatttagttagaagtccaccttccctgaagtgcctcttgaatcaaattaagaggcttagtttgtgcttcagacctctcttcacatcctgccaggtgccaagttcggactctttagatcaatgtgattattgttcctggcacttgattcccacccttaaccttatgccacgctggctgtcaattaccaatgctaacctgttcctgcaaaacttgcaggcagatactttgggatgttgaccctctcacccctttacaaattgtaagaaaccagccatgtcccaaattataaaatccacacgagccaggccttatgtacacctgtagtcctgggtaatgacatccacctgtccttagcaattcagacatttttctaagcagcatgatacaaagattatttgatgccagcatacagaacatgatcaccaagggcactggcccacagaattggtagtatctgcctgcctatgatcaatgcagagtccagccatcattcctgaatttcaaataaaggccaaatagaatacgtttaagttgggaggcaagatttttaaacagataaatgttcttctgtaaaataagtaagtaaataaataaataaaagaatttttacttacatactgtaaataaagaaactgattttcaaagatgttaaattcacaaagaaatggccaatccaggatttctgtataggttcatttggctcctaaacccacaatctcagtatttgattaggtaacttcatattctcatgcttggtgtatacattaggttcgtgtctcaaaaaaacaaacaacaataaataaatatacactagcgtcaataaatgcttgataataacttgaaaagataaccaattatttgtatgttaatatttaattttctttcaaaattgcatttgttaccagtataaaattatataaaattatatgtgcttctgccctgcccgccttcggagtatctgtctggaaagggtcaaaatccaaacaagttgtaaataaagaagaatgaaggacacagggttctgaggggcctggagaaggcagaagtgggcagctgcaggacattcgtgtgagggtaggctgagaaatttccacctgagaatgggataagaaataaggcagcggctccgtcaacccaggacaggagcttcaaagttggcctgtagtgacaagtgcttgtcacgctgcggctcctttccttctctagtttgaacacatctgactctgggcttggatgtcgtttctatttacataggaacattccaggatcctttctctactgctgcgactttgcctctgaagctgtggaacttgtaaaggtatgctttaatacagtctttaaagagaggcatgggctgaagagatgactatgtgaagagtgcttgtcatgtaagcaggaagaactgacttcctttccctagcacatgttaaaaagctggcttggcagtgtgtgcctgtaacctcagtactggcgagccagagacagggagatcctggggcttactcaccaatcagtgggctccaagtttaacctacctcaaaatacacggttaagagcagttgaaaaggatagccagtactgatggatgacctacacacacccacagacacacatagacacacatacacacacacatgcacagacacatccacaaacactaacccaagtatacacaaacatgtatacacacacatacattaaaaataaaggagctgggtgtaatggcacacacctttaatcctagcacttgggaggcagaggcaggtggatttctgagttcgaggccagcctggtctacagagtgagttccaggacagccagggctatacagagaaaccctgtctcgaaaaaaaaaaaattctattctgagaggcctggagaggttggcttagcagtaaagcacactggttgttcttccaaaggacctggattcaattcccacatgagggcttacaaccatcatttactccagttccaagggatctaacacagactcgatcccaacttccacatgaggctcacagccatcagtaactccagcctcagaggatccagtgtccttttctggcttctgaaggtgccgggcacagacatgcatggaagtaaaacacctaaacacataaaattaaatacatatttctaaaaggtctaatctgcctttgaagtgattgattcttctgaaatgttcctgcattgagtgcatctaagacgatttttggctgagctttgacaatttccggaagttatttcaactgatgctgaagtatataactgatgcctatataggatgcctgtttttaccctaaaacagtagaagttgttttgaatttaagagaagtgtcatgacatagatggctcagtggttaggagcacagactcctcttgcagaggatccgtgttcaggtgccagcacacatttgaggtggctcctgcacacacatgggttcctgtacgcacaacacgtttcccaggatggcacggtgctgatgctgggttgatatctgtccttctgctgctgaggctgtagacaaatcatgtgtagtgtgctttcccctcatgctatctacacatagccttactgaactgcttcacacactgccccgttcaagtgtgcaagacagtggattttagtagcggtgtgtaactgtcactgtcacctaatcctggatatgtagtgggagatgttttgtgctttagaagggatacactgaggaagcagaggagtgggacacgtgaggaccatcctggcacctgtcagagaacacaggactgccctccggcagcactgccagcccagccagagcctgcaccagcccacctacacctgagggagggattgtgaagggcatttgctgtctactccaaatgctttagacttagctatgactttatttttagggcagcttcaaataagttgacagagcactgagctagaagtaaagcttattcaagttcacagaggaacaatgcttagaagaattttaattttgtattgcatttatttatttataaaataaatgtgtacatttatttatataaatactacattattggggcgggggagatatgcatgccagggttcatgtgtcaataagagaacaatttggagaaatcagttctcttcttctaccaaatgggtcccaagagcaagcacctttaccaaccaagccatctcactgacaagcacctttaccaaccaagccatctcactgacaagcacctttaccaaccaagccatctcactgacaagcacctttaccaaccaagccatctcactgaccagcacctttaccaaccaagtcatctcactgacaagcacctttaccaaccaagccatctcactgaccagcacctttaccaaccaagcgattctgaaaaaaaattacctttcactgaagcaaaaaaaaaaaagggaagggaagggaagggaagggaagggaagggaagggaagggaagggaagggaagggaagggaaggaaaggggaaaaaaaacccctggaagtctgctaactcctgcttttccttcctccatccatcctgacagtcccacaagtcctacagtgagacccagtgttctgcctttattcatgacgtgtgtgacgacggcttagcctaccctttcccagatgggatcctggatgtcgttctccttgtctttgtgctctcatctatccaccctgacaggtaaatgaagacgaaagggcaaagctaacgtttcagctcctttatcagtcctggtttttagaactatcaaagcaaaaatgacaatccctgaatttattacttagcgcactccgttatgtttaacatgcagcctcttaaatgcagttttctcctttcttcacactctaagaaagaaactggtcaaatgcttcattagcgagctttctgtcactgtcaggatgaagtgagcacatcctggcaagacacgtacctattaaaagtgacagcttttcaaggaaattacagatgcagaacagcctaatagactcccgggagggagattgtacttagcgatcagaaacaaacatctttgatttagcatctccttgagtgtttggggagagatgggctgcagtctgtgtggctcacccgagtccagtgagaggcttgtgtttcagagaagtctgcacaggaatcatggccatagtgatttcacagattgtcattggaactttaggatctcaggtgggtcgagagatttctgtgtccccttcttattaatattcaattcaaattattatttactcttaatggtttatttgtatgggtgcgtgtgagtgtgtgcatgtgtgtgtgtgtgcatgtgtgtgtgtgcatgtgtgtgtgcatgtgtgtgtgtacatgtgtgtgcgtgcgtgtcctgctgggcattaaccttaagctcttatgcatgttggtcacatgctcttctactgagtgtccctaccctccaaagtatgacttacatttttatgcttacatgatactggtttttatttttgattctttgagagtctcaccgtgtagcctatgctgactttgaagtctttatctagctcaggtggacctcaaaccccgagtgaccctccttgccttaacctccccactgttgaaatcacaggcaggtaccaccatgcctacccaacagaacttgtgatttttataagatgtcacagcccccaggaagagggtacagacctgcataagatccctgttgcttgatagtgtgatcccttcccagagaaaggtgagccctacgtgttacgttgctaagacatttgctgactttttagttcccattcaaagctgagaacttttctacttaaggaggtaaaatttgattcccaaaataatccaaaaaaaaaaagttatatttatacctcatgcatagattaggttccatcaaaccactctcccctctgtttccacaatgtatttcttttctgataatatgttcttccattggcactgctgcagaatagtcaaaatgtcacctctgtattttgcttccttttgtgaatggttaaaagatgagagtatagtaaagagcaagcattcctatttggtacgcaaggcaaaaaaatgcatcgattctaagtaagattacaaaaagactgattgagattggttcaaagaatgtattttatcataatttgaattgaatgttaataaaaaggggacacagatatcttaggattcttgcccttgttatgcagtattcattctgtgtattataaaataaattcaaatgtatcacatcagtgcaatttttttacgtatatatgaaatgaactaacaatcaggtgaatgagctgggagtggtgttgcacaattgtggtcccagctacttgagtggttaaggctaaaggatcagtcaacgtcatttaactgaataaaaatgaggtgaaatgaatagagagacaataaatgtaaataaatggcttagcagtgtctttaggatcacttaggaccataattataaatgtgcatccaagaacattctagaaaagtagctgattatcatcagaaacaaagcaatggcagtaattctgctagaccctgagtctgagggtggcagcttaggtgaaagtatttcataggcgattacaggagacccttaactgtgtttctaatcattgacataaaagaaaatataagatacatgctgtgggcagtcagcaaatagtggggaatttttattctttgtttgttccgtttttatcctctgtcccttcctcttactctatgcaggggcataaggacagcaatcagctgaagacacaaaataaagaaagggctgaacatcctagcacttggatgagacaggtggctctctgtgagtttcaggcctgttgtggtaaatatcatttggggtttctaccccaccttagataatttagttcccaaataaaagacgcaaaacctttatatttgtaataagccttaaagcattagagctggccagatatcaaccctctgctggtctgtctacttcctggtcaataaccctgagatattatcacttgcccagctggccagccttcatggccaaacacttacagtccactccacctaccccatagtgccttcttctctcctgcctctctctcctttctccctcctcatggtccctggctcagaccccaagcctgggaactgcagccccgcctaaaggcatctttactaaccaatcaaggacaacttggggtgaggggcaacaatcatacaacaaaagctgatatgtgtgaggatctgctcatctggaacagccagatttgggggtacaagggatcctgaactatacaagatggagaaggggacctgaacgctagcatgcgttcatggtcctctgcttcctgactggaaggagtgtgacctgctgctgcagctcctgaccccttggcttccctgctgtgtagtctgtaactgaactgtaagccaaagtaaacgttctctctcgagttgctcctgtcgaagtatgttatcacagcaacaggaaaagcaactaagacagggccttttcccattcctgtcttaccgacttcattcccagcctggtcccaccatgcttcccaggagcccgagtgcagataagtgacaggagaagcagccccactcctgtcctacccatacactctgatgttaggccaggattaacacagtggctgcatagtgatgtgctggattttttatttttctaaattttttatttcatccttattttactaataattccagagattttgctctatacataataagtttatcttgaaattgttcttttttaaggtttagatttttaaattttatttttattttatatgcattgatgttttgcctgcatatatatgtctgtgtgagagttttgggtcccctggactggagtgtcaagcaggggtgagctgcctgccatgtgggtgctgggaatgagcccaggtcctctggaagagcagccagggctcttacacgttgagccatctctccagaccccagttttgttttgttttgttttgtttttccattgatgtaagcactacatgaaatgaacaaagaataacacttcccttcgtgtgtttatgcttctttccttttttcttgtgctatgaatgaaactcagggcttcacacacgctgggccagcatccacgcatggagcttggtactgcaagtaccccggcttgtagttcagcttttaaaaactttcacctaagcatgccattgctttctgtcatgtttcttatctgtttagatttcttttcctagcagcttttatctcctccctagctgctttctctgtgacatggcagaagctggattttatcccactagtccactaaatgtagttttttaggatttttaaattgtatgtatgatatgtgtgtgcgttatatgtatgtgaatgtgtatatgtgtgtatgtgcatctgtgactatgtgtgcatgtgtgtgaatgtgtgtatgtagatatacatgcataactgcgtgtgtgtgtgtgtgtgtgtgtgtgtgtgttatgtgtgactgtgtgtgtgatatgtgtgtgcatgtgtggatgtgcatgcgtgactgcgtgtatgtatgttatgtataactgtgtgtatgacatgtgtgttatgtgtgtgtgcatgtgtgtgaatgtgtgtgtgtggatatacatgcaaaacttgtgtgtgtattatatatgtgagactgtgtgtgtgtgcatgtgtgactgactatgtgcgtgtatgtgtatgtatgtgcggctgtgtgtcccccatcatgtatgtggcagtcagatgactaccttgtggcgttggttctcgcccttcgtcctcacatgggtccctctcaagttgccaggcttttctgccaagtgttttctacctgctgagccatcgtggcagccataaatactgttttaattgaaaggaatatataaattatctgcgttaatctcttcaccttttcaaaataagatcacctcagcaactttaagtggctcagataaagcaggcgcagggctggtgtggtggcttatgtctgtaacactagcgctcaggaggctgatgcaggatgactgctgcgagttcaaggccagcctgggctacataatgagcttcagaccactctgggctgcagtgtgaaaccccatcttaaaagccaaaatcaaacaaaagaaaaagagacaacaaagacttgccctataggctgcctttcccttccctcccacagtagtcagatgctggtggccgtgtcccctgaatccgctccagtggagctctgtggggagctaaagcctgtcactcaacaaagacctgaatctttttagtccctggcccataaaacatcagccatgagcacagaacccaaaatactaagtcacaatctattttaagaggtcatatttgattgcatgctacataagcagaaagggtgattagaaagaaggaagcaagagcctctcggtgttgagctgcaaatggggatgtgactgcagtcgaaacaggccaagaataaggggaaaaagtatttttcttgagaggaaccatgaatacagaggcagaggacacagagcccagcatgctatagtgtttgtttggaagagatgcttttggttagaaagcagtagaaacctcattggaaggattcacactaaaaaccctatacgaactaaacctttgccctctggattaaaatcttgatattgttttgacaacgatgtgatttaactagaccattgtttgaagtcagataactcattggtaatatccatgaagaattaccaagaagggtaataaggtatattattagaaagtgattctgttctgtgcttggggagggaagtgtttgtcccaaggacctgccaatgggagacagagagatcagcaaaggggagaagtaagaagacagaaagagattggtgagcacacggacaggacagaaagaaagggagtggaccagggtacctttcatcttactaaggaagtcagcggtggaaggggtggttcagcgagtaaagcacttactgtgcacccctgaggaccctgggtcagatccctagaacccaggttaaaaaagccaagcaggcatggatgctgcctgtactcctggccttcagggggcagagacaggatccaggagcaaggtggctagctagactagccagaatctgggttctaggagagaccctgcctgatgtcaagtttgggctacatatacatgtgggcatgcatgcacactcgtggaaaaataaaaggaagggagggagggaggaagggagggcggggcagagaaatgaagaaaggggaagagaaggaaggcaggaaacgaggtaacatggaagaaagatgatctgtttagctatataaatttgtggtggttctaacatattgttctattttacagaaaaagataaagttcctttacctttgtcccctgccttattcaatggcagaaacataagcagatgggtgggtgagttgtctggttggttggagacagggttgcactatagccttggctggtctcaaacccatgatcctcctgttatagccccacagtatgcaccattgtaccaggtttgtggtttgtggttcagctctgacatgagacatcaagttctgacgttcccagctgagttcagttcatgaaacacttagacttctgaatgtggttccttcaatacaaaatgcttttgtgcttttgtttttttttttttctcttacatgtatggttcctttggcttgttgatatctacttaccttgtctctgagaaggttgaccctagcatataaaacatctccacataggttatcttactttgttttcaaaggatgcaagctgttgcccaccgactgtccaggttgctgaagcccggaggaatgctattgtttcgggatcatggaagatacgataatgctcagcttcgttttaagaaaggtaatagaagccggagaggtggctcagaggctcagagtgtgtgctgctactgaagaagggggttggttcccagcacccacatcaggtagctcacaagcacctatagctccagctgcaggagctctaataccctcttctgtcctcctcagacacccacacatatgtgcatatacctacataagacacatatatacattatttaaaataattaatataattattatttaatattaatatataatacacaattttaaatatacataattttaaaattgcttacaaggtaatagtatgccaggtggtacacacctttaaatctcagcactaagaagacagaggcaagtggatctctgagttcaaggctagcctggtctacagagagagttccaggataaccaaggctacatagagaagccttgtcttgaaaaacaaaacaaaacaaaaacaaaaacaaaaaaccaaaatcatgtcaaattgtttgggtttatattgtcttttaatgggatattaagttcttctcttttgtcatattttagggcgttgtttatctgaaaatttttatgtccgaggagatggtaccagagcttatttctttacaaaaggtatgctgatcagtctcgcctagggtaggcggtgagctgtgaaaaccctcctcaagcgtctgctcacagggacacactcaggagctgtgagcacgaggccacagtgctgattaacacaagtcttcatgccccggtactcacaatagtgccacacagaagcatgcaatggccttttgcccttcaatatttttccagttaaaactgcctttaaagagtcggttgtttcgctcttaccctggagcgaaggtacagggtgtaatttgggagttagtgttagcctgaatatgaaagaaactgataagatgccacagccagaggaaagaattttatttttaaaggtctatagaaaattcgatctcagtagtcaatttcttgtctttagtaaatacttttgacagcaccaggtgaaccgtgcgttcagggatttctccaaagttaatagagccttttataatatgtgatcttggatgattttaagcaaaggctcagaaaggaggcacatgtcaaagtatggaaagctgtagccacagctcggctcacagtaacttaccctgatcaggctgacccgtccgtccgtcagcctgtctgtactcgcagtgtatgtgggaatgaagaggccccacctggtgttgtgggtttccttcacccagctctctgcttcttggtataagagaatcggatgagcagtcctccatggtgttccattgggtctcacccctctcccccccaccacatgctatatcgttgactgccactcttgtctcaaaggggaaatccgccgtatgttctgcgaggctggattacacgaaaagcaaaatctggttgatcatcgcttgcaagtgaacaggaaaaagcaagtgcagatgcaccgagtgtggattcaaggaaaattccagaaaccatcgccctggactccacagagtggaaattagcattcactgcattctcaggaccgaactatgtgtcatgttaaagtatgaacccagggcctgatactgttcaaagacttctcttccagagatgagcagaagagcatccgcagctctgctggtctgctgtcagtgctctcaggacattttaagaacaaggatgtgacttgaaagagtctcccaccctctgggtttccagaacttgaaatgtatgtttggttttgtttcatctaaccatgttcccttgaattgtatgactttgaattaagaagcgtatagttttgagaaatgtaacccgtccatgttttagaagtggaaaaatgatctactttattgttgagtatggtaaagcagtcaaactgccctctgctgtcagccagtagcagcggcatagtgtgccttgttcttgggggaactcaggatgaagggttactgtgttttgttctgttcttatctattttctctcaaaactcaccaaccaccaccaccaccaccaccacacacaagtgtctgaaatacaaccttagtttctctttccaaaaaatggggaagtgtgacccttgttaacatcacttccgggctattcttagatatgcagatcatctttgagacactgtctgtgctgtggtggccagttttaattgtcaacttgacacactctagaaccacccaggaagagtctcagattgtcagttgtctgtgagattgtcttgattgtattaattgatgtgggaagacctgtctactgtgggcagtaccattccctggaggttggaccctgaaccaagtaagtgtgggaaaagggagctgagcactggcacaccagtattcatgctcgctcttctcctgaccatgggtgtaaccagctgcttcaagctcctgcctccttgacttcctgctgtaactgggtggactgtagcttggagttgtgagctaaaataaaccttttcttccaaaagttgcttttgttggagttttgttttgttttgttttgttttgttttgtttttatgtgcatggggtttgcctgaatgcatgtctgggcaccacgtacatgcctagtacctgcagaggccattggtatctctgcctgcagagagcatcggatccctacctgagttataggtgtttgtgagcctgttgtatgacagacttttcctgagaagaggcaatatacacttgtctactcgcccacagtagggagtccatgacagaacaaaggatggataccactaaagttcaatttagtgaaccagtgagttttattagggtcatttacaggaatatggatgaggggttgcttacaggagtagaaatgactcaaagacagctgcatcaccaaagtcaaccccagcatgggtgacagctcacaaaaactgggaaccaggagcccactgcacagcctgcaggctgattggagagtgccctttccaggtgcctcagttctaagcctcttccagtagctcggctggtctctgcttcttggcatcttgacttgtctggaagtggtgtttactatttattctggggaaggaggggcctagtgaatttagtcaattttagggacttcctgcagctattctgagttatttactttttgtcttaactttgagagctagactgtttcaatctggaaggaaaccactatacaacagagctgtcatgtggggactgggagtcttcttctggaagagcagccagtcttaacccctgagccatcttgccagcctcactgtcagggtattttatcactgctaaactaaagcatttattcaataaaatcctcctaaccactcgaaatgtatttgtttcccttgcttcagaaagaaaatatgttggcttgctaattgcccattgtaaaaaaacagagtccctaaaacaagtcccccattatatagtgtttactgaatgctttcattatatgttatcgaagtttgggttcacaacttgtgccccaagtcaggtctggttacccatcttcagtaagccaattaaaagagccagactaaagtagaaaatagaaaaggagacttattcagtgtggacacattgaaaagatggacagagagatcaaggggactccccccaggttcagtctttggggttctgaaggtttaaatagagacctgaagaagcagccctctcaaggtgtagtctctgtaagccctgatctcagaaagaacagatgaggaaataaatcagtgggaagaaatgcatagtcctctgaaagcagtggtctgggaaaatagagatccaaaagtttttccctccttatttgtttgcttgtttgaaacaatctaactcacagccccggctagcctcagcacagagcagagatcctgcaaccctggcctttagacctgattcatggtgcagactagcctcagcacagagcagagatcctgcaaccctggccttcagatctgactcatagccagggtagcctcagcacagggcagtgatcctgctgccctggccttcagatctgactcatagccagggtagcctcagcacagggtagtgatcctgcagtgctggcctccagggggttcagatttccaggtgtgagactttttaataaaatcacttagactgtttggggttgtgtgtttgtaacccttcagaattgaagatattcgaaagagatgctggtgtctctcagtctcactgtcagactgttgaaacagtggaccccaaagaagtaaagctttcacccaggaatctcatgctgggagacagaaagggtaccagccagaggggtacttgtgtcccagagagagattccacacagttctaacaactccagaccacctctaggacaagactaaagtccagccaagggcccaatggtgggcccacacatcaatgacactgcttagatgtgccagtccttggccctctatttaaaatttaatctcattcttgaagattgaggccaacttggagtttctctgggtctctgtccctcttccagtgcaaccacactaagtgagtctttactgtttttcacttcaatttgggactttgctgtttgggttggtttgggacagtgtcatactctgtagctctggctgacctggaacttgttttgtagatcaagctgcctttgaactcagagatcgaccttcctctgcctctccagtgatgatatcaaaggcatgtgccaccacacctacctagcaagtttgcctcttttaattgacttactgaggacaatggccagacctgatttggggcacaaattgtaaccccatagtttgagaacaggttgaccttgggtcctattgggacaaaacagcttaactgatggtatttccagagcagacagagtcaggcaaagtgcctagggaacgatctttaggaaaaccgttcagttcttacttcatcctagcacacagggcaggtgtgttcactcctgtatggagagaacatctgtgtggggaaatgggacaggatcaaccttctgggaggagatgggctcagactagtccttgactctcaaagtattcaaactagatcagtctgtacagaagttaatgagggatggtgcagagaggtggggcaagtcagcttgtaaacagtagcactgtgaagatgggacttctcatcttcaaactagagccatccaatttggttggtttattttcgttcactctagccatggtgttttacaataagatgtagagaagtctgttgaagacttgtctatggcatataaaatggagtgaggtctgtgatcagtgatgaagaaaaccacaggcccttttagaataaatttgcctttggtggcaagtccgtagaaatacagttgtcacggtttctgtttaaatatgcacacatcagtaaatggaagaatcagaatttgcccaagactcttaactcacttgtatttcataattaaagtctacatttaaaagctaagacagtcatgaaagtattatatgcaacagggcagtttagataagttaaatgttgctatgggaaccccaacagatcttctcatgtctccatttaaaaaccatggcccaaggtggttttaaaaaacaacagaaggtaaaattattctcacattctcacacatgtaaattgtactgtctctctcagttctaaatagcagattcaagccagcctcttgactggcacagtaaaactcagcttcatatctttctataatgtattacagcatgtgagttaacctttaaaagcttcaaaaatacatcaaccaaatttggactctgagacacaaactgggttgccttgggctctctccagcaccagtctcctaatccttgaacatctccacagtcgtccctccagatcccaccccaccaccaccacaccccatcttctgtttgtctgatccgtcttttcccacttagcctaccttcatcggcctcctttttcaggtttgctgccagatagaaatgtaaatttaagcagagaaagccaagggaagggccattcggaattttgcctgcagatactaagaaattgcgaggtgtcacaaatatatctgtttaggtattagcctaaagtatctgctaactacgtggaattctaaccctcctcacatccataaagctagaccatggttagcagaagctgatgtttaaagatcccttttccaagggagccgcacttcagagagtccattttccccaacaggaaaaggtatgttcctttgtcttccacattggttaaaagtacggtctccattttcaccaattctgaaagttaccttggagcactgtctgcctggaaacatcctcccatgaagctctgcttgagaaggtttcgaggctactcattaggggtctctgttacacatctcccattgtgcactggaacactcagttgccattgacttctgctaacatacttgtgcgagttccctatgcagcgtctccaaactgagaatacatcccgatttctaccattaagtacttgtaaatcattgctacacattagttggtgtgtgaaaatagctatcttcctgggggctggggggggggggcacacaaaagccagagtcacatgaacgtctgcatcgtctcattctctccctgaactgcttcaccccacctctgtggttttccatctcctaaggtctgaagcctgaatagatcagctttgttacctaattggttctgatgttggttatgctcctcacaggagcagttgacttcacatttgcatcgctaatagccctctttgagagcctctgcccctcctgcctgcctctgctagtcatcagtagactacacacacacacacacacacacacacacacacacacgttgagggtactttcccctcttgtggaagcacattgtaaatcctaagcactgaatatgggaggtgttgttattaataatagcgtctacaatctacaaggcagcgtgcacacagcactcaacatgtactttttcaatgctttttgagacactgagagaacaacagtactgtgctgtgggaaaggtattgcctgggagtctcccaggaaaagaataggttccaggtcccattgaaccacttcactactctccattcagctctgagtgctgattttgtatacagtaggtacttcatttggttcccaagagcctatgaattagctgttactggggccatttaacagatgaggcgggtgctctgaaatcctcggtaactcgcccaggatattagaggtattaagtgacagagtcaggatgtagacctggaattgcctttactccaaaatccttttcatttgtgggttcacaggctgctgggaaaaacactgaggaatagagagcctctaaatgtggtgcagagcttgtgggagcttggctcgtagaaccctcaaggatcctcctgctcatcgaagatccggtcattcagtgaaaaaagtaggtcacacttgactgggttataaaatggaaaggaaggagggaagggaggtgacccgtgaggaatgacagagcaaaacccctcaatcagttctctgcagcattctgagtctgctcagctgtgccccacccccaaccccctgctcccatcccggagaccccacaggctcagccttgaacctggcgtacctcctagcagagcacacagcacttgcgtactcctcactttaagttaaaaggaaaattcaaggaagggaaaaggcccttaaaacatcttcagagggatttggctgtactgtaacctaaaaaaatctgtgaagtcgggaggtgtcagaaagaaagcatgcatgaaacatctttatttaaagcctgtgtgtacatgaatgacacattaatgccaattcaaacatgaaatgtggatccttttttggaatacggtctgggattcgaaaggcgcaaaggtaccctgcacgctggtttgcatggggttatagatataaatggaagtaaaagaactcttgcatcttcgtttttttaataaacctgtgttatggcctcagagctatagaggagagtaggtgccaaaatctgcctttcattaacataggccttaaatgacaaggaagaggtgttgaagacaaaattactttttcctatgagtatgaatcagcaaagtgcagcaacaagcaagtgataatagctgtgcgggtgagagcctatgggggcggaggggggggagaggggggcgcggtcaagaaaaatagcatcagctggaaaagacacaagcacacctgcgaggcctatgcaggaggctacagagcacagctcccctgaacaccacctcaaagggctcagagcacagtaaacccagcttggacaaaacacattggtatgagatgggtggaacacattaaaatctccagatggttgaagacagcccaccctcagctgccgctggagctgtcagaggcaagctacaggtgccactgcttggccaagaacttaaaacaacagctattgattctctgttgcctgcggcctcacaaccacttaacctttaagaaggagaagctagagtagtgattctcaaccggtgggcacagccccaccttggagtcaaccgaccttttcacaggaggccacctaagaccatcggaaaacactggttgttgcattccaactcgtaacagtagcaaaattacagttaatgaagtaatagtgaaaataattttatggatggaggtccccacggcatgaagcactatattaaagagttgcagcattaggaaggttgagaaccactgagctagagagaggcagatgagcactgcagaaagggtgtgggtgggatcaatattggacttgaagtagtcacagtgtccagatacctgtgaacttggcatctcagtgttctgtgtgttctgtgtcttaaacatgattttctttaacaagcagctactaaggaaagcagagagcccacccccccggcgccggggtgggggtgggtggggggtgcagggagctttgctctcagatgttacaaagaagatgacccttgataggttccccgacaccaacaaacaccaacctcatctcttctacatgggctaatgaaactggatccaggaaaaatgtgcattttgctatacttacacaaattccttggcaatgttctcaacctatagttccttttcagagctacttcctagtccattacaggaaaaaaaaagtagcaattaagttttcctcagttaatctttgtatatcaagtaggattgtttcaaaaaccaccgtgggaggtgcactaacccttcgggcttttaaggccttttcactggggaaaactgctctaaacgctgtgagttcctaaaattaatgatgagatgctattgagttgattgcattagtgcggtttaaatttttctttttcactgttcagtacttagcacaagcagcatcacgcagtcgctgcctcatttctcttgatttctgcctccttggagtaacatgtctccctcccgaggccctgtcctgcctaacagaatggtccctctccatccatctttagcgtcatgcagctcctgcaggtgagccgagaccacggcacccctgggcagcgctgggaactcagtactaaaaatcacctgagagaaaatggctgaaattgcctgcatagcacacggcactgaagcaagaggaaaatttctgcctccaagggtaattgcttttctcgcttctcatagttcttccttcacggcgctcatttattttaatacgcactatccactttgaatttctagaagatagggtttctgttgttagtggtgtgttttgttttgtttttttttaatccaaatgaaaggtaagattcaggatccagaaaggtgtgtgtcctcatcctctcacgcgtatattcttaggcattcctcatttgtggctttctttcctaatagaacgcttgggctctggagactagggagacaaagcatcattagaagccgccttctttcactcccttccctgtgtgccttcccgtcgtcctcgcgcgcctccgggtgcttctttccctggccaaatagtgcaaggaaatcctttgcagagctcttgcttattttagggcagggaacaaccatggacacagatttgccacttcaggggctgctcgtttcctctcttcgaagtttggttgagcgaacggggacctggggtttgctcgccacctatagtggcaggggctgggtacccagcagtcctgtgctgaagtaagaattaggtcctgtgctttccctgggccagcaagctcacctttccctcataggtttgttgttgttgttgttgttgtttttagctttgacttttaaaaagtatacatttgtatttctaattgatgcatagtaattgaataatgtagtgttggcacacgtgcgcatgcacgcacacacaccttggctttgaactttagcatgctcgccacgagctctgctttacactacttcacctgctctagctttgactccttccagtacaaattattagagctgtttctcctctgggatgtagaagctgggcataggcacaaggagagtctcgaaaacaaagcgggctctttgcagccttcctgtggtcagaggccatgccaggtccctgagtaagttttttttttttttttttttaatagtcctggctgatctgaaactcactttgtagaccgggctggcctcgaactcagaaatctgcctgcctctgtctcccaagtgctgggattaaagtgtgtgccacccggcccagtttacgtcatgtaagttttaaaagccatctatactttcttcactgtggcacagtgttattcgagttgtaccactctattccgtattgatgtttacatgggaatagaatgtactaggagtgggtgggactggagaaatggcttctgtggttaagatcacttgctgccattgcagaggacccaggttcgattcccagcacccacatggtggctcacaaccatctgtaacttcagtttcaggccatctaacacctgcttctgacccccttgagcagcagacacgtgtggtgcatggacatacacgcgggcaaaacactcgcatgaagtaaagtaaaataaataaatctaaaagcaatcgaaaataattctaaaattattaaaaattatttaaaagagaagaaagaatgacctctgggatcagcctactggaggaatcgtattcatagtttgttattgtgtctgtaactttccaaagagatgtgctggagcctatccaggtattaacacttatgctgttttctacattggaagttggggatgagaaagttggatagtgaatggaaaggaagtagagaggggcgggtggggagcagcaaatcagagggctccgctctgtcggtagtgggcgtcacctttctaaagggtgatctgcaatagagatggcaaataaatacctattcacaaggggtcacctctaccaagggagacctcacacacggcgtaggtaaaaatccaggtgaagacgcatgccagattagcggagtggtacagagcccgctactagagatggtgaccagcagaagcaagggccctcgagagagaaaggcatggccacagatcagctaagtactgctccagtgtctcaaagggaaacacaaggtcagggaagatcggggcaagagcggctcccaactgaattccacagaactgaatgatatcgccatgtccacccccaccccacccccaccgcctgagcttgtagagagagatggaactgaggtacagagtcaaagaagctgcagagcccataagcttttttttttcttttctgtttacctgattttatggttctacacaaatggcaagtagggcattcagctcttgatagttttttgttttgttttgttttgttttgttttgttttgttttgttttttagcacaacagaggcgtgccctcctctgagtcccaccatttcagagctcttgaacttgtttcccaccgtgatatgtcaaattcatgagttcattaagcaaagggatgggaaggaatcattggccaagcaaggaactcctcaggcccagtggaagaagaaagccgggttgctgcttccctgggggaaaggttagcaatccgggagaatggaacatccaagcacctggacattttctgttcttctgtcaggaagtcagtggagggtaagtgattattaacccaggataacccatagttaagatcacgtggtggagcctacatcatctctcaagttttcagagaagaccagaagtaccatctatgcttcctgcctaacttttatttcagggagacctactaagacctgaagagatggcggctcaggtgttagtctgctgcttagtttttgtcaacttgacaagagagaaagaaagaaagaacctcaaccaggaatctcttccatcagagtggccatggcatttctgtaggacgtcttcttgactaatgagtgagatgagaaagtccagagcactgtggttagtgccacccagactggttgtcccgggtcgtatgagtgagccagtccgcaatgt

SEQ ID NO: 52 - DNA, 2244 bp, Mus musculus
gcagtgggtcgggtagccttccgggctgcacgcggtaaacctggatagctttggtgggtgctgtgcagccacctggtggtgtcgcttcacctgtgtgtcccaggaagctgtccctttctgccctggtcgtgggacgactgccaacccctcctttggccctgcaaggctctggccacgcgtccagaggggcgttgtggccagtgggaccctccaaagggatcacatgcagtggtctaaagaagaagaagacgcagctagaaaaaaggtagaggaaaactcagccacacgagtcgctccagaagagcaagttaagtttgaaagtgacgctaacaaatactgggatacattttaccagacccataagaataagtttttcaagaatcgtaattggctgttgagggaatttcctgaaatccttcctgttaatcaaaacactaaagagaaagtgggagaatcatcctgggatcaagtcggaagcagcatctctaggacgcaaggaacagaaacccattgtcaagagagttttgtctcgccagaacctgggagcagaggatggtctgctcctgaccccgacttggaagaatacagcaaaggacctgggaagacagagccgtttcctggtagcaatgccacttttcgaatactagaggttggctgtggtgctggaaatagcgtgtttccaatcctgaacaccttgcatttgaacacatctgactctgggcttggatgtcgtttctatttacataggaacattccaggatcctttctctactgctgcgactttgcctctgaagctgtggaacttgtaaagtcccacaagtcctacagtgagacccagtgttctgcctttattcatgacgtgtgtgacgacggcttagcctaccctttcccagatgggatcctggatgtcgttctccttgtctttgtgctctcatctatccaccctgacaggatgcaagctgttgcccaccgactgtccaggttgctgaagcccggaggaatgctattgtttcgggatcatggaagatacgataatgctcagcttcgttttaagaaagggcgttgtttatctgaaaatttttatgtccgaggagatggtaccagagcttatttctttacaaaaggggaaatccgccgtatgttctgcgaggctggattacacgaaaagcaaaatctggttgatcatcgcttgcaagtgaacaggaaaaagcaagtgcagatgcaccgagtgtggattcaaggaaaattccagaaaccatcgccctggactccacagagtggaaattagcattcactgcattctcaggaccgaactatgtgtcatgttaaagtatgaacccagggcctgatactgttcaaagacttctcttccagagatgagcagaagagcatccgcagctctgctggtctgctgtcagtgctctcaggacattttaagaacaaggatgtgacttgaaagagtctcccaccctctgggtttccagaacttgaaatgtatgtttggttttgtttcatctaaccatgttcccttgaattgtatgactttgaattaagaagcgtatagttttgagaaatgtaacccgtccatgttttagaagtggaaaaatgatctactttattgttgagtatggtaaagcagtcaaactgccctctgctgtcagccagtagcagcggcatagtgtgccttgttcttgggggaactcaggatgaagggttactgtgttttgttctgttcttatctattttctctcaaaactcaccaaccaccaccaccaccaccaccacacacaagtgtctgaaatacaaccttagtttctctttccaaaaaatggggaagtgtgacccttgttaacatcacttccgggctattcttagatatgcagatcatctttgagacactgtctgtgctgtggtggccagttttaattgtcaacttgacacactctagaaccacccaggaagagtctcagattgtcagttgtctgtgagattgtcttgattgtattaattgatgtgggaagacctgtctactgtgggcagtaccattccctggaggttggaccctgaaccaagtaagtgtgggaaaagggagctgagcactggcacaccagtattcatgctcgctcttctcctgaccatgggtgtaaccagctgcttcaagctcctgcctccttgacttcctgctgtaactgggtggactgtagcttggagttgtgagctaaaataaaccttttcttccaaaag

SEQ ID NO: 53 - protein, 421 aa, Mus musculus
PSGLHAVNLDSFGGCCAATWWCRFTCVSQEAVPFCPGRGTTANPSFGPARLWPRVQRGVVASGTLQRDHMQWSKEEEDAARKKVEENSATRVAPEEQVKFESDANKYWDTFYQTHKNKFFKNRNWLLREFPEILPVNQNTKEKVGESSWDQVGSSISRTQGTETHCQESFVSPEPGSRGWSAPDPDLEEYSKGPGKTEPFPGSNATFRIVGCGAGNSVFPILNTLHLNTSDSGLGCRFYLHRNIPGSFLYCCDFASEAVELVKSHKSYSETQCSAFIHDVCDDGLAYPFPDGILDVVLLVFVLSSIHPDRMQAVAHRLSRLLKPGGMLLFRDHGRYDNAQLRFKKGRCLSENFYVRGDGTRAYFFTKGEIRRMFCEAGLHEKQNLVDHRLQVNRKKQVQMHRVWIQGKFQKPSPWTPQSGN

SEQ ID NO: 54 - DNA, 130877 bp, Homo sapiens
tctgacacccgttaacattccatgaaaacagtgttttgaaaaatatacacccaggcaaagctagccttatgaaatgagcttatcctattattttatttttattattttcctaacacgtaaaataacgtaaaataactgttgctctaaatactttgttactgtttcagtatattgagtggaatgatctcttaaacactaagataattatacattagcttatgctgcttatataacttttaatcgatttataactttttagttttcaggatctaaaaaaaatctatctaattttaaaaacacattcataatattagtatttttaatacagaaattatttcatgaggaaaataaaagatatactctcatcttgattgctttaaagatgcaagagtcactatgatatttaagttgtattattttatgcaatatgttaataataactggttcttctaggctaaaaatgctttagaaacaaacgctctaaaaacaaatcttaccactgggcattcccataataaagcatcctctattttttctgatttggaacattttggcatttcataaagttttcttggctcagatgcaacactgggaaaaaagaaaaataaatgattattattcttgataaccaagacagtatttgttcaggtttgagagactatttttattcagagatgtgaaataccaaggcacaatttatttgctttcctcttaactaaatattaatatttttttctgatcacataattcatataaaaaaaaacaagattaaaatagtttacaataccataaaactgccaaaaataacccttattaacattttggttcatttccttctggtttatatacatatacgtacctggacgttgttttccaaaaatggttcatattaaattctttctttacctctgaacatttactaagaatatctctgttgaattccatcaagatcaaaaactattgttctgatatttaaaatgaaaattactggataaaaagggtcccattattttagaatgaaaactagtggatttaaaaaaaacaaaaaacaaaaaaccctttatggtttttttttttactcccaaattacttttcagaaaggttgagtaaatttatacttctgccaatattgaatgctatatctttgatgtgaaaaatagtctcttttaatttgtacttctctgattagttgagatgtgatcataaatgtttaattttattttgttccttttttttgagacagtttctcacactccaggctggagtgcaatggcatgatcttagctcacttcaacctccacctcccaggctcatgtaattgtcctgcctcagcctcccaagtaactgggactacaagctcatgctactacgcttagctaattgttacattttttgtagaggcagagttttgccatgttgcccaggatggtcttgaactcctggactcaagtaatccacctgcctcagcctcccgaagtgttgggatgacaggtgtgagccacttcgcctggcgcttttctttctttcttttttttttttttttttttgagatggagtctcactctgtctcccaggctggagagcaatggcaccatctcggttcactgcaacctccgcttcccaggttcaagcgattctcctgcctcagcctcctgagtagctgggattacaggtgcatgctaccatgcccagctaatttttgtattttgtatttttagtagagacagggtttcaccatgttggtcaggctggtctcgaactcctgaccacgtgatctgcctgcctcagcctcccaaagtgctgggattacaggcgtgagccactgcgcccagccccttttcatttttttaaatgaactttgaaattaaattactgttgaaagagaaacaattttcaggtgataattttattgtacctctttgacattctctcactgattcaaaagtttaaaccaaacagtttcacaagaatgaaggcaacttcatatgcgattataacctgtggataaaacaccattggacattaaataactcaataatatttaatcattagaacactaattgacaccacttactctaatttaattttttttttaagttaaagcaggaagttataaacttgacattaaatgatcctgaagaattgttgctcattttcctaggtgtgataatgacatgataagataacatgtccagatttccacttccagcatgagggcatgaagagctctgtggacaaactccttggcaaaactggtgaaaatcataaaaggacaactatttaaagtctctgcaaatggtcctggggacatacagcatatgaagaaacatttattcaagaaaacctactactgctcagtaagaatagtgagtctgtggtgtctgaaccagggcatagtcccttccttcccaatcccagctcagcaagatggaaactccactccagactggtgcagccaagagtacaaggctccctgttttccaagcttccactcagagagctatcttcctaggaggggtgggatgacagcatttctcatccagtccccagctgcctattgctggggctgagtattgggtcagtatagtcaagaggtgggggtcccttcttccacccagcccctattcatgggatggaggatctaccttggatgtagcacagctgaggatactgaggccctaactggccttatcctccttagaaaacagtagttctacactgagagagagacaaggtgggaagatctgaggtcagtgtttcctcaactccaagtgcgcagcttctagagtaggggagtcactcagagagaagcatggcattgactcccacaaccaggtaaagagccttagttcaaaaactgtgcaggaggggagaagcaggccataaaagagatagctctgtggctctttccagaaaaactaattttatttgcaacagagtgtggagaagttaaggcctaggagcactaacaaaatctgtggagtttgtgatgaaaggcaaatgggaggagactggtagactcagcggagatacaggctaaattgtaggctggctaatttgccagaaataaccagaaaaagctagcaggacagagccctcttggggttagaacaaatctcaaaagctgactattctctctaaattctggtttctggtccaagacgaaaacagcctggaagtgccacccgtctgtcctcatagcacgaaaaatgctgaacaatctgaaaatccataattattcttagatccatcagagaattcaggtcacagggcaaactgctgcctccaaaactggagagaaaggtggatactgacaattacagctttccaggaacataagcccaggaacaagccactggagccaacaatgggggagacaaaaataagcacactagaggaaattttaacctctaatacctacggctacaacaaacaataatcatagccgaactcctactcagataaacataaaatctcactctaaaggcctatttaattctttttatccaatattatcttaaatttgtaaaattttttgagacactgtctcgctctgttgctcaggctggagtgcagtggcatgctgacggctcgagcagccttgacctcctgggctcaagcgatcctcccacctcatcctccctggtagctgggactacaggtgtgtgccaccatgcccagctaatgttgatattttttgtagagatggggttttgccatgttggttaggctggtctcaaactcctaggctcaagcaaccccagacgttggcctccaaaagtgctgggatgacaggagtaagccactgtgcctggcctatccaatatatcatatcatatatagccctcaaccaaaaaaatgacaaggcatgctaacaggcaaaatacaaaagtttgaagaaacaaaacaaacatcagaactggattcagatatggcagagattttagagttagcagaccagaaattaaaataacaatgattaagccaggtgcgatggtatgtgactgtagttccagctatactcaggaggctgagggaggaggatcactggagtgcaggagtttggggctacagtgcactattatcatacctgtgaaaagccactgcactctagcctgggcaacaaagcaacgcctcatttcttgttttttactgtttgtttggggttttttggggttttcttttttgagtctcgctctgttacccaggctggagtgcagtggcatgcaatcacaactcactgcaacctccacctcccagattcaagcaattcttctgccttggcctctggagtagctgggattatgggtgtgtgccaccatgcccagctaatttttgtttttttagtagagatggggtttcgccatgttggccaggctggtgtcgaactcctagcctcaagtgatctgcccacctagtcctcccaaagtgtgagattacaggtgtgagcctccgcacccagtcacaagacctcatttctaaactaattaattaaatagctgattaacaggatcagagctgggaaaagtggacaccatgcaagaaaagatgggtaaattaaacacagataaaaattctaaaaaaaaaaaaaaaaaaaaaggaaaaaaaagaaatactagaaatcaaaaaacaccataagagaaatgaagaacgcctttaacagttatcagtaaactggatgcagccaaggacagaatcagtgagtttgaagataggtcaacagaaacttcccaagctggggcaataaaagaggaaaaagaaagaaaaagtagaacagaatattcaagtattacaggaaaattggagaaggtataacatccacataatgggaataccagaaggaagaaaaagagaaaaataaatatttgaagtaataatggctgagaattttccaaaactgacagataccaagccccaaatctgggaagcatattcaaactgcagaaaatcaaaagtgaagagaaaatcttgaaagaagccagatgaaaaaaaagcaccttaactatataggggaacaataagaattaatttggatttctcttcagagagcataagagcaagcagagagagacataaatacctaaagtgttctggtggctcgtgtctgtaatcctcagcagaggctgaggtgggaggactacttgaggtcaggagtatgagatcagcttgggcaacacagcacgactgagacccctatctctaaaaaaattgttttaaaaatagccacatgcctatagtcctagctacttgggaggctgagatggtcggattgcttcagtccaggagtttggtgttacagtgagctatgattgtgccactgcactccagcctgggagacacagccagaccctgactttgggggggaaaaaaaaaggcacagatagattaaaagtaaaggaatggcaaaagatacaatgtgtaaacactaaacaaaagaaagctggagtagctatactaatttcagacaaagtcgaatttggcaaggaacattaccagggattaagtgggcataagataatgaaaaaggtgtcaattctccaagaaggcataacaatatttaatacatatgcatctaacaacagagtatcaaaacacaatgtggcaaacacggatagaaatgcaaggagaaatagataaatccactcactattatagagatttcaatacccatcagtaattaacacatccagctggcagaaagttagtaattatgcatatacttaaactgaaaggtaccatcagtcaactggatcaaacagaatatctcatccaacgacagcagaatacacattcttctcaagcttacacgaaacgttcaccaaggtagaccacattctgagccataaaagacaccttaacaaatttaaaagactagaactaatataaagtatgctcttgggtcatagtggtattaaaccacaaatcaataaaacaatgataactggaaaatcccaatatatttggagagtgaacaacacacatctaaataacacatgggtcaaagaagtcccaggagaaatttaaaaatattctgaactaaatgaaaatgcacatacaacgtatcaacatttgtgggatgcaacaaaaacaatgcttagaggaaaaggtatagcagtaagtgcatatgcagaaaaggagaaagacttcaaatcgtaatctaagtttctaccttaggaaactagtaaaagaagagcaaattaaatccaaagtaagcaaagaaataacaaaaattagctcagaaagtagtaaaattgaaaaccaaaaatcaatagagaaaatcaacaaaaccaaaagctgtttttttgaaaaggtcaacaaaattgattactaatatgagaaattaaagagtggctatcactaccgatctcatggacgttaaaacaataataaagaaatattatgaataagtctaggctcacaagtttggataacttagatgaattccttgaaagacaccatctatcaaaatttacccaaggagaattagataacttgaataagtctgtatctattaaagaaatgtaatcaataatgaacaacctaccaaaacagaaagtgccaagcccagatgctttcaatggttaattccaccaagcatttaaagaagaaataacacagcagcagtgatcaagacaatgtggtattgacataaggacagacatacagatcagtggaacagacttgaacgtccggaaataaatccaaaagtgtctatggtcaattgatttttgacaagggtggcaaggccttgcaatgaagaaagaaaagtctttctaataaatggtgctaggacaaatgtatagctgcatgttaaaaaaaatggagttggatacctaccttataccctatactaaaattaactcaaagtggatcaaccacctaaatatgagctaaaactataaaccctttagaaaaaaacctaggagcaaatcttaatgacctcaaattttgcaatggattcttagatatggcaccaaaagcatgagtaatgaaaaaaatttagataaattggacttcatcaaaattaacctctctgtggctggacgcggtggctcatgcctgtaatcccagcactttgggaggccgaggtggccggatcacctgaagctgggcgttcgagaccagcctgaccaacatggagaaacccggtctctaccaaaaatacaaaattagccaggcgtggtggcgcatgcctgtagtcccagctactcgggaggctgaggcaggagaatcacctgaacccggaaggtggagactgcagtgagccgagatcacgccattgcactccagcctgggcaacaagagcaaaactctgtctcaaaaaaaaaaaaaaaaattaacctctctgtttcaaacaataacatcaggaaagtaaaaagacaatctacacaatgggagaaagtatttgaaatcatatatctgataagggacttgtatctaaaatatgtaaggatttttgtaaaaaaaaaaaaaaaaatttacaagtgggcaaaatatctaaccaaacatttctccaaagaataacatacaaatggctaatatgcacaagaaaagatgcctgacatcactagtcatcaggaaaatggaatcaaaaccacagtgagatgctgtgagtcacacatcaagtgttgacaagaatgtggaaaaatcagaaccctcatatactgcttatgggaacataaaatggtactaccactttagaaaagtgtatggcagttcttctaactattaaacgcagttacagtataatcttatgacctaccaattccattcctaggtataatctaggagaagtgaaaataaatgcccacataaaaacttacatggaaatgtttatagcagcattatttataatagctaaaaggtagaaacaccaatgtctaacaactgataaatggatacgtaaaatgtggtaattgatacaatgcaatattattcaactttataaaggaattctgatgcatgtgacaacatggatgaaccttgaaaacacgcaaagtgaaaaagccagttacaaaagaccatatattatatgattccatttatatgaaaagtacagaataggtgaatctacagacagaaaacagactagtggttgcttagggctgagggtaatggtggtactgaggtgactgcttaaaggtacatggttctgttttgaagtgatgaaaatgctctaaaattaactgtggtagtgattacatgtatctgtgaatgcattaaatattattgaactgtacactttaaatgggtaaatatatggtatgtgaattatatcctaataaagcctataaaaaaagctcatttttttaaaaatgcaaactgatgtatgtttagaatatgctttaaaagaggtcatgcaaaaggaaaagtgggttagataaagcaaatgtggcaaatcttgatagtttttgaatctgggtaatgagtatatggggatgcattgtggctttccttcccccctcatgttggacagttgtggatgaggctgactgttaaacattttggatctctaaatactaggcttttgtttgaaaaaatttctctaaaaaaaaaaaaaaaaggcaagtacttccaaaacacaatccatcaattctccaaagcagcatctaattatttgattggcaactggatttcttgactgtggtataagtagactaaacactaaacagtactctgaacaatctgtggttttgcctgcactgtagttttgctttaagttggtatttacaaaaatgacacctgcaactttagatttaacaagattttaaaattacatgcattttttactgcctagtcttatttcggacccatttttttcattctatttcactaggcactaatgtaggcatgtggttctatacaaattatagttaagatcaacagtgaggtgaattacagcaaaattatcaataaaaagttacctgctgacacagcgccgataattgtcaaaatatattcttcctctctcataggctataggtgacctggaatgagttgtccagacattcttaaatttagtactttcctaaaagacataaagaatttccgttcaggaaagaactcttaggctttaagttagattttaaattttcaaagcaacataatgtcacctatattattttaaaactttttgcatccttcctccactctgccctcatgttttggcttaatgaggtgaccaacttttagaataattgtttccaggtaagacataagaagcgtaaaactaaaagcagctggtggccctattaccacctatcccagattccgggcttgtatcctcctccccatcacatgtgaccctataaagggaggccccagcgcgttaaaaccgcatccccgcaggaggctcggccgccgcgcgcccgcggccctccgtcccgccccggccggctggcggtcacctggcacaccagcgcccgcaggatgcccaggttggtcctctgcaccacgcctgcgtcgcgcgagaagcagcccagcgcccggcgactcagccggctgcacacgttgggcttccgggtcgggcccatggaggcgcgggccgggccctgggtaggctgggccgccgagtggcgcgccccacactcccgtgctgggcagccgccgctgccttcgaatttcgaggcccagactttcccggcggggcccagggaaagctgacacggggaggcgggcagggagcacccgacggcggggcgagggaaagcagagccgcttgcaccgccagagcgcggagagaagggaagaagcactcccttttcgatctgccccaggctctctggccgctgacagtgcgacgctccggtaccgcgcggccggccggagccgctctctcaccgggaaatgtagttcctagtgcctcgtgaggcagcccggcttctcccaggaactacaattcccgtcaggcggcggggagcgagggcttgcccggccctgcctctgcctgccgcggccccgcctcctccggcccgcggaggctgcgctgtcttgcgggcgcgcttctctgtgctgcgagtggctagctgggcagagccctgggggcgcggtgctgccgcctccaggtctccgccccgtgtgtgcgccctgcacttagggatccctccctcactgccccggtactcacaagcttctcggccccgaccttcgccctgggaggttctggccaggtgccgggaggggcgctgtgtcgagggcgatccccccaaagcagcgtcccgtgctaaaggtacgccccgcggctttcccttcagccgcatgttggctgagggggacggtaaactgtgcttttgtattaggaagatgctggcttcccattcactcttagtttcaccctccaaactgggattgagttactctttcccggaggcttgtccttgggtggcctgcggggacactgactggttttgcgataattgcttcatttcatttcctctcgcctccattcttttttctttatagggaataaaatatgaaatgcttacattcttattggacggcctaagatattcctcgtcgatgtctctaagtaaaagatatactttgttaactagccctgcctgtatgttcaaagttcccagcacactaaactttcagcaagcttgcaccacatgtgtcccaccgccatgctctaagtcccttaagggtggggccgctgtatctcccacgtggacttgggcatgctacctcttgttcataggtgctcaaagaaagccagcgatcgcacctgactggcagagcaaaaagtacagtacagcaggtccttgaatcgcattttttcgttcagtgtcattttgtataacttgatgagaaaaaataataatttcctaccggggctactgtttgtgtggatcttgccccttctccccacgtctgcatgggttttcaccaggtaccccagggtactgcctcccacatctcagtgcaggctggatgaattggccttgtctgtgtttcctgtctgagtgtgagtgtgagtgctccctgcgatggaatgtcgtcgtgtccaagggttggttcccaccttgcaccctgagctgaggggataggcttcagccaccctcgaccctgaactggaataattaggtaaataactatcttacttgtttttattaatcttccttaaatgtatgtatagctcccatttatttcaatgtttaatattagaagtgttttggtttgtatttaggagtttggtgatgtttttgtgaccagaaatatgttataggaacttaacttttgtttatatcaattggcctatggtaaaaatggttttgttatatgtcattttgcttacagtcagtttccaaaaatctgttgatgacattaagtgagtacttacagtactgggtgagtgtgttgggtcacagtttaagtgtttagtaaacattggccatatctctttttaaccctgctgaatttccttcagggctcgagcttttgctgatttttcatgacttatttacagcatacggtagagtgctttgtatatttttagagagtgctacaatagttaatttggtaattcatgaatgcagctgtcactgagaaaactggaacccagaaaagataactgggttttctttggcttaaatgaaattcaaatcatttctgaattgaattcatcaactctctcatttctctttcctctttgcccccacttgtttgtcttctttcttgtggcctttatttcaccaccaagtcgtcaccaagggagagtcatcctggatgccttgctgttcctcacccacaaccaagtcctttagactcttatccatctcatcttcatttcacctaagtaatttagggcctcaccattttttatcacattattaagtagtctcttaatttctgccttacttgtgacacaggattttttttttttgacgttgctttgccactggagacctccgcagctggagacctacccaggccttgctcgggctgggcttgccacaggaggtgccctgcacaactggcccactgggccactcctggcttgcacgcaggtgtggatcctgtggccacctgactgtgggctcagcccctggcaggagagggtgtctgagctggtgagtgcagagttgtgtggtatccagctggttgctccaagtgccggcacaggagctggctccgtgcaccgcttgcggctggaccaggcatgtcacaagtgactcccacagtgggctctggagtccagactaggggaaggtggtggtaaccaaatgggtcaggcaacccagaagccccagaggtgggtgttacagcatgctaacagctcttttagatctgccctctgcagcctgacgaacaggggcatgttaacagccctatcagtcctgttaccccactcccgcccatggccctggggctggcctggccccccgccctgcttcttgttgcatagggtggctaccaggcgctgctggtggggcagagagctaccgtgttactctcttcttcctacccatgtttggtggcatcctgagctcttgtcctgtgtccaagaatgagattacactaacaatcggagggtgaggaggacagagaagagttttattgagcaacaaaacagctcttgatgcaggatttttgctcttagctcagctaggtctgagtttttgtctcacaatcagtaagaattaggtgtgtggaccccggagagtgagtggagtagaatttatttagtgaaaggaaagctcccagtaaagaaaggggtcctgaaagcaggttgctggttgccccctttacagttgaatacctgggcttaaggtgcaaatttctggaggctccaccccatccttccagtgtgctcgtgggcccttagtctgagctactccatattggttatttcccttactgcacatgtgttagggaatggaattttctattgtgggcatgtttaggcaagccccctgtgcaaattcccttatgtgcacaaaacatctggtgtaagcacttttggggcacgtcgtaggttcttcagggacgcttcccttactgtctgcctaaagcaagctggctaactcctttcattctcagccaagaggggacgcaagggtggtcccccacccaaagtagtttggcctctcttctggcatggctgggtctggggcttttatgggctcagaatggggaagtgcatgctgattggtttgtgagtatgcaaaataggctaaaacaaaggcaccactcaaaggtgggcacaacagtgtgaaaaaacaaattagagaagggtgggtatatgtaaaataggtgaagggtggggatcaatcagaggaaagtgcaccaaatgggaagagaggttctcgatctggtccatagatttatccaggacatgtagctaggctttaagctgtcttcagcttgaaggtcaggtttcactggggacccacccccatctgcctaggatttgtctgcctcctgctgctatcacttgggtacttttaattccagccctcctccatactgctgccagagtgattttcctaaagcacaagctgtcacttgcctgttgcattctttcagcagctccgaacacccatagcagaatttcttatttatttatttatttttattatactgtaagttctggggtacatgtgtagaacgtgcagttttgttatataggtatacatgtgccatcgtgatttgctgcacccatcaacccgtcacctacattaagtatttctcctaatgctatccctcccctagcccctagacaggctcccttttttttttgttttttgtttttgagatggagtcttgctctgttgtccaggctggagtgcggtggggctatctcggctcactgcagcctccacctcccaggttcaagtgattctcctgcctcagcctccccagttgctggcattacaggcgcacaccaccatccctggctaattttaatatttttagtagagacggggtttcaccatgttggccaggctggttgtgaactcctgacctcagatgatccgcccactttggcctcccaaagtgctgggattataggcatgagctaccgttcctggcccatagcagaattccttttttttttttctttttgagacggagtttttttgctcttgttgcccaggctggagtgcaatggtgtgatctcggctcactgcaacctctgcttcccgggttcaagtgattctcctgtcttagcctcccgagtagctgggattacaggcacatgccaccacacccagctaatttttgtatttttagtagagatggggtttcatcatattggtcaggctggtctcaaactcctgacctcaggtgatctgcctgcgtctgcctcccaaactgctgggattacaggcgtgagccaccacgcctggctgagcagtatttcttatacccaaataagatactcaggatcctccattgttaacttaaaacctttttagtatgtcacatatatgcaaagataaaattaggtataaactcctcatcttgtctctttcttgttttttgtctttttaatttttttatgtgtgtgttgtatcttttatacaccgataacacccgaacatttacaagttaaatgaaacaaagctataaaaccaataaattcaaatgattgtgagcaatgagactttagttggacctaaaaagctctaatcatgaatgtcctctgtggcgtaccttccttacagaaaggtctgtccatattgcccttgtgttgagagattacttgatgccttcacctcttttctttatataaatcaccacaaaaccttcatttgttcagtatgtcatggcttcatttgtcctttacttgacaaacaacatcatttacatacagtagtccccatttcattctcattaacatgtatcaatgacaaacagcaccacttgtttagcaatacactcctaaacacacgtgtgaattcaaatcttgtgacagcactcaattaaaaagtgctcattcagatgatccagagtgtccttttgttaatattcttttttttttttgaaagatttttatcaaattgaaaatgaaaggtttctcctacagaaatctcatagccttgaagatatgtgtacaaaatccctaggggttcacataaggtaccttatagtacaaaatctgaatctctttgggtagaataccaggcacttcattatcttcccatgttttcattatcttgcccacattttcagcctcatctctttggccatccctcatgtttgcttttgtggttctgacatgtttgctgactttctcaagccaatgtgcctttatatttgagattttctttatctgaagcttcctttcctctcctcttatcagttgatctcaagactcatcccaggtatcacagctccactgagacccttcccctaactcctccagcttggttagtagccttttctgtgcttccatgttactgtgtatactgttgtggcactatactagaattgtcatttgtctgtcttctcaactaacctgggcagaaactgagtagtaatataattctccctgctttacactacctaaaatgtggttaatgcatatgtatgttgaataaatgaatgggctataaaaaacaatatgtttgtatagaatctattatcaacagctaagtactttttttttttttaactttatttgcttgagaagaaatctcaaaggctggtgctgaactcctgggctcaagcgatcatcccgcctcagcctcctgagtagctggcatgtatagtgggattacaggcatataccacaatacttggcaatagcagctacttttagcttagatgcagatttagtctccacttattccttaaatcagtaggaagtcacaatattaataactttcaaaaaaacttaaatccttaagacttctacctatgaagtagatattttccatttgttgaaggtaaaatggcataaatagatacagttttatgattggaaaatgatttctcttagttttgggcatagaacaaatattagttcttctttttttctattctttgtctgtgttatgtttacagaatacttaaccatcctagccatgatattttaaagacaagaaagaagaaatattaattcaaaagttaataaaatgctttttgttcatatactttgtttaaagaaacatagtataactgaataaatgtataaaatactcaggttattaaacttgaacatttattcagagacaaattttaactaagctataggaagtcatttgttcaacatgtttttgtttttcatccataatgtgcaggggaaagttttggcatagggtatagcagtaaacaggatagacagggtccctacaggtgggaggagatagacaataaataaatagatgaaaaaataagatttctaggtagcaataagtgctgtgaagaaaataaaacagggtgatgtgctggagggtggttgaacaccctgctttagccagagtggtcagggaaggccgttctaaagagaacacatgtaagctgagccctgaatgatgaggaggagctgatctgcaacagtccagagtagtagtccaggcaaagggatgcttgagttcaggattcctaaggcttataataagaagtcaaaaactctcagaaggccagtgtggctctttagtgtgcaggagagaggtaaacttggagcagtcggatgggaccaagacgttaagctttgtaggcaatggtaaggaattttggattttattctgataggaggctttgaagaggggagtgatatgatctattttgtgttataaaaaggtcattatggctatagagtggaaaatacattgtggaaggcaagaataattgtaaggagacaggtggctattgcatttgtccaggtaagagattatagtgttttggactagagtggtaacaggagagatggaaagaagtgaacaagattcaagatgtattttggaagtagagttgataggacttctgatacagtggatattaaggatgaggaaaagaaaagaatcaagtgaaatcctaataaaacagaaccacgataaatattcccaaactcctcaaaacaaattggaaacatgatgtgatgccaaagaaacaatgcctggattttattaaaggtgcacatcagcattatacattagtgctaaggaatgttaggatttgttatgtggctagggcatgtgggaaaagtgaataaaatcagatctcagaagtaggtaggggtcagaccatgtggaactgtggaaatgtgatggaaaacccttagagtgatgtgacattcttcttaaacagatacttggctgcagcatcaagaacaagagtgaaatataagagaccacttagcaggtgattgtagtagtccaggtgcaagtcacttttagaaatttattttgaagttattgaaccttttgaccacaagtttggttcttatgttttctttcctctctatattttaatgatgtgtgtctgaacacacagtatattaatgcatatacgaagttttcagaaagatttaggtttaaaggattgatagtaaagctcgcagactcaccctcttattttaaacaatatttattcaaaagaatatcaatcctttatgctatgttacagatatcatagcataatatacaaataacaattataaaatgaacacccatatacttatcatcaacttaaaaataaacagaatattacctaaaactttgacatctcttatgtgccctgctggttcccagatccctctttcctctttagataaataaaaaattgttttaaatgtttttgaacatcattcatattatatatgtgtactcttctatagcttgtctatatttttctcaacattacattttacgacatacctgtaattcattcatgtttactactgtgtagtatttccttgtataaatttattacaattaatttatcccctttctactagccaggctttttgtttctttcatgttttttgttttgtttttgtgttttttgaaatggagtcttactctattgcccaggctggagtgcagtggctcaatctcagctcactgcaacctctgcctcctgggttcaagagattctcctgcctcagcctcctgtgtagctgggattacaggtgcccaccaccatgcccggctaatttttgtatttttagtagagatgagatttcactatgttggctaggctggtctcgaacacctgacttcatgatctgcctgcctcagcctcctaaagtgctgggattacaggcgtgagccaccacacctggcctctttcaggttttttatttctaggaaagtgctgttatagacattcttatccctgtctcctggcacacgttaaagaatgcgttagttttcttttgctgtataacaaattaccacagttttagtagcttaaattaacacccattcattacctcaaattcttgtagaagtcctaaaacagcataacctaattctctgctcaggatctcaccaggctgaaattatggtgtcagcctgggctgtggtctcatctgcgactcacagtcctgttctaccctcactggatattgacacaattccattcctagcagctataggactgaagccctcagctctgagacgttgcccactattccctgcctcatggcccttttcacaacctggcagtctgcttcttcaaagcaaataggagaatgtctctctgacctcctctgctaagatgaggtcttacataaaagtaacctatgaaggagatgactgtccatcattttcacaggtcccatccacactgatggactatgcagaggatgagggggtctcttggggactgtgttataattctgctgccacaaagagttgctccagagtatatacctaggtacttaattactgaattatatggtatgtgcattgtattagtccgttctcacactgctaataaagacatacctgagactgggtaatttataaagggaagaggtttaattgactcacagttcctcatggctggggaggcctcaggaaacttacagtcatggcagaaggagaagcaaacacacccttcttcacatggcagcagcaaggagaagtgcagagcaaagtggaggaaaagccccttataaaaccatcagatctcatgagaacacactcactatcatgagaacagcatgagggtaaccacccccatgattcagttacctcccactgggtccctcccacaacatgtagagattatgggaactacaattcaagatgagatttgggtggggacacagccaaaccatatcattctgcccctggcccctcccagagctcatgtcctcacatttcagaacacaatcatgtccttccaactgtctcccaaagtcttattccagcattaactcaaaaatctaagtccaaagtctcatctgagacaaggcaagtcccttctgcctatgagcctgtaaaatcaaaagcaagttatttatttcctagatacaatgggggtacaggcattgggtaaatacacccattccaaatgggagaaattggccaaaacaaaggggctacaggccctatgcaagtccaaaatccaatagagcagtcattaaaccttaaagttccaaaatgatctcctttgactccatgtctcatatccagggcatgctgatacaagaggtgggctcctatggccttgggcagctccacacctgtggctttgcagggtacagcccctgtcctggctgctttcatgggctggtgtagagtgtctgaggcttttccaggcacatggtgcaagctgtcagtggatctacagttctggagtctggaggatgggggccctcttctcacatctccactaggcagtgtcccagtagggactctgtgtgggggctccaatcccacatttcccttccgcactgccatagcagaggttctccatgagggctccacccatgcagcaaacttctgcttggacatccaggcatttctatacatcttctgaaatctaggcagaggttcctcaaactcagttcttgacttctgtgcacccgcaggcccaataacacgtggaagctgccaaggcttggagcttgtcccctctgaagccatggcctgtgctgtaccttggccccttttagccacagctggagcagctggggtgcagggcaccaagtcctgaggctgcacacagtaggagggccctgcatccagcccaggaaaccacttttccctcctaggcctctaggcctgtgatgggaggggctgcctcaaagttctctgacatgccttggagacattttccccattgtcttggtgattagcatttggctccttgttacttatgcaaatttctgcagctcgcttgaatttctccccagaatatgggtttttcatttctactgcattatcaggctgcacatttttcaaacgtttatgctctgcttcctcttgagcactttgctgcttagaaatttctttctctagataccctaaatcatctctctcaagttcaaagttccacagatctctagggcagggacaaaatgcctccagtatctttgcatagcaagaatgacttttagtccagttcccaacaagttcttcatctccatctgagatgacctcaggtggggggctctattgtccatatcactatcaatattttggtcaaaaccatttaacaggtctctaggaagttccaaactttcccacatcttcctgtcttctgagccctccaagtctctaggaagtttcaaactttctcacattttcctgtcttttgagccctccaaacagttccaacctctgcctgttacccagttccaaagttgcttccacatttttgggtatctttacagcagcaccccattcctggtaccaatttactatattagtctgttctcacgttactaataaagacatacctgagactgggtaatttataaagggaagaggtttaattgtctcacagttccacatggctcaagaggcttcaggagacttacaatcatggcagaaggggaagcaaacacatcgttcttcacatggcagcagcaaggagaagtgcagagtgaagcaggggagaagccccttataaaccctcagatctcatgagaactcactatcacaagatcagcatgaggataaccaccccccataattcaattacctcccactgtgtccctcccacaacatgtggagattatgggaactacaattcaagatgtgatttggttgaggacacaaccaaaccatattatgcaccttcagcttttttaggtgataccatgttgactctgtatgttgttatagcaatttctatcctattagctgacttcccattactttacatccttgcctgcatttgtattgtcagacttaagtttttgccaatgtagtgaatataagactatcatattatgatttttatgcattttccatattataaatacagttgagcatctatttttaatgtcactaggcattcctgttttcattcttgtgcaaagcctgatcatgacttttgcccattttctattagattgtgtgtctttttcttcttgagtttagaatgtttctgcatgtttctccgtaacaattcttcatcataatatgtgttacaaatgtcttctcccaatatgtggcttatttgatactatataaaaaaagaagctcacattaaatgtggtaaaagtagtcagtatttccttttatggttataatttgactattgtttaagaattgcttaacttgaggtcataaagatatcctcttattctttttctaggttttaaagttttaactttcccacttaagtcttcagtcagtgatgaaattgatttgagagtatggtataaattagagatcctttcattattattattttttgtatatgaataatcacttgttccagacccacttattgaatagtctcttcatttcttcacagatctgtggtgctagttctgttgtagatcaagttacctatctggtcaagtctatttctgtgctctgttttctgttccattatcttatttttctgtccctggggtgataagtgaccacttattcactgcagttttatcataaggcttgagagctggtaggggaactgttccatcttactcctcttctttaggagtgtcttatttcttttttgccattgacactttcatataccttttaaaatcagcttgggcttcccaaaagccttattgaaattttgattgggatggcattaaatctgtatatcagtttgaagagaactgacatctttacaatatcaaataatcctatctatgaagactatagagtctttcctcagtatactagggagattggttccaggatgcccgcatataccaaaatccacacatcctcaagtctttcagttgaccctgtggaacccaagtatatgaaaagttggccctccttatatgcagatttcacatcctccaaatactgtattttcaatctgagtttggttaaaaaaatcctcatataagtggacccatgaagtttaaacccattgtattcaagagtcactatgtagctctccatttatttagttagatcttcattagtggctcagtgaagttttataattttttctttaaaggacttgcatattttacaacttcctaagtgtatcatatttttggtcattgttataaatgatgtgtgtgtgtgtgtgtgtatggatgtgtgtatgtatttttttttgaagtaaggtctcactgtgctgcccaggctggagtgcagtggctattcacatgtgtgatcatcgtgcattaaagcctcaaactcctaggctcaagtcatcctcctgcctcagcctcctgagtagctgggagtacaagtggtgccactgtgccttgctaaatagtatattttaaaattaggttttctaactatatgtttgctagtatatgaaaatataattgtctgtttgtatattgatcttttatttggcaatcttgccaaactttccatttaatagtaataattgtcatttgtagggtttaggggattttttctgtgtagataatcatatcgttaggaaactgtgacagtttgttacttcctcctccaccttttactttttatttctctttcctttctgactgtcctggccaagacctccattgcagtgttgagtagaaccattgataatggacatccttgtcttattcatgtttataaagggaatacttctaatatttcaccattaaggatgacatcataagtttttggcagctaccctttatcaagttaatgaaattgtcttccatttcacagtcactaaaagttttgatttttaatcatgagcgaatgttgaattttatcagaggccttttctgtatctgctgaggtcattatatgattttttattttaatctggtaatgtggcaaattacattgatatactttctattgttaaaccaaacttgggtttatttagatcaatttttgtgacacattttgttttttatacattgtaggctttgggtggttgctaacctcagtgctcattcagctctggacttttgcgagcttttggtctctgagtatttctctttcttgctggctcaggggtatgtttaataagatttctttttaaaacatattaatccagccatttaggggtggttgatagcagcaaggattttggagtataaagttcacctaatttgcagaactaaaattccactttattatacttttagtttaaaagcttctgttaataatatatgctttcaataatcacttaccaccatgtctgcctcatcttctttttcttcttcttgtctctctgcataaccatgccactctctactgaaaagacaaaagaatagtctagcgggaagagcatcataccaggagtcaaaagctacaagttctagtgccagcaccatcactccctgagatcttgaccaagccgctttcttttgttgttgtttttaaataaaatttttatattttttgtagagacagggtttcaccacattgcctaggctggtcttgaactcctgagctcaagtgatccgcccaccttggcctcccaaagtgctgggattacaggtgtgagccaccgtgcccagccaacactttgtttctctaagttttactcagtcatctgcttggtgggaacactcaggattgaagtgagatcacatatttataaatgtgaacatgttgttaggggaaaggatgagaagcaatgatatacagtacattctctgtttagaaaatgtaacagaaacagggagtttggggaagggagagatttaaatcagtcacatgggatttttttagggtggtggaactattttgtctgagactataatggtgggtacatgacaccatgcatgtgttatgtacagcacagagtggaatttaacatgttcagaatttttaaaatgatatcaggagtgtggggattccaggatggaatgcagagtgacaaaataatctaactgtattacaaatgtatgcaataacctcactgaagggggccagagaaaaggtgttgacctgagtaactttggaaatgagaccgtaagactaaaggcaatgggaactgtacataagcactatactgcagttgataaagtttcctgtggcagtatggggtaataattctgaaaccactatacaggtgtactagaatcgaacaattattaactggatggtgatgataggaaccaggtttcttactgttggagtagaaggctatagacaagcaagaagggaaggctggagttatctgtgtggtaatagattagagttggagctagtagtatgaactctagtttaatatagatacagatgaatgcatatagaaacacattatatatagatatatgtatatacttggtttattatgcacacctatatttccttgctttgtcccttgagaggactgagaagcaaggacaacctagtagcaaggaacacacctggtgcccagaccattctctaataaaaggaacaaagattctttgtagaaatggctgtttctaggactagatcaaggaatacacaaaatgagtgccagaaagtaagcaagtgctaaaaacaaaaacacagtgatggaactatgtcaaaaggaatataggagccaactgaaagaggatttttttttttttttgagacagggtctcactctgtcacgctgcgtgactatactcatactggagtatactcataccggactatacttatactggagtatagtcacccaggctggagtacagtggcatgatctcggctcactgcagcctccgcctcctggggtcaagcagtcttcccacctcagcctcccaagtagctggggccacaggcacatgctactatgcctggctaattttttgtatttttggtagagatggggtttcgccatgttgtccagactggtcttgaactcctgagcttaggtgatcctccagcttcggcctcccaaagtgctgggattataatcccaggcataagccaccatgcctggcttgaaagagctcttaatggccaaagctcaaaataatttgagcagcaaaataactgttagtatttagttataacatgaagtataacataagtatccctggtctgtactgatataaataaaggattgaataaataaatgaatgggagagaagagacaaatcgtccatgcaaaagaattccaaatattttgtgtagatattctgcccttaaggaggtagagcctaagtgcccactttttaaatgtgggctctgcataatgatttccttccaaagagtacactatgtaaaaggggcatataccttaacagtggggagaaacctgttaaaccccgactagtatacctcaaaactgtcaaggtcttcataaacaaggaaaatctgagatactgtcagaataaataggagcctaagaagatatgatgacatggccgggtgcggtggctcacacctgtaatcccagcactttgggagattgacacgggtggatcatgaggtcaggagatcgagaccatcctggctaacacagtgacaccccatctctactaaaaatacaaaaaattagccgggcatggtggcgggcacctgtagtcccagctactcgggaggctaaggcaggagaaaggcgtgaacccaggaggcggagcttgcagtgagccgagattgcgccactgcgctccagcctggatgacagagtgagactccatctcaaaaaaaaaagacatgatgacatgatctcatgtaataaggggtcccggaacagaaaaaggacattagataaaaattaaggaaattgaataaagtatggacttaagtttataataatgtattactattgagttgttaattataataaatataccataataatgtaagatttaatagtgggggaaactatatcacatatatggaaactctctgtactatctgtaacatttttataaatctgaaattaaaagtttactttaaaaatgcagcaggaatatggtagacaccactatatagggatagcacaacttagtaattaagaagatgaactcacgtaccagcctgcctgggttcagatctcagcctcactgcttagtatctgtgtaaccctggctaccttaagtaactagaactacttaacttctctgtgcttcaatttctttatctgttagtgaagattcttgggaggactaaatgaatttgtgtgtgtgtgcatgtgtatgacttggagtagtgcctagcacaaagcaaaccttatataattgtttgaatctatttattattactacttttgttctttagttttggtgattatggctaaatttcactgcatctctcttcttcagcatactgatttttagcttggcactccaacagaacagtatccataatactttgttttcatggggaaaatcatcgagattataaagattcaagagaaagcaggaccagaacttgagaatccccaacccagtttcatgcttcatatatagcactgacttagtgaaagctacaaagcctgacaggatctactttttatgggcatagacatgccacacatagaaattctaagttaattttatttggttttcagtagatttcttactaagatatccacttcccttgttaagctgatgttctttttgggaaaagcactgcctgcaatgcaaacccctcagatgtagggttcagcatctaaaatttagatgacatttgaagcaaaagtgggatgtattatggaaacatgtatttccggtcttttacctctctgctaaaattcatgccaactctttagaaaacttctgatggatcagcagctcagatggaatagcgtactaagtagaacatagaatctggagtcaggagcctgcttggagagtgggctcttgtggctatgtgaccaagtgctcgagcctcagctcctgcatctgtacaacagtgataacagaaatgcttttcccacccttgtccctcacttacaggatagttgaagatcagatgtgaaaatgaatgtgagagcttttgtaagttataaaatctgtacaaataagatctgttagagtggttctcagattttcaaccagagtaaaggctaatggagctttatagccatattaagtgttgcagccatctggacacctttaattattaagtaataaggtgaaatcgttgaacttaaaatgctcttgatggaaaattttctcacagcactttagtttttaggatgtttctctttggcataataaaggaaggcattgttttagtctggaattgtctgtttgaggtggcagtttgaggaaatggttcccaaagtcttcactgaaattagctggagaatacaaaggtgaatccctgtgatatgggaagctacctacctcctttggacacagatcctcttgtcctggtgtagagatgaccagcagagggtgcacgagctttcctaggagctgactccagcttcagcagcaaggctgggcagacctgactggtaccatctgtgttttctgtctgatgattaacaagtactataaatgaaacgatcctggcgcgtcagaaacacagtcatcaaatggaaagagagagcagccataatgtcaaacaacagtgtagcaagtgcctgccatagttgatgaataggaggtttctagataactggaattcagcattctagcatgggctgttggtttcccacattctcctgttacccttttccttttctaataatttctttctacttcctggttctttgctccaccttaatcagcatccataatcatctgccttacccagtctgacaattagaggtcttttaagcaactcttctctggacatttacccttggctatttgggtccagaatccagcattctagtgttgctgtcacctactgcctattataccatcttttattccctagagtggatcctctactcatgagtattatatagaatttgtatatttagtgattttaaaatatttttatattttctaattataaaggtaatttgggtttacatagaaaaaagaatattttaggccaggcgtggtagctaatgcctgtaatcccagcactttgggaggccaaggcgggtggatcacaaggtcaggagttcaagaccagcctggccaacatggtgaaaccccacctgtactaaaaatacaaaaattagccaggcatggtgacaggggcctataatcccagctacttgggaggctgaggcagagaattgcttgaacccgggtggcagaggttgcagtgagccaagatcgcgccactgcactccagcctgggcaacagagtgagactctgtcaaaaaaaaaaaaaaaaaaaaaaagatttcgagatatattaagaagaaaatgcaaggaagatctgtgagcctttcaatcagtgacaactgctataaattctactagactttccctatgcatatgcatgtttcttggtatatagacattaattttttaagatgagaccgtactataaatactatcttgtacctgactttttttttctacctaataaatcatggacatcttttcataccatgttagttcattttcatcctgctgataaagacataccccagactgggtaatttataaagaaaaagaggtttaatggactcacagtttcatgtggctggggaggcctcacaatcatggcagaaggcaaaaggcacagtttacatggcagcaggcaagagagagaatgtgagccaagtgaaaggggtttccccttataaaaccatcagatctcgtgagacttattcactaccacgagaatagtatgggagaaaccgcccccatgattcatttatctcccaccagatgcctcccgcaacatgtgggaattatgagagctacaattcaagataagatttgggtggagacacagccaaaccatatcacataccaataaatttagggttttagtaaccttttttttttttttcagaaacagagcctcactctgtcacctaggctggagtgcagtggtgcaattatggctcactgcagtttcaacctcccagattccagtcatcctcctgcctcagccacccaagaagctgggaccacaggtacacaccaccatgcccagctaattttttaattttttgtagagatgggggtctcactatgtttcccagtctggtctttaactcctggcctcaaatgatctgcctgtcttggcctcccaaagtcctgggattacaggtgtgagctactggggccagcctttagcaagatgtttttttttttttttgagacggagtttcgctcttgttgcccaggctggagtgcagtggtgcgatctcagctcaccgcatcctccgcctcccgggttcaagcaattctcctgcctcagcctctcgagtagctgggattacaggcatgtaccaccacacccagctaatttcgtatttttagtagaaatggggtttctccacgttggtcaggctggtctcaaactcccagcctcaggtgatccgcccaccttggcctctcaaagggctggaattacagggatgagccactgtgcctggctttagcaacatttttaagcagctacataattttcctttctatgcatgtacaataatttagtcagtcttctaaaaattaatatttgtattgtagtttttcagtgtaatatacaaataatgctatgacaaatccttaatatattcttctgattatatccataggatatatttttagaaacgaaattttctttctaattttttctttaaaattttcatatgtattaccaaagccccctcaggaaaggtctctcagttcagtgccccctcagtttgccagaatgcctgttcctgcacaccatttatcacagtgtttttaccttcgccaaaatgacagaagattattttactgttttctgtgtgatgggctttccgctatccatatcacccagaaaattaatctaaggcagcgagtctccagctttttggtctcaggacctctagacactaaaaaattataaaggctccaaagaacatttgtttatgtggcttgtagctatggatatttactacatttgaaatgtaacctaagaaaaaattaattgtttaaatatttattaaatcttttttatcacaacacctgtaaaaactgcattattaagtgatttaaaaataagactaataaacccattgtatgttattatggcatatttttataaaaaatattttccaaaagaaaaatattagaagaatggcattgttttacattttttgcaaatctcaatgtctcacctaagagatgactggattcttatatctgtttctgcattaagtctgttgtgatatgttgttctggttgatatatgtgaagaaatctgatctcacacagatatattttataagtggttagaaaggggaggagtgctttgtctcttcagatgaatatgggtattctactttactactacaccaaatcccagtaagtggtagtatcttaaaggttaattgcaatattacaatttgaagccttgtcagtgaatttttcatattctgctacattaaaatccattggtctgtcttgtattatactttgactggatctttagcccgtgcttgattttgtatcatcttatgttggtcatctggaaaatactggctcattgagttgtataggtcttccaaatgttgacacatttcattttatagtgccaaaaatatcttgttctcatctgaacagtgtttaagaattagaaagctgttaggcttatagtggtgaacacaggttttccagaattctaatttttgcttaaaagcttaaattttatcaaaggcaacaaatggtgtcagttgttttcttggcagtcttacttcatttatttttgagaaaataccaaagttaaaatgatgctctgtgaaaacaatttttattgcttcatcaaggaaatgcttacgtgaaactgccttttttttttttctgtgagtccatagttggtgaagaagacagtgatcttctgtatagtttgatgccactgttttgatttaggcaaaggtgctaatgcttttatccacattgcctgtgcaccattggtgcaaatggcactacagtgttttttttttttaaggcaaataatatgttgatattatcatgaaaataattttagccttttgaagactgcctaaaggggggtagggttccccaggaattcgtgaaccatactctgagaacttctagtttaagattctcttaccagagattgatttgggaatagtttgtgaccaaattctggccagtgaaatctgagagcaagtctggctgggaagttgtggataagtttcctcctccctaaaaagagacacagaaagagatggtccttttcttttgctggatgttgccatgtctgtgtgatgcttgggactgctgcagccattttgtaattgacagagggacttagccttaggatgaaggtgatgctgcggagagcaggatggagaaatggcaggaacctggatcctcgatgacattgtagaatagcagatgaaaccttacctggaacttgcccaatctttgggctttcagttatgacagatattatttccttatcatttaagccactttgagtagtgccttctgttatttgcagtcaaaagaatcctaaagagacatttattattagtgtgatgaacagtttcaagtgtctagtggccatctgcatttctttagtaaatgcttattcatagcattagcacatttcctgctgaggtcatttctacttattattttctaagcattccttataaactaacacattgtaatattttgcaggttatttccaccagtgtcttttatagcatattttcccatacatttaaatgtaagcaatctatttgtcttgttctccttttttaaatagtttgtggctttggtatcatgtttaagagtcttttttaccccattttttgggaaaatattcacttttttcctagactaataaagatttaatttttcacatttaaaagtttaactcatctggaatttattttgatgttagatatggagtagcgatgtaccttttttttccaaacgggtggcccttttcttaatatacatctttgaataggccagctctaacccactaatttgaaatactaactttattacaaatggaattcttatatatgtattctaactcgtttctggactttctattctgttccatttgctttgactgtatctcctgtgttagaggtatgcccaagacttatctgtttgacagtgtgttgtaatgtctggaaggacaggtacacaccatcccccaactccacccaacacaatcacatcactctttctccctgtagtatttttctggtgcttcctgcatgtttatttgtccagatgaacttttaaattatttgttaaagttctcccaaaacatttttggaatttctgttggaattactttaattttatagatgatttggtgagaatttatatttttacagtattgaatcttcagccccagaaacccatgtactgtcttcctacttattaaaattgtcttccatgtccctctgtacagttgtatagctttcttcatattggtcttgtatatttctggctaggtttattcctaggtatttcatattattttatgttgaatttgtagagggatctttcccactgtatatgttccatttaaataaaaacactttttaaaaacatccagctcatatttccagataactttggcttcttagaaaagagtaacatttaaggatattatctaagtaatatctaaagatactatcatttgtggtattacagtatgtactatgtgaactggatttatgaggtatgactgcttaagactgttcaaggaaataacataccagaagctgtatcttaatgagtattattcttccaagctgtttatgtcaggagtttatacatgtatggcaacaagaacaacaacttactctgaaagcaaaaggtattcttctaaagcaaagagtttgccatcattgaggatatgaaaaagaacaatagcttgctatgaggacattatctgaaaatggaatttcaaaaatgttttgctattattggaataaatagtaatctcttaaagtcacttatttgaagggacagcacttattttgaggtacaggtttagtttttagctaaacaacattagtaccttctagacacatcttaggttgtcaggtggcagggagttggttgacaggttttatgtgttttgttgttgtttggaaagaatcatatttaatcagattgtttttgtattaaataagattcgagttgccccaggcagtgtggattggcaatgtttcagctatttgggaaaataggatttgccagttttctaagaccatttaaaataaacaaggacatttcttttcatccacgttatggatttaaaaagcatgtgtggactagcctggtttcttaatcaccatttaaaatgttcctatagaaaatgtggttctgagctcttaacaactgtcttacaaatgagcgtaggaataagaccgttcataggtgaaagattactaaggtttctctatatgatgtattccttggagattaagaacataattaatattctcaattattctttagcagcttgctgtgacattattattcatgggcttttctaaacctttcttaaatttattgatttttttaagtttatatagtttcctgggataaggtttacttctttgtgggtgaggagtctggctctaggtcgaaattccacatgtgatctttccggcctgaccgtagacaattacaaggctctgcctggagggcctcatggggagaagctgccttccccacaccatagttggtgcacagctagaacattgcagtttcctggaggggctgtagtctaggaatcagccccctgcattcctagcccagatgcctccattcagaggacttccttccattccaggctcccctctctgccctgccgcgtccctgaccacctccaccccaggggtccatttagaaaagcgagagccttctcccacccctccttgacagtaagacaatttccccatctatgccgtgtctacttgatcctcacccagtgctgccattcagtgggggagaaaggaaagctggggagctagcatttctttttgcctcccgcttgcactgttgcagaaagtaagacttgattgttactttcattttagcttgtggtcctaactgactgcctcagtacctgattgctagacagtgggaggtgggagggtgttcgtaattatttattaattttattttgtgggatttttttttctgttttagttttaagaggtgccccttagaaatgtttccggaatttgttgaataataatttgactttacatttgtaaggcactatgtagtttataattttctttgtaagaactttgtgacttaagaattctctcaattttacgaacgcactgataggcgtaagcaaagtgactttccctaaaaaatcatgaactgacaacagacttaatctcaacttcaagtcccggcttagccacctattaagtgacttgaacttgggactaagcctgttgtcggttcagccctctactataccatcctgcttcattggtaaattagtcttttgtcttcttgaaaagttgggactacttagggctgttcaaattaagcagcatcttagtggaaggcttgatcctgtggtattcacaaagccctgtggaaattgtgaggagaggcagactaatgataacagcaaatgggttagcactgattgaacacttaccacgcacccagcactaagctacatgtgttacctcccagaagcttcctatctttggaaataaccttattagccacattttattaaagaaattgagactagcgaagttaggtatcatgccagaggttgtaaaactaagacaacctctggtagtgatacagcctgtggtagtaagtggcagatcctgaaccaacctagtccatacccttcagcgccacctgaaattgctttctgcagagaattgagatgactctgccctacttagggatatttctgctattaaggagcagtaagagtagaattcccagcagctggtcacggtggctcacacctgtaatcccagcactttgggaggccgaggtgggtggatcacgtgagatcgggagtttgagaccaacctgaccaacatggagaaaccacatctctactaaaaataaaaaaagccaagcgtggtggtgcatgcctgtaatcccagctactcgggaggctgaggcaggagaatcacttgaactggggaggcggaggttgcggtgagccaaaatcttgccattgcactccagcctggggaacaagagtgaaactccatctcaaaaaaaaaaaaaaacaaaaaaactgtagaattctctggaacagaattttctaatactatttctaaatgctgagaaataaatctctgtttaaaggaaaaatattctcaggtccctcagttgacttaaaatattcttactatgttgtttatgaacacaaatccaggtataagctccttgtacatagagctcctattcagccacaaaatcaaaataagtacaagtacaaccacaaaaccaataaaactcgaattaacagcagtatagtgtgactgctgatgttttactgaaaataaattgcaactctcattataaagaagctactgaccatcatcatgcaggttcttttgacttcagcccatctgtgctgttgtgtgctatgtgtcttcccaattccctcaccacttttctctattcaaaatactgcagaatctttttacagtgtgctgtatactcagatgcatcatttatgtattacatctgtgctgcttattgccagcaagatcataaatgcaaacacagacactgaaatcaagtagcagttatacatggctcctattgaattttagattattatcataataaaaatgcgatttaaataattgtcataggaccttggttggacaaaccctgttttagcagatgtgtccagtgggggactgttcctgaagagcaagggatggagatctattataatgactttcagaagattaacataagatggtggacgggagtccatgttttagcttttgtcaatactaaaagctttctctttcataggcatttgtggccttgtggttttggccacactgtaagagcctctcgttcaaagcagtagttccttctcattgttacagtgtttactgtttttgttactaggtgagatgggttaaaaaaaaaacttagaaggcctcattcctaaccagtacctcctatctgtcttctccctcccctgtttctttccatttcccccccgcttttagagtccgggtcttgccctgtcacctaggcatgatcaaggctcactgcagcctcaaaatcctgggctcaagtgatcctcccacctcagcctcccaagttgctgggtccctccccttgtttcttttaaacccagactctagccactttaagtccatcagctcctccaattccttctaccctcctcttccctctctattatttttttcccagtcagcatgggcttactctgtggttactagttatattttccttcacttccaccatcttaaatcaccattgctttccatactacaagcctaaatagtcctaatccagatcaaaccaaatatttcgccccacaaactaggtagtagaggaaatcaataactgccctatcagttaggttacttttggtagcagataacagaaaactcagatggcttaaacaattaagaaatgtattggctcgataactgaaaaaaaaaaaagaggaatttaatccaactacttaacaatgggacttatgaacctctttttagcttcctagttttcttgcctcatagttggcttcatcctatatttgtaccatgcatacctaacgttaggcccactcatggctccaaggtggcttttgttatggactgcattgtgtccccctaaattcatatgctgaaggcctaccccacaatgtgactttatttagagatgggcctttatggaggtaataaagatcaagtgaggtcttaggagtgaggccctaattcaatagaactggtgtccttataaaaagaggagaagatatctctccctctgcgaatgcacagaggccattggaggacacaatgagaaggtggctgtctacaagccaggaaccaaatcagccagcactttgatatgggacttctagcctccagacctgtgagaaaataaaatttctgttgtttaagcaacctagtctatgatattttgttgtggcagcccaagctgaccaatatagctttcaacagctttggggctgttgaaaaagcccctctttcatacataacaggtgcttcctctttcatacctaataggtattaaaaattatctttgttcccagatctctagcagtaaaacagaaaggtactctgttggacaggtttggccacatgcccacttcctaaccaatcactatgcccagaggtatagaagtgtgccgattggcttagcatagggtatatgttcacctctggcttcaatcatgtccactctggcctctcagaaaatgtacagatttcaagtccatgagctatgggaagtagggagtgaatacttgagagacaaccaataaataaccactaatttgagctgcatctttagataggcaacttatgttcattgacattcttttattcaaatgttgttagtgtcctttcccattttttttctgttcctccttttctcatgccccctaccttacagcctcttacttcacgaagaagagctcattgggaaaggagtgtcttagccatcttctcttctactacaaactcacctgttcttactcttcagagcataaagttgttctagatacctcacatagctgatgtgttttctgtgtacttatttcccctttctttggcctacttattctcaaaacttgttttgtcagcaattttcttttttcagtatcttcagtctttgtgtgtgtgtgttctctcatcctacaatgatactcaagaatctttgcagcttaacaaatacccttctttcacctacatgatccctcaaaatacagcccaacttctctccttttctctcctctgcctgtcagtcatctacattcattacctcctttactccagtgacttatatattgattaaactgttttctgctggcagagccaggtttcaaatcaccttgataaaggtcatcactgatttcctacatttctaaaaccaattgtttatttttggcttcttttaatattctttagtattgagtcccataaactaacccctcttcttcctaaatatcagtattaccattagttccatctgccctatttttttttcttgatcagtccctctcgacttcagccaccacctgtaaaaccaggacttgattcccagatacacatctctagcacctaccactcacatgaattcatttctaagtacctattggggctatccatttgaatatattgtaggatccttaaagtttgtcatgtgcaaattgaactcattatcttcccttccctaccttcatcccaccattatctagcctttttgcctgtgtgtatgaactctgttttgaataccatcaacatctactcagccatgcaagccagaaaccttgtctcctgtttcactgcacacaacttttacatctagtcattgcaagaaattcattgattctccctctgaagtgtgacttgaatatgtgccctcgttgatactcatggccactgttttctttagctgtcatgatctaatagtcttagtgtgtagccctgggcctctttctcttctcattaattctgtatctgagtggttctcaatcctcaatgtacaccaagattgtatggggagattttaaatgctacacatgccctggtcccagaactttgattttcattgatcagtcatcggtagtataaggccattataatatatataaatacattttgtaagtctttataatctttataaataatgtctcccattatccatggtttcactttccatggttcatttacccactgtcaaccatagtctgaaaatattacatggaaaattccagaaataaacaaggcagaagttttagactgcatgccattctgaatagcatgatgaagtgtcacaccatctcactctgtcctgcccaggaagtgaatcactcttttgtccagtgtatccactctataaattctaactacccggtagtcatcatctgctcctgacagccagccattgacaccgtcatggctccatgatccaggattacctgaagcagctgatcgtccttcagatgtaggtcaatagtagcttaacactatgtcacgatgcctgcatcattcacctcactgcatcttatcacgtaggcattttatcatctcacatcaacacaggaagggttaatacagtataataagatattttgagagagagggagagactatattcacataacttattgtatattgttacaagtgttctgttttattagttattgctaatctcttaagcctaatttgtaagttaaactatcatatatatatatatatatatatatatatatatatatatatatatatatgagaaagcatagtatgtatagggtttgttactattcacagtttcaggcatccactagggatcttggaacctatcccctgcagacaggatgaggaggggaccactgaacagatctcatcatcttgctctcttatttaaaattctgtttgttgcattgcctatgagaaaatattcaaactgcttaatttggtgtacatgaagattcctatctggcctctgcctaactttccagccttataaccacctccccaccccacctgtctgcccctcacatcatagtctgtagtcatacaaaattattttgttttacatttttaattttagaacacttttagatttatgaagaaattgtgaagttagtatagagaggttccatatagtccataccccgtctcccttgttagtaacagattcgtatggtacatttgttacagttaatgaaccaatattgatacattattgttaactaaagtccatattttattcacatttccttactttttacctaatgacttttttgagttccaggattccatccaggataccacattacatgtagtcatcgtgtctccttattttgcttggctctggcagtttctcagactttctttgtttttgatgaccttgacagtttggggagtattagtcatattttatagaatgtctgtcaactggggtttatctgatagttttcttatgattagactgaagttatgggggttggggaagaagaacatagaggtaaagtgctgtttttgtcacatcatatcaagaatacatgctatcagcactatcactgttcgtgttaaccttgatcacctggctgaggaagtctttgtgaagttactccgctgcagagttatttttccccctttccacactgaactcttttagaaagaagtcactatgtgctgcccacacttaatgaggagttatgttccacttccttaagggaagagtatttatttacataaattattcaggactatttgcatggacgatttctctcttctccctcatttatttgtttatttaatcatttatatcagtatggatacatggatatttattttatactttgggttgtaatccaaaactactttttattttgttgctcagagtattctagctttggccattggctacacgttcagttggctcctgtgtccttttgacaataccctcagcactgtaggtttttttggtttttcgggtgtatgtgtgtgcacttccttactttctggcactataagatgctctaggctcatgttatattctctgcctcaatcctagaatcagccagttctccaagcagccatggttctgttttattagagaatggttagaaacgaagatctgggtactgggtgtgcttgttgccaccgggatgtgatgacttctaggccctctcagatgacagagtaaggaaatatatgtgtgtatactaatgaatgtatacatacatatctacagatatttctatatataacgtatgtatattaagctaaatatgagtgcatacaaatgactcgcattctaagtcattaccatatagattattctagccttttcttctcccttgtttgtaacctcccactccaacaatgagaaacctggcttctgccaagtatcacctacttcctaattgttcaattctgatttccttgtatactgatttcagaattgttaaccctttatcaactagagtacagtgcttattaccattcctattgccttcagttttataggcaccattcatatccagaattatttaggtcagcacctttttctatattatttttattctctgaatattccatgttttcacacctgtttaatctttatttgtgctaatcctcctgcctgaaattccctggcttttacccttctctccgtggaatgttactcattcttctatacccagcacaaatattgcctctaccagaaagcttctcagagccaccactagtagacttaatctttcattcctctgtgctccaatagcattttgtacttacctttactatatatcatgtcaggattctttgtttgcatctctttcttcttcacttaatggtaattcttgagagcagaaaccaaatggatttgtctctgaaatcccaggacttaacaataatacatattacgtaacagaaaacctaatagtggctaaaatacaaaaggatttacttttttcacctagcaagaagtccagagatagactatcattggtttacctgttcaatgatgccatcaagaatccaggcttttttccttcttccgtacatagaagtctaaatgtgaaatgccaggtaaataagttaaaaccaatttcattctggcccagtataatgtgtttggagacaacgtccagagaaataagaatagttcagatattttggattgagatggctttgagatgagcttacattaaatcccttagagaaataacttctgagtcccagttgcctctttttgtgtgagtgagtgtatcatgtagccaccattcagggcagtcatggagaacaaacgctaagcatgaaattcccattttgaagctgcagagttactgacgtcatagtgtgatcaaaatgctctgcaaatacttactgtaattattgttgttgttctgttcttgctaataaccttatttataccctgaaattataatcatccaaagaaagattaaaacaagatgcatgagttgcctaagctgtttgtctggcagatggtcaccctctgagttcgctgaaattgccagggttaattgaagcttcagttttcactgcagtgtagttgatacttaagtgtttcttacctgtcagcttttgctctccaaaaaagtacaacagtagcgcttaatttgttctcattaatgctagcctctcaggtaatgtttagtgcaacttcattctagatgatgtttgcttcccagcttcccagctgagaagaaatgctaaacagttacaaaggtgaaaacatgaacgtctcactaatttacttatttaaaggatactcagaactcaggaaacattgaagggaagttaacttttacatggtggactggcatttagtgtatggttaatagcaattcctctccctggggttgcagtgagctgagacaactgggaatcatccttggggagttttacaaatagtttttcctagagctagctaagtgctccaaggataatcgttatagattcacacaaacagcagtactgtttgctctatttctttggtgttcctctagtagtattaaaatgcaagaaagcagtcttaggaaccatcttaaaaagcaatggaactaagaagccgttctttgcctctactactcagctctgcagaagcaaaccggtgaaaagacgtgggtgttaaaatgttacattatttaggtgatgcaagagccttttgtctgcaccttgaggtttgagtacagattatacatattgttatgtatgggttcagcacatatagtaatatgacaagccaaataagagaatgactgtgctttcctaaatctggggactgctgactaccaatggcattgcttgctatttgattaaggcccaagagaaaaacagagttgagagatgaagggagagaaggaattctgggcctccttaaatcagttacaacaaaattagcaaccccattaaagactggggaatcagtaacatgatccttcttgtatatgtggtgtacaaaagtagaaggcaaatgggtgaattatatgtatgtgaataataatgctgttcaaaaaagcaaaaacaaaaacatccaaaaaggtagaatgtggattctttaattagactgcttggactggaattgaatctctatcaatttttagctgggtgactttaggcctgttagtttacttcgtcctttataggtttttttcttaaaatagtaccccttgatagggaaatggaagctaaataagataatatactgtatataagtgcttaggataggtcatcacacatggtaaatatttaacttttttaaaaaaaaatgaaatttacatggaagagatattggaattggtgctttatttccttttatttatttatttttattttgagatgaggtctctctatgttgcccaggctgatctcaaactcctaggctcaagcaatcctcctgcctcagcctccaaaagtgctgggattacaggcatgaaccactgtgctcagcctttactttccaaaatattttttcaatttgcaaaatatactatggagtctttccttttattaaaatccttctttaaaaaaaagtattactcaaaactattgctccccaaaagcaaaatttgcagttaagaggtattttgtcatgtgcattacatacattttacctattcctgtagcatatgttatagtttgttgatatggtcaggcagatgtatgaatcattgtgaaaaggatcccattttagtggtaggcaaagcatctagccaaaatttgtagctggggagagatctgctccccataagttggccttctgtatcaaggctgctgcttttgccactatgctcattgtggtggtagtctgctcaggaaactggtaactattaaaaccaccttctccttggcttgtcatggttactatgtatgctgaacccaagtccttttatacatttgttcttttccttacattctaaaatagacacatacctacctacacctagagctggcaggaagtctgtcagcttttcttggtatgcctctttatacttggtagcataataaatgcaatttttaatgacactgtcaatctaatacttgaatgagcttcatttcctttctcgtctgttccttagtgattgctttaaccattgcctattcatgactgagccttggcattaagatctcataggggcatggccctaaagtcttgcttgttctgtttcattttggccttcttaggattcaagaggaaggaccttcataggatggtgagctgaaaatgggaacctgtgggcaaagttggtacaatatatacctttgatgtgacattaatttgagttaagtgaagggtcaggaccacgttttcagatttttcacatagtaaattttaaaaaactgaaacaccttatcaggatttgtggaaatttttgttgccttcttcatacttcatccatttccagaactttttcatcttccctaaatgaaactctttatctatttattttttacttttttggtatctagcttctcttctttaattgtatatataaggtacacaagaagatgttttaatgtacatatacacagtgaagtggttgccataggcaagcagattaacaattgtatcttctcacatagttacctttgtgtgtatgtgtggcaagtgtacctgaaatctactctttcagcaaaagtcccaaatataatacaatattattaactgtagtcctcgtattgtacattagatctgtagacgtgttcatcctacatatctgcaactttgtatcctttgatctacgtctccccgtttcctctcgcccctcccctatccattaaaaacttaattccccattcccccttccccaacctctgccaaacaccactccacttcctgtctctatcggtttgactactctaggaacctcatataagaggaatcatacaatatctatccttttatgactagcttatttcacttagcataatatctttaagattcatccatggttgtaccatgtgtcaaaatttcctttctttttaaggctggataatgttccattgtacatatatatgtatgtatgtatcacattttgtttatccatttatcttcaatggacacgtgggttgcttctaccttttgtctattgtgaatgatgttgctatgaatatgggtgtacaaatatctctttggtctctgctttcacttcttttgggtatatacccagaagtagaattgctgaatcatatggtaattgtatgtttaatttctgaggattcaccataatgttttttcatagctgctgtatcattttatgttccaatagcaatgaataagggctccaatttcctaatttctccacatcctcaccaatacttgttatattctgggttgttgttgctgtttttaaataccagccatcctattaggtgtgctgtttgttttgattttaattacaaatgtaattaataaatttagggctattcagattttctcttgtgttattttgttattattggtaagttatggttttcaaggactttgtcccatctaatgaatgcaataaaattgtccataatatcccagtattagcttttcaatgtctgtaaggtctgtggtgatatctcatttttcattcctattattggaagtttgtgttttgtgaaacacatgtttgatatcagtcttgccagaagtttatcagttttattaatctttccaaagaactaacttttgactttgatttttccctgctttgctcattttccctccttccctctctctctctcttttttttttttttttttttttgaggcagggttttgctctgtcgcccagaatgcagtgcaatagcatgatcatagttcactgcagccttgaactcctgaactcaagtgatcctccctcgttggcctcccaagtagctgggactacaggcactggctaattttgtttgtttgaagttttttgttgttgttgatgttgtttttttttttttttttttttttttttagagacagggtctcactattttgcctaggctagtctcaaagtcttggcctcaagccatctgcccaccttgacctccctcccaaagctctgagattacagacgtgaactaccatgcctggccctgttttctatttcattgctttctgtttttattttttattatttccttctttctacttactttgggtctaatttattcttatttttctagcttgtgaagatagaagctgaggccaggcaagatggctgatgcctgtaatcccagcactttgggaggctgaggtgggaggatcccttgagcccaggagttcaagactagcctgggcaacatagggagaccctctcttaaaaaaaaaaaaaaagtagccaggtgtggtggtacatgcctgtagtaccagctacttgggaggccaaagcaggcctatgagctatgatcgtgccattgcactctagtctgggtgatagaacaagaccttgtctcaaaaaagaaaaaaaaaaaaagatagaagctgagattattgatttgacatctttctcttttgtaataaaaatatgtaaaactataaatttctctctatacactgctttagttgcatcccatacattttgatattttcagattttgttatcattcagttcaacatattttctaatttctcttcagatttgttcttttactcataggttatttatagctgtgttgcttaattccttaacatttggaaatttttgtagctatcttattattattttgaatttggatacaaaagcaaggattgacaatatgctgcctattagaaaagcactgcctattagaaaagcacacaaatagactaaaatttttttaaaagatacacagcatgccatacatgacattacattagacaattggtagggctgtattaatatcagacaaagtagacctcaagaaaatgactgttaccagagataagaagggacatttattaatacaagttaattcatcaaaatattaacatttaatattattatagtcaaaaagcacactctgtatgattttaatactttgggatttatttttatttatttatttatttatttatttattcattgagacagagtcccactctgtcacccaggctggagtgcagtggcacaatctcggctcactgcaacctccgcctcctgggttcaagtgattcttgtgcctcagctgattataggcacccgccaccatacccagctaatttttttttggatttttagtagagatggggtttcaccatgttggccaggctggtctcaaactcctgacctcaggtgatctgcccgcctcggactcccaaagtgctggtattacaggcatgagccactgtgcctggccagccaaatttatctatttattgagacttgttttatagcccagcgtatggtctaccttggtgaatgttccatgttcatttgaaaagaatgtgtattcttgctattgctgtatgatgttctttctataaatgtcatctaggtcaagttaataatgttcaaatcttctttatcctttttgatttttagatagcttgtcgctggttatttttctatttattactggaaaagggttgttaaaatctccaagtattactgtgaatttgttaagttctccttttagaaagttctgtctttttgctttatttattttacagctttgttattaggtacatgcatagttaagactgctatgttgtcttgatgaattggcttattatcattattaaatgcccctctttatctctataatagtcttttcattgaagtctactttgtctattaatatagccccaccagctttcttatgcagtgtttgcatagtatacctttttttacgttaatctatttgtttctttatatttaaagtgcttgccttataaacagtatattgctgggtcttactttttttaatccaagttaataatctgctttttaattggagcccatttatatttattgtaagtattgatatggttgggtttacatatgctatcttggtatttgttttctatttgtcctatttgtttttcattcctctgttcttcctttcttgccttcttttggatgaatggaatattttaaactgtacctctttgtgttgtttcaaataaaaatactacttattcacacagttttgttgtgcaattatctgagttaaactggtattcaaattagagtatgccaaaagagagctaagagaaggtacataaagggattgggtcattctggtggcagaaacctactttttctaccacaattttatttggggctggccctgcccttcttttcccacaaaattgaaccatgaccagcaaaccttaggctaacgtggtagtaataatacaaagcacatatttgttaatcatcgtagttaatttaattggatagctacctgtacattgtcacattcttctatcacttccttcgcactgcaaggatcttaattaggatccaccctggaaaatatgaagtaacttccatccaattagatttatgtcagacaaataccatttttatgtaatcagtcaaacaattcatgagcagcctggtgctgcctctagaagcttgcaatttaagtaagaaggcatttatataattttattatgtatttatattatctcctatatacagttgttatatatttatgtaataagataaatagcaatgcaaggctgtgcataactgttatagataagcaagtgaaataaagatgtttgtgtggttaattaaagaaacagctgcctaagtagggaaattgccacatatttagaccctggccacaccatgctttctccacagactagcagcctgcaagattcacatttctctgacattttcctgaattgcctaataatccaatctggttgtatctttttgtctctgtctacagaggctcttggtcatttatagtgagagaaactcttactttttttttttccctcttctatatatagatgagtatagataagtatcacgtgattatttaaaggattgaaattccattttgatttgcctttcctgggtaggaaacatttacatcattttatacttttgagcatgaattgcctctctttctaggtgtaatcaatttctactcttcagcatacaaaagattttatgaatactattcactgcagaaagagctctaaaaataattttgcaggtagggttttatagaacactgatagtcttatgtggaacattggcaggcaaaaagaacaaaggcacatcagggtaaaggtggtggtaggtggagcatttcatttcatttgcctccaccaaagagcttgcatttactggagaaggaaaacaaataagaaacaggagcatctgcacttgctgttgaaggtttcatttcttatcactgttaagtcacatttgaatggaaccattacagtcttgttggtatgtataactatgcccccactttttttttccaaaaggaaaatcttgaattttatgtttaaaagtacaaagagctgtttttgacattctgcagttcattttggaattcacagtcttaaacctattcattttcagtagggtggtaaagagtgcacagtatatggcatttttacgcctaatagcacctccaatgatctgtgatgcatattacatacacacaccttttagcatctgtttccacctgacagctgacagcattaggctgaatgttgtgatgaacaactgaaatgtcaagcagtattacaatggtttcttattggaaaaagtaagcaccttagagcttctttttaatacttttccataaagattttaaagtgacatatttacaagtacataattaagatgacatactctttaaatgcttgttattcttccagaaatggagatggatttgggctaatcagcagatgattctcctcttgagctagggtataagcatgctttttttttttttttttttgcttttttataagacagagtcttgctctatgacccaggctggaatgcagtggcatgatcatggctcactacagcttcagcctctaggcttggcctctcgtgtagctggaaccacagatgtgcaccatcacccctaatttttttttattttttgaagaaacggtctcactatgttgcccaggctggtctctaactcttggactcaagtaactctctcaccttggcctcccaaaatgttgggattataggcatgagccactgcagctggccttaagcatgcatttttgttttgttttgtttgttttgagacagagtcttattctgttgcccaggcgggagtgcaatgacacaatctcggctcactgcaatctccgcctcctgggttcaagcgattctcttgcctcagcctccaagtagctgggattacaggaattcacatcactcctggataatttttttttttttttgtatttttagtaaagatggggttttcctatgttggccaggctggtctcgaactcctgacctcaagtgacccacctgcctcggcctgccaaagtgctgggattacaggcatgagccaccatgcctggcaaagcatgcattttgttcaggaaaatctattttgcatccatattactgactattcttaaaaatatatgtatacaggattgttagaattaataattgctaagattctgtcttaatatttatttatttgactgattttcatattattcagttcagcacggagaatgagagttacaggtttgttttcttattcttctgccatacttgggatttttgtctagtggtcacaaaatatttcctagaaatatattttcctagaattaccccccaaaaaataaaattactttaaaaaaaatctgtctttagtacacaaattcagacatgctttgatcatgtgctaaaaattaaataagcaaataaaatatcgaacaaagcaaagttggtcaaggctatggcttcaaaaaaatgccagccagtgttgcccaccctaaatatttctctcccatctcttggcctgaatatacttcaggagagaagctgttatgctcatctttcattaaaaagtttctagttttcatgtgcattctcagattgaaaacctttagaaccaggttttgggtattagataaacaatacactgtttaatctatgttgactaattaatcatttgtaactttttaggtactgcttaggatgaatatgatttggagaaattccatttcttgtctaaggctaggaaaggtgccacacagataccaaagtggttaccacccagtggcccctctgggatcaaggattttaactgacccagccaaagtttttgaacacaacatgtggtgagttttctttttaaatctgatattatgtgtgtttcttaaatatcaccagtggtattattttcatttagaattaagaaagggtttttaaagctgatgacctaactcatgttgtagaggtccaaaagctagggtaaccgatcctgacttaagtgttgctgattctgaatttcattgcaaatggaattggaagagtgaaactttccatatgcttttagtagccttggagttcttgcaggcccttcctacttacctctgatcctgatttgcctgctgtcactgggtgggggtgaggattctttcctaggtggggccctcctcctgctccacagttccttccctctttttcatacttgtcatccagcaaatgcagatcagtacctgtgtcttactgagcaccagggagatcatattggtatgattctcgtctatgctttcagggaatccaccctatttggaaagatagatatttacagaaaaagctgataattacccctacaaggcagtaaattgtgagggctcaatgagtgttacagactatatgccatatgagaacaactcagtaatgcaaaaacacttctgtttgggcatagtcagaaagatttcttaaagtgagggaaactgagattacgattacaggcacacctcagaaatgttgtaggtttggttgagaccactgcagtaaagcaaatattgcaataaagtgagtcacacaatttttttggtttcccagtgcatataaaagttatgtttacactatactgtagtctcttaagtgtacaatagcattatgtctaagaaaacagtgtacaaacctaattaaaaagtaatttcttgctaaaaaatgctaacagtcatctgagccttcagtgagtcataatctttttgttggcagagggtcttacctcagtgttgatggctgctgactgatcagggtggtggttggagtggctgtggcagtttcttaaaataagacaacaatggagtttgcatcatcaactgactctccctttcatgaaagatttctctgtagcatgtgatgctgtttgatagcattttacctacagtagaactttcaaaatcagtcagtcctcacagatcctgccactgttttatcaactaagtgtatgtaatattctaaatattttgtttaatatttagaattttgtctaaattctttgttgtctaaattatgtctaaattctttgttgtctaaattatgtctaaattctttgttgtgatttccacagtgttcacactgtcttcaccccgagtagattccatctcaagaaactactttctttgctcatccctacaaaggaactcctcatctgttcaagttttatcatgagattgcagcaattcagactaaatctttaggccccacttttaattctagttctcttgctgtttccaccatatctgccgttactttttccactgaagtcttgaaccccttatcatccattagaatcaacttcttccaaactcctattgatgttattattttgacctcctcccatgaatcacaaatgttcttaatggcatgtagattggtgaatcctttccagagtgttttcagtttactttgcccagatccactagaggaattactatttatggcagctatagctttacgaaatgtagttcttaaataagacttgaaagttgaaattacttcttgatccaagggctgcagaatggatattgtgttagttggcatgaaagcaacattaatatccttgtacatttccatcagaactctggagtgacaaggtatattgtcagtgagcagtagtattttgcaaggaattcttttttctgagcattaggtctccacagtgggcttaaaacattcagtaaaccatgctataaacagatgtgttgtcatccaggctttgttgtttcatttatagagtataggcagagtagattcagtataatttttaagggccctaggattttgggaatagtaaataagcactggcttcaacttaaagtcaccaactgccttagcccttaacaggagagtcagcctgtcctttgaagctttgaagccaggcattgacttctcctttctggctatgaaagtcttagatgacatcttcttccaatagaaagctgttttatttacattgaaagtttgttttttagtgtaaccaccttcatcagtgatcttagctggatcttctggataactcgatgctacagcttctccatcagcacttactgctttgctttgtacttttatgctatggagatgtcttctttccttaaacctcatgaaccaacctccactagcttcacttttcttctgcagctacctcatctctgtgagccttcatagagtcaaagaaagttagggccttgctctggattaggctttggcttatgggaatattgtggctggttttatcttttatgcagaccactaaacctttctccatatcagtaatgctatttcactttcttttcattcatgtattcactggagcagcatttttttttttttttttttttttttttttgtgagacagggagactctgtcacccaagctggagtgcagtggtgtggtcacggttcactgaaccttcacctgggtcaagtgattctctggcctcagcctcccaagtagctgggactataggcattcactgccatgcctggctaatttttgtattttttgtagagatggggtttcaccatgttgcccaggctggccttgaactcctgagctcaagtgatctttccaactcagcctcccaaagtgctgggattacaggtgtgagccatagcactcaacctggagtagcatctttaatttcctttaagaacttttcctttgcatttcacaagttgactagtgctagaggcctaggttttgtcctatctcagcttgcaaaaggccttcctcactaagcttaatcttttctagcttttgatttaaaatgagatatatataactattcctttcatttgaacacgtagaggccattgtagggtaatcaactggcctcatttcattattgttttgtctcagggagtaggggaacctgaggagagggaaatagacagggaaagccaggtcagtggagcagtcagaacacacataacatttatcaattaaattagctgttttatatggatatggttcatggtactctaaaacaattacaatagtaacatcaaagatcactgatcacagctcataacagatataataataatgaaatagtttgaaatattgcaagaattaccaaaatgtaacagagacatgaaatgagcacatgctgttggagaaatggtgccaatagacttgctcaatgcagggttgccacaaaccttcaatttgtaaaaaatgcaatagctgtgaagtgtgatcaagcaaagcataattatacaagatatgcctgtatttatattgcctgcagtacatagcacaatgcctgacacacaaatattgttgaattaatgctttgaataggtaaactgaaataagggcattctaggtggatagaaaatcataaagcactgagatgaggaaatataaggcattttcatgagatagaggataggatagtttgccttaagaaaggcttttctaggagattggtgaaagataaggttggaatgacataggccagatggggggtaggtttaagatgtgcatggtcctgaattcatagctgaagtataaggcattatagagccactgaagataaataaatgacattatatttagtgtattaagtgtatatatttggtaacaccatgctagactgatcagcaggaagaattagaagcagaaaagggccagtgagcaagagatcgtgacagaagaataaacagaatttggtgcttgtgcagagtaaagaaaaaggaagaagttgactctgaagttttgatcttaagtaactgatagaaataggaaaatcaagaggtaaatgtatttgttttattttggaagaaagatggttaatttggttttagacattttgaataataggctttgtgagcaggacattcaggtgtaaatgtccagcacgcagacactgctgctgggaagagggagagtggtcagagctgaagaagtcaagttgggcatgatatctgcagacaaaattgttatcagactagcctctggaacagcatctctggggctaggaaggtgattcatgggctttttatgtttttattgcaaccgaatctcaattttgaaagggaatacattgattttttaattaattagttctacactatacaatatggtagtcactagccacaggtggttattcagcacttgaaatatattaataactgggctgaattgagatgtactgtaaaattttaaaaacttagtacaaaaaataaggtaaacaatctcaatttttatattgaattatatgttaaaagtgaatgaaaatttggatatatgcaattaaattatatatatatgcacatacatacatatatatatttaaaaagaaatttttttttttattttttttaaataagacagagtctcgctctgtcgccctggctggagtgcagtgattcaatctcagctcactgcaacctctgcctcccaggttcaagcaattctcctgcctcagcctcctgagtatctgggattataaacatgcaccactgaaagggaaaaagctcctatgtccccctcgctggatgtgcgatgggggtgtggctcacttcttcagtgccccgctgctcagacctctaggggagcatacagatgggcaggctgtggggctcctaccccatgacagtgtataggggtgagtgtttacagctcctgaagtcccagtgagcgcgtgttacagggtgctcttttagtttagccatgcataggcagcttgtgttagctcagttatacccctgccttatcgtaaagacagaaggctttctgtatcccagggttcttgccttggtgtatgggaagaatcggatcacttatgagcttggagaatgagtgcaaggttttactgagtggaagtagctctcagcagattggggagtcagaagggagatggttttcccctggagtcggaccgctaggtggactgggctctcctctggctgccctagccaaatgtcgttctgctggtgggtggcctgctggtgtgctggtgcctcctgatgtgcttctcgccatgtccagccacctgtgtgtctgcctgctggggtctggggggaggggattgtttataggcataggatcggggcgtggcaggccagggcggtcttgggaaaatacaacatttgggcaggaaatgcctgtcctcacctaggttcatgtgggtggagccctagccagggaccacgtcctcctctaagtagcgcttcccttccccgcttctgtatcatttaaagggaccacactcttcccttccatattgccaccacgcccagctaatttttgtattttttgtagagacaaggtttcgctgtgttggccaggccggtctcgcactcctgacctcaggtgaactgcctacctcggactcccaaagtactgggattacaggcgtgagccactgtgcctggcctaaataaaatatatttttaaaattggtttcacctctttattttcatttttccttaccatggctactagaaattttaaaactacgtatgtagttcacattatacttttttggacagctgctccattaaaccattttcactaccatcaccaatatggatagttatcacaggctatgagataaaatgggccctttgccaggcaattaaatctccagagcaacttctgatcttaggcaagctcctcatttatcaattttttttgttttcttcattagaccctagtgatttagctatctatattctctttttccatctgctaccacctgctctcttgcctgagattcttgcctactgatttaagttctgttttgtcatagactcaggaaagcaaggatcatctggtccagcactcctcaaacacacgggctagctttgggctggctgcacaagaatccttctgggagttactatttcagtaggtctagaggtatggcccaggaatttctaacttgaaaaggctcttttagttattctgttgaggagccaggtttgggaacccttgatccagtccagtggtttttataattttctttagcaacagaactattttcaagtgaagctttaacatggaatcctaggatttaaaagataaaagcaaacctgacctgaatgaattaggcatagaggcctggagcatcaacagcaccacttccttttccctctcacctctcttcacttactctagcagccaagaggacccttagggctctgttattcagtttgaaaaacattgatctagtctagacagccatccgtcttcatagcataccccccaaggggttggccagtctgcacccgacacctgtggtgaactctctaccaacacagatacatactgtaagagcagcaataaaaactttcacccagggaagaggaaggtagttgattcacattatcttcccacacaccttttttacatttttttcttcttaaggagaagatgtgtaaattaaacgaaacctggtttgttctccccatccttcaagtccaaaattctgttcagaagtttttgttttcttccttattttctcctttatatttaagaatagtgtttcctctcttgctgaatttgattttttttttttttgagacagggtcttgccctgtcacccaggctgaagtacaatggcactataatggctaatttttaattttgttttattttattttttttagagagggggggtcttgccatgttgcccaggctggtcttgaactcctggcctcaagcagtcctcctgtgttggcctcccaaaatgctgggattacaggcatgagccaccacacctagcctgaatttgattttttaaagatgtttctagaaaagcatatgccagttttctctcagaggtgttgctcagaattatctacagttcatttttccatttagcctttggttttaaggattatttactctctatatgaccatatttttttttaattttaagaaaaaataaagatactcttttttatttagtttctaatatgctgagaaagatttgccttccagattctgggtatttgtattactagtacttatatctgcctatagtcttttacttatttacttactttattaattaattaatttaaagacagcatcttgctctgtcacctagactggagtgcagtggcatgatcacagctcattgcagttttgacctcctaggctcaagtgatcctcctgcctcagtcccccaagtagctgagattacaggtgtgtgctacccacacctggctaattttttattttttttgtagaggtggggtctcactatgttgcccagactggtctggaactcctaggctgaagcaatcctcctgcctcagcctcctaaagtgctgagattacaggaatgagctaccacagttggtctagtctttcattttttgtctgtttgtttgtttgcttatttgagacagtcttgccctgtcacccagactggagtgcagtggcacggtcacagctcactgcagcctcgaccacctgggctcaagtgatcctcccacctcagcctcccaagtagctggtactacaggcgtgtgtcaccatggctagctaatttttttgtatttttagtatacatggggtttcaccatgttgcccatgctggtcttgaactcctgggctcgagtgatccacctgcctcagcctcccaatgtgctgggattacagacgtttaagtctccgcacccagccattctggatatttcatagacatggaatcatacaatgcgaccttttatgtctgacttctttcacttatgtcttggagggtcatataccttgcagcatgtattggcactttgttctttttatggctgaatgatattccattgtttgtatacatcacagttggtttattcattcatctactgatagacatttgggctgttcccctgttttgcctcttgtgaatagttctgctatgaacatgggtgaactatgttcttgtttgtgtccctgctttcatttctttggaatatatacctaagagtggaattgcagggtcatgtggtaattctgtgtttaagtttttgagaaactcaaattgttttccacagtgactgaaccattttacattttgcctattgtcttttaattatacttagtacatttatcaattttggagggtgatgacaggaaacgattttcaaaatgcttttgagacatggcccagagatctgtctatattgagcaacttacacagttacttggaaaaatcattccttattcacaatgttcttggtttaagcatatagaaacttttcaagggatctcggccatttataagtaagcactaagcacttgttttacatgactacatcagctaggccattggcatgctcccagtaagaaacacactttccatcatggaccagcacatgtgtacataacatatacacatatataaaacaggaacaaaagtttccagtacagtttttaccatgggaggtgtgcatctagtattttccatttattttattctaccctgtttctatttctttattcaagggttgcttagagtaactaaattgatttcatgactcaccaaggtttatgaccttcagtttaaaaacactgagctaagccgttttctgtagatccaaggtaagactgtgtgttgcaatgtgatttctattatgtaacccacttaaataatagacagtttacagaatctcaatggggttcatatcccaagaattcttcattatataattttccttatataaaaattatacttatcatctgattcctcttgccctgtttcatatatggttctttttgttttttacatgttcagtacacatgtgtgttttttggggtttttgtgtttgtttgtttttttcacacagagtcttgctctgtcgcccagactggagtgcagtggctcgatctcagctcactgcaaactccgcctctcaggttcaagtgattctcctgcctcagcctcccaagtagctgggattacaggcgcccgccaccacacctggctaattttttgtatttttagtagagatggggtttcatcatgttggccaggatggtcttgaactgctgacctcgggtgatccacccacctcagcctcccaaggtgctgggattacaggcgtgagccaccgcgtctggcccagatgtgtgttttttgtttgtttgtttttttgtagttttcttttctttttttctttctttttttttaaattttactttgagttccgggatacatgtgcagaatgtgcaggtttgttacataggcatacatgtgccatggtggtttgctgcatctgtcaacccgtcatctaggttttaggcgttgcatgcattagggatttgtcctaatgctgtctctccccttgccctccacccctggacaggcccctgtgtatgttgttcccctgcctgtgtccatgtgttctcattgttcaactcctacttatgagtgagaacatgcagtgtttggttttctattcctgcgttagtttgctgaggatgatggcttccagcttcatttatgtccctgcaaaggacatgatctcattcttttttatggctgcatagtattccatggtgtatatgtaccacattttctttatccagtctattattgattgacatttgggttggttccatgtctttgctattgtaaatagtgctgcagtaagcacatgtgtgcatgtgtctttagagtggaatgatttatattcctttgggtatatacccagtaatgggattactgggtcaaatggtatttctggttctagatccttgaggaattgccacactgttttccacaatggttgaactaatttacatgcccaccaacagtgtaaaagcattcctggctgggcgcggtggctcatgcctgtaatcccagcactttgggaggccaaggtgggcgaatcatgaggtcaggaggttgagaccatcctggccaacatggtgaaaccccgtctctactaaaaatacaaaaaaattagctgggcgtggtgatgcgtgcctgtagtcccagctactcaggaggctgaggtaggagaatcgcttgaaccctggaggtggaggttgcagtgagccaagatcatgctactgcactccagcctggttacagagcaagactccatgtcaaaaaaaaaaaaaaaaaaaagtgttcctaattgtccacagccttgtcagcgtctattgtttcctttttaatactcgccattccgactctcgtgagatgatatctcatcatggttttgatttgcatttcactaaagatcagtgattatgagccttttttcatatgtttattggctgcataaatgtcttcttttgagaagtgtctgttcatatcctttgcccactttttgatgtttttttttcttgtaaatttgtttaaataccttgtagattctggatattagccctttgtcagatgggtagattgcaaaaattttctcccattctgtaggttgcctgttcactttgatgctaatttctttggctgtgcagaagccctttagtttaattagatcccatttgtcaactttggcttttgttgcagttgcttttggtgtttttgtcgtgaagtctttgcccatgcctatgtcctgaatggtattgcctaggttttcttctagggtttttatgttttttggttttacatttaagtcttaaatccaccttgagctaatttttgaataaggtctaaggaaggagtccggtttcagttttctgcatatggctagccagttttcccagcaccatttatatagggaatcctttccccattgctggtttttgtcaggtttgttgaagatcagatagttgtagatgtgtggacttatttctctgtttaatggaggtctgtgttctgttccgttggtctatatgtctgttttgataccagtaccatgctgttttggttactgtagccctgtagtatagtttgaagtcaggtagcatgatgcctccagctttattctttttggttaggattgtcttagctatatgggctcttttttagttccatatgaaatttaaagtagttttttctaattctgtgaagaaagtcaacagtagtttgatgggaataacattgaatctataaattactttgggcagtatgggcattttcacgatattgagtgttcctatctgtgagcatggaatgttcttccattcgtttatgtcctctcttatttctttgaacagtggtttgtagttctccttgaagaggcccttcatgccccttgttagctgtattcctatgtattttattttctttgtagcagttgtgaatggtagttcattcatgatttggctctctgctcgtctattgttggtgtataggaatgcttgtgatttttgcacattgattttgtttcccagactttgctgaagttgtttatcagctaaaggagtttttgggctgagaccatggggttttctaaatataggatcatgtcatctgcaaacagagacaatttggcttcctctcttcctatttgaatacactttatttctttctctagccttattgccctggtcagcacttccaatactatgttgaataggagtggtgagagagggcatccttgtcttatgccagttttcaaagggaatacttccagcttttgcccattcagtataatattggccatgggtttgtcataaatagctcttattattttgagatatgttccatcaatgcctagttcattgagagtttttaacatgaagggatgttgaattttattgaaggccttttctgcatctattgaaataatcatgtggtttttgtcattggttcagtttatgtgatggattatgcttattgatttgcatatgctgaaccagccttgcatcacagggatgaagccaagttgattggtggataagctttttgatgtgctgctgggttcagtttgccagtattttattgaggatttttgcatcaatgttcatcagggatattggcctgaagttttctttttttgttgttgtgtttctgccaagttttggtatcaggatgatgctggctcaaaaaatgagttagggaggagtccctccttttcaattgtttgtaatagtttcagaaggaatggtatcagctcctctttgtacctctggtagaatttagctgtgaatctatctggtcctgggctttttttggttggtaagctattactgcctcaatttcagaacttgttattggtctattcaaggattgaacttcttcctggttgagtgttgggagggtgtacgtgtccaggaatttatccatttctttagattttctagcttatttgcctggaagtgtttatagtactctctgatggtagtttgtatttccgtgggtcagtggtgatatcccctttatcatttttcatctatttgattcttctctcttttcttattagtctagttagcagtctatctattttatcaattttttcaaaaaaccagctcctggattcattgatttttttttttaagggttttttgtgtctctatctccttcagttctgctctggtcttagttatttcttgccttccgctagcttgtagatttgtttgctcttgcttctctagttgttttaattgtgatgctagggttttgatttgaaatctttctagctttccaatgtgggcatttagtgttataaatttccctcttagtactgctttagctgcattccagaaattctggtacattgtctctttgttctcactggttttaaagaagtttttgatttctgccttaatttcattatttacccaggagtcattccggagcaagttgttcaatttccatatagttgtgtggttttgagtgagtttttaaatctcgagttctaatttgattgtaatgtggtctgagagactatttgttattatttcaattcttttgcatttgctgaggaatgttgtatttccaattatgtggtctattttagaggaagtgccatatggcactgagaagaatatataatctgttgtctgggggtggagagttctgtagatatccatcagttccgcttaatccagagctgagttcaagtcttgaatatccttgttaattttctgtcttgttgatctgtccagtattgacagtggggtgttaaagtctcccaccactattgtgtggcagtttaagtctccttgtaggtctctaagaacttgttttatgaatctgggtgctcctgtattgggttcatatatatttaggatagttagcttttctttgtgaattgatccctttaccattatgtaatacccttctttttttatttttttatttttatttttttagatggagtctcgctctgtcacccaggctggagtgcagtggtgtggtctagctcactgcaacctccacctcccgggttcaagcaattcttctgcctcagcttcccaagtagctgggactacaggcgcatgccaccacacccagctaatttttgtatttttagtagagatggggtttcactatgttggccaggctggtcttggactcctgacctcatgatccacccacctcagcctcccaaagtgctgggattacaggcatgagccactgcatccagccatgtaatgcccttctttgtcttttttgatctttgttggtttaaagtctgtcttgtcagaaactagaattgcaacccctgcttttttctgctgtccatttacttggtaaattttcctccatccctttattttgagcctatgtatgtctttgcacatgagttgagtctcttgagtacagcacaccaatgggtcttgactctatccagtttgccagtctgtgccttttaattggggcatttagccaatttacatttaaggttaatattgttatgtgtgaacttgatcctgtcatcatgatgctagctggttattttgaacactagttgatccacttgttggttgatgggcatttagattggttccatgtttttgcaattgcaaattgtgctgctataaacatgcatgtgcatgtgttttttgttttgttttgttttgtttttttccatataattacttcttttcctttgggagatacccagtaatgggattgctggatcaaatggtagttctgcttttagttctttaaggaatctccatactgttttccatagtgattgtactagtttacattcccaccagcagtgtaaaagtgtttccttttcactacatacatgccaacatctatttttctttttttatggccatgcatgcaggagtaaagtggtatctcattgtggttttcatttgcatttccttgataactagtgatgttgagcatttttttcatatgtttgttggctgtttgtacatcttcttttgagaattgcctattcatgtcctttgctcactttttgacaggattatttgttttatttcttgctgatttgaattccttgtagattctggatattagtcctttgtcagatacatagtttgagaatattttctcccactctgtgggttgtctgtttactctgctgattatttcttttgctttgcagaagcttttcagcttaactaggtctgatttatttatttttgtttttgttatatttattttttgttgttatatttatttttgttttattttgttttgcttttggggtcttagtcatgaattctttgcctaagccaatgtctagaagagtttttccgatgttatcttctagaatttttatggtttcaagtcttagatttaaatctttgatccatcttgggttgatttttgcttaaggtgagagatgagcatccagtttcattcttctgttatgtggcttgtcagttatcccagcaccatttattgaatagagtatcctttccctggttcatgtttttgtatgttttgttgaagattagttggctgtaagtatttggctttatttctgagttctatattctgttccattggtctatatgcctatttttataccagtaccatgctgttttggtaactaaagcctgatagtatagtttgaagttgggtaatgtgacacctccagatttattctttctgcttattgttgctttggctctatgggctcttttttggttctatataaatgttaggaatgttttttctttgaagaatgatgatggtgttttgatggaaattgcattgaatctatagattgcttttggcagtacggtaatttttacaatattgattgtacccatccatgagcatggaatgtgtttccatttgtttgtgtcatctgtgatttctttcagcagtgttttgtagttttccttgtagaagtctttcacctcctttgctaagtgtattcctaagtattttattttattttttgcaacctttataaaagggattgagttattgagttgattctcagcttggctgttgttggtgtatagcagtgctcctgatttatgtacattgattttgtatcctgaaactttactgaatccatttatcagatctaggagcttcttggaagagtctttaggattttttaggtatatgattatatcatcggtgaacagtgatagtttgacttccttttttccaatttggatgccctttatgataagtgtgaagacagtgaagaccaaaggaactcaggataggaagagattcccaagatgaggttggaagagcaggtaggatttaacttgagctttgaaggataaagagtatttaaatagtgaagataatgttttacacaagtggtagcatgaataaagatgtgaatttgggaataaatacaagaggtatattcaaagcaagcaaatagaccagcccagttggaagagatgactcaacaatgttgcagtcaaatgcccagttagttaagaactacaaagtaaaatatttcagtaaaggatcatttgacaaagcaaaagacccagaccctcataaaggctaccagtctcccctgctacagaaaaatgcagaaaatacataatgtctagtctttgaaatgaagcttacagggcaggagaagcaggtctctggaaaaggttgggtgtcagggagaatttacctgcaaaataaaaggaaagaaggaaggttaaagaacctagaatgcattgtagattcacttgtattttccaatattttgtataaacagaatcatttaatatgttttatctttttgtctggcctctcttactcagcataattattttgagatttatctgtgttgctacatgtatcaatagtttgttcctttttactgttgataaaagattcataatcagaataaatttaaaactcccaaaattcaataataagaaagcaaacaacacagtaaaaatgaagtattttaagatacttcaccaaagaagatatacagatggtaaataagcacatgaaaagatgctgaatatcattagtcattagaaacgtgcaaatgaaaggcacagtaaaatactactacacacctatttgaatagctgaaattaaaagtactgagcttaccaagtgttgataaggatgtagaggaactggaactttcatacactgctggtgggaatataaaatggtataaccattttggaatacaacttggcagtttatttgtttgtttaggttgtttttactcaccactatgctaacgaggaacttggcagtttctttaaaagataaacatatatctctggtccgtgcctccaagatgacaaagaaaagaaggaacaacggtcatgccaaaaagggccgcggccacgtgcatcctattcgctgcactaactgtacccgatgcgtgcccaaggacaaggccattaagaaattcgtcattcgaaacgtagtggaggccgcagcagtcagggacatttctgaagtgagcgtcttcaatgcctatgtgcttcccaagctgtatgtgaagctatattactgtgtgagttgtgcaattcacagcaaagtagtcaggaatcgatctcgtgaagcccacaaagaccgaacacccccaccctgatttagacctgtgggtgctgccccacgtcccccaccaaagcccatgtaaggagctgagttcttaaagactgaagacagactattctctggagaaaaataaaatggaaattgtacttaaaaaaaaaaaagttaaacatacacctactgtgtatgttaaacatatacaacatggatgaatttcagaataattatgctgagtgaaagaagttagaaatagagtacatacaatactttcttttactgtactagaaaatgcaaactaatctatagagacagaaggcaaatcagtggatgctagtggtggaggtgagtggggagaaggggaggggtgggagggaggaattacaaaggggcacaaggaaacttgaagggaatggacatgttcattttcttgattacggtgaaaatttcacaagtgtctacatatattaaaacttaccaagttgtacactttgaatacagtttactgtatgtcagttacacctcattaaaaccttaaaaaaagttacttccatacattggaaaataatgtagcagttaataaaaatgagagatctatgtatactgaaatcaagagatgggtatgatatatcattaaatgaaaagagcaagctgaagagaattttctccagtatgacctcatttttgttaagaaattattgtacctgtgttaggatacaaaatcaatgtgcaaaaatcacaagcattcttatatgccaataacagacaaacagagagccaaatcatgagtaaactcccattcacaattgcttcaaagagaataaaatacctaggaatccaacttacaagggatgcgaaggacctctaaataaaagaggacacaaacaaatggaagaacattccatgctcatggataggaagaatcaatagcgtgaaaatggccatactgctcaaggtaatttatagattcaatgccatccccatcaagctgccaatgactttcttcacagaattggaaaaaactactttaaagttcacatggaaccaaaaaagaccttgcattgccaagacaatcctaagccaaaagaacaaagctggaagcatcacgctgcctgacttcaaactatactacaagcctacagtaaccaaaacagcatggtactggtaccaaaacagagatatagaccaatggaacagaacagagccctcagaaataataccacacatctacaaccatctgatctttgacaaacctgacaaaaacaagaaatggggaaaggattccctatttaataaatggtgctgggaaaactggctagccatattagaaagctgaaactggatcccttccttagaccttatacaaaaaataattcaagatggattaaagacttaaatgttagatctaaaaccataaaaactctagaagaatacctaggcaataccattcaggacataggcatgggcaaggacttcatgtctaaaacaccaaaagcaatgacaacaaaagccagaattgacaaatgtgatctaattaaactaaagagcttctgcacagcaaaagaaactaccatcagagtgaacaggcaacctacagaatgggagaaaatttttacaatctacccatctgacagagggctaatatccagaatctacaaagaactcaatcaaatttacaagaaaaaaacaaccccatcaaaaagtgggcaaaggatatgaacagactcttctcaaaagaagacatttatgcagccgacagacacatgaaaaaatgctcatcatcactggccatcagagaaatgcaaatcaaaaccacaatgagataccatctcacaccagttagaatggtgatcattaaaaagtcaggaaacagcaggtgctggagaggatgtggagaaataggaacacttttacactgttggtgggactgtaaactggttcaaccattgtggaagacagtatggtgattcctcaaggatctagaactagaaataccatttgatccagtcatcccattactgggtatatacccaaaggattataaatcatgctgctataaagacacatgcacacgtatgtttattgcggcactattcacaatagcaaagacttggaaccaatccaaatgtccatcagtgatagattggatgaagaaaatatggcatatatacaccatggaatactatgcagccataaaaaaagatgagttcatgtcctttgtagggacatggatgaagctggaaaccatcattctcagcaaactatcgcaaggacagaaaactaaacaccacatgttctcactcataggtaggaattgaacaatgagaacatttgcacacaggaaggggaacgtcacacaccggggcctgttgtggggtgtggggagtggggagggatagcattaggagatgtacctaatgtaaatgacgagttaatgggtgcagcacaccaacatggcgcatgtatacatatgtaacaaacctacacgttgtgcacatgtaccctagaacttaaagtataataataataataataataaaaagaaattattgtacctgtgttacatgtatatacacctttgcttttatatatagagagaaaagtctgaaaaggtccacattatcctgataatggtatttacatcagagatgggaatggggatgagagggagggtagagatgtaactatattttatatgcattggtattgagttttaattttaaaaaaaaatgcccccttccttatgtacctatttcccatcttgctatctacctgatggcaaattatgtattctttaatactgattccaacttctcaaaattttgagttctaccaaatcttcctcatctttgtgtcctcagttcacaggcccagtgcctgatagatataggttcccactaaatatttaatgaggcaggtgggtattggtttcttcagcacctgtgacctccatcccattgtatgcaaagtagaaaggcattggctctatgtttgtgttttttgttagtcacacaagtaagaaactcaggctggtgttgtggctcactcatgcctgtaatcccagcagtatgggaggccaggcaggaagatcgcttgatgcaggagttggatttaccagcctgggcaacaaagcaagacccgtctctacaataataataataataataataataataatagtaataataacaataatgtaatttaaaaattttaaaaattagctgggcgcagtgatatgcacttatagtcctagctactcaggaggctgaggccgaaagattgcttgaactcaggagtttgaggctgtcagaggtttttccagaggctaaaaaggttttttttaaaaaaaccttgttataggctgggcacggtggctcacacctgtagtcctagtgctttgggaagccaaggcaggcgcatcacctgaggtcgggagttcaagaccagcctggcctatatggtgaaacgtcatctctactaaaaatacaaaaattggctgggtgtgttggcacgtgcctgtaatcccagctactcaggaggctgaggcaggagaatcacttgaacctgggaggcggaggttgcagtgaaccgagatggtgccacagcactccaaactgggtgatggagtgagattctgtctcaaaaaataaattaataatgaaaaatgaaaacaaaacaaaaactaatttactaataacagtaaccaactgaaatattcattatagccaaaaagagaggtaggcatcctggagttacaaatataaattagactcaatagtagaaaggaagatttaattgaagttacttcagttattagctgatatgcctataacagctatattttatcttttctgagactcacatttttatttacctattaacatctctgaaatcatgacatttttacagtttgtgcatcttaaaattgtagctgaaaatgttttttctttattactggtacagaaaataatagcatattggatttgatgaaatagaataattataatttcagagtacttaatctttttttaagtactcaacttgatttatttacgaagtgtaatatgtccacctgcccagcactctagtcaggagcagaacattgcagaccccagaagcccttaggtcctgttcaccttaattacctcctcccaaggaaaaccaaagtcttcaaagtacttaatcttaatttgtatgctggttatttatttatttatttatttttgagacggagtctacactctgttgcccaggctggagtgcagtggcctgatctcggctcactgcaagctccgcctcccgggttcacgccattctcctgcctcagcctcccgagtagctgggactacaggtgcccaccaccacacccggctaattttttgtatttttagtagagatggggtttcactgtgttagccaggatggtctcgatctccttacctcatgatctgcccacctcggcctcccaaagtggtgggattacaggcatgagccaccgtgcccagcccgtatgctgttttgagaactattactaatacaaaaaccaaaggagagagaaaaaatttaaatgattttccactgccatacatcagggctaacctatagaacattttttatattgtcagaaaagcattacttgctaataattgataaatgaacaatgtacatagaaagttgatccaggaggaagtacatgtgagcatacaggaaaatatttaacagttaaaaaaatacaaatgcaaacaataaagtaatgtttggacctattaaatcaacaccaaagaaaacagaaagaaaagaaacttgagataacacctagtccaggtagcattgtatattaatatttgtttggttgtctgtttattttttaatttctctcttctgccctttttttcccctgttccttttttcctgcctgcttttggataaattgaataatttttttttttttgagatggagtctctctgtgttgcccaggctggagtgcaatggcatgatctcggctcattgcaacctctgcctcccaggttcaagcgattctcctacctcagccttccgagtagctgggattataggcatgcaccaccatgcccagctaatttttgtatttttagtagagacggggtttcaccatgttggtcagactggtcttgaactcctgacctcatgatccgcccgccttggcctcccaaaatgctggtattacaggtgtgagccaccgtgaccagcctaattgaataattttttgtatccaatttttacttcctctactggcatttagccatacatctttgcattctgttttaggaattatttcaaggcaatagtttcaaacattttggtctcaggacccctttacactcttaaattactacgaaccgcaaagacttcttatggatatggattatgtctattgatattttctgtattagaaattaaaactcagacatgaaaacatttattaattccaaaacaataatgaatccattacatattaacataaatgacatattttaatgtaaatgtatattcccaaaagtgtaatgcaaagagtggcattgctctaaatgtttgcaagtctctttataatgtctgccataatggaagaaattggattctcatatcctcttgcattatatgaagataatttggtctctcacagatatgtgcttataaaggagaggagtttttttgttgttgttgttgttttgagacagagtctcgctctcttgcccaggctggagtacagtggcgcgatctcggctcactgcaagccccgcctgccgggttcatgccattctcttgcctcagcctcctgagtagctgggactacaggcgactgccaccatgcccggctaattttttgtattttttagtggagacggggtttcaccgtgttagccagtatggtctcaatctcctgacctcgtgatccgcctaccttggcctcccaaagtgctgggatcacaggcatgagccaccgcgcctggctggagaggagtttttaatagcctttatcagataattgtggggttttttttgatattacactaaatctcaatagtggtagtttcttagttgcaatatggcatatgaaaccatatcacggaactttttatattctgccatatatatatatttttttaagaccgggtctcactatattacgcaagctggctgtgaactcctgggctcaagcctttctcctgcctcagcctcccgagtagctgggactacaagactgctccacagggcctggctctatattctgccatattatgatacactggtataccttgcactttggatagatcctttacctaggcatgatttataacatcatgcatggataatttggaaaatattggttccctgtttgatgtagatcttctaaatgttgacacattttattataaaatatttaaaaatcacatttgttaatatcaccaccagtctcatcaggaaaatctgtattgggaacctatcaaactcatggtggtggacacaagctttccagaagtctaatttttgcttggaagcacaaaatttatttttgcaaacacatactgtaatttgtttttcttaatgtgataggctcattttgtttacttttgagaaactatatgccacatacccaagtctaaataactatagctttatcagtagttgctctttcaagtaaaaatagcattccatgaaaaaagcagctagttcagctcacagttcatatgagtacttttcctcagtcaagccatccattgtacttcagtaagaagtgcatgctttccatcttgtcacatagactgttaaaaagatttgtacccaagggtcaatatttcataaaattaatagtttttactgcttcatcaatcagcaaaattgaaaattttttaattgtttcatttttgtaaaaattgttatattctttgctgctcactggatggtggcagagaatatgacaattaacacattttggtgccactgccttctttcattccaaggcagttgtagttttacccctcattgtttttataccatcactgcaaatgtcaacacagtgaaagagcaaaacacagtattgttatgagaatagtttcgatttagtggtccacctcaaagggtggacgacagtttgagaaccacagctctagacattacaatgtgctttgtcaacttagtatagtctacttagaattaatgttgtgccacctagcataaaattaagaaccttacaacaatatgtttctacttgtcatccctccaacatttgtgatattgttgtcatacagtttacctctatatataaatgctataatcattgtttttacttttgctatatatagttagttgagttttttaaaataaatttaaagtttttaaaaagattattttataattacccacatatttaccacttctggtctctttttttcaccctgtagatctgagactccgtgtggtccccttttcctttaacctgaagatctttaacatttcttgtagtgcaaattctgctggtaacaaattctctcaaattttgtttatctgaaaatgtctttattttacaaatttgaaagatctttttactgcatgtgaaattcaaggttgacacatccctcccatccccctatgctgacataagatctccttgctttatcttcttgccttcattatgattgtttctgatgagaaatcagctgtagtttgcatttcttttcccactgtatatggtagctacttttcaaatttatctttatctttgatttttatcagttttctctgtatttatattgcctggggtttgctgtgtttcctgcctggatctattgagtatttctttttcttctttcttctttttatcttcaaatttggaaaaattttagtatttctttattattatttttaactcattttgtctctcttttctacttctgggctttcaatttatgtgtttgttagaccaattggtattatcccacaggttactgagactcacactttttttcaatctttgtgtctctggtcttcaatctgaataatttctacatctgtcattaagtttactgacccattctctccagtgtctgtcagctgttaaccctcccagtttttttttttttttttttttgagacagggtctcactctgtcacccaggctggagtggtgtgattatggctcactgtaacctcaacttcccgtactcaagcgattcttctacttcagcctcccaaagtgctgggattacaggtgtgagctaccatgcccacctgagcctactcaactctttatttcagatagtgtatatgggtttgttctagaatttccttttttaaaaagaagttttcatttttttctgagatttcttccatctgtgcattcattctgtccatctttttctttaaatctttcaacatatttttcaatactgttttaaagtccttgtgtactaattccaatatttggttttctcaaagtctatatttattgactgacttttctcttgatttgcatgtctaatagtttttgattatatggtggacattatggataatatcttctatgcagtctggattatgttgccttcctttaaagatgtcgagttttttctggcaagtggttaaatttctgccagttccttcttggatcaggtttgattttaggtgttgtttgggtgggactattttgataatatcctgagtctagtgtggttcttgttcctatggcatgggatttctagggtcttaactaaatactcaagatgctcagatagatctttccactgtggcttagccagaactccaatgtcaccaagcactgtactacctatcttgtcagttctctcttctccatcctcattcctagaatcctctctcttctactagatcctgtggcgactctgcctgtagatgagcagctagcactagctgaaaaccttaggagaactcttgtagacttcaggggccctcttgtctgtccatctcccctttagtatcctgttgcacaaaccctcaccacctctgcaactctgaactctgatctctgccttctcaactcatgaaactgccactcagtgagacagcctctctgcaccacagtctagaatgtgtccccagacagaacaggtggatgtggggactcaccttttgtgtttttcttctcttaaggatcagtcttgcactgtctgaagtgtagtccagtgtttaaaagcagttgctttatatattttatccagtttataattatttgtggcaggagggtaagtccattgccaggtactctgtcatggccaaaatcataagtcctataccagagttttaagtcataattatgttgaagattttgtagtatatagaaaaatgtgtgtgtttgtttgtaactatgtaataaatatgactttgtgttggagaaaccagccccataccacctggcgggtacccagattccagtggagacaaaggaattagaaagaaactgaataagagtttaaaaggcgggtccaggggaccagagcatcagaggcttgctcacggccctgagctctcggcctccacccaatttattggtttacaagctcttcgttcttagggcaaatgggaggggtaggaacggatgaggaagaggattaatcagtgaaggagaactcatgagtcatttaataagatgtatagcattggcagtttctgtgaatttcctggagcaaagtagtctctatactacttaagatctttaacttatcgggactaaaatgagtgggagtgggtttcaggagaagccaagatgtttgattatactccactgcttcaaaggagtattatttccccgagcaacctgtggaatgccgtggagctgttatgctcttggggcataaagacaggaaggcaataaggagacttttctcctcagatgccgcccatggctccccatgggtgtctcacacaggggagaccaactcatctggcatcccagaaactctcttccccacactttgttatagaattaagaattattgaaatcgttttaggctgaaagtaataaactattttttcctttaacctaagaataaatattttctttttaattccctagtcatctaatacatttgtcaaatttgtcaaatatcattgacttatagaacaaaattgtgtcctatagtgaggccatcacatacatagtaaatgacaaagataggaaaatagtttatattgggtactttggtttatatctgattattaaaagttgtaacaggaagcaacactacattcagcagaagtttctctaggtaagattatcaaaaactttagtatccaacttaaataattggggtgtgtgtgtgtgtgttttaacttttccaaatcaaaccaaatacacaattatttagattacacattgccatcaactaaaagctaaatcaaggaaacattattcaattgtactatagatatggaaggaataagaaatatatataaactatgtatacaaacaaattatagggcatgtaaaaatttgttttactcaaaaatcttctatttttgaggtttttttctcaaattcaaatttttgtgaaaagtatattttgtactttctgcccaagtttcttttttatgtctttccttttttaagaaaacataacttccttcttattataagggttgatggctttttcctcaagaagggtaaagttttaaagacaattgttgtatgtcttaaacatagagtacaggttttacatatagtttttaaaaaattatctctagttgaagctgctttacgatattaaggaaatttaagatagtttgttcttactcctattcaaacataattggttttagttcaccacttagaatcttcaccctgtgtgtatataattttaaacagttgtaattataatacatatataatttggccgggcgcgcagtggctcgcgcttgtaatcctagcactttgggaggctgaggcgggcaaatcacctgaggtcaggagttggagaccagcctggccaacatggtgaaaccccatctctactaaaaataaaaaaattagccgggtatggtggcacatgcctataatcccagctactcaggaggctgaggcaggagaattgcttgaacacgggaggtggaggttgcagtgagccaagattgtgccactgcactccagcctggggaacacagcgagactccatctcaaaaaaaaaaaaaagatatatatatatatatatatataaaatttggggatgtacttttttaacctcattttataaatacttttccatattgtcatgtaatagtcatatttattatcttaatgtctgcataatattcctttgatttactataattttttcattcccctatcactgaagttgtttctaattttttgctattaatattatatttagtgttccagtgaatatcttcatacaaatatttccctgtacagaatttcttagttctttcaagttacttcgtttcagtaagttcccagaagtacaatttattggccaaactctataaaccacttttttcctttggtttttattactgttaaatacttgattatttccagtttgtttattatttgtttctatgcttaaattctatagttgtatttattactaataaaaagttgtatgattcttattgtcagctgttgggttttgggatacgtgaatccagttcttctaaaataaagaactgccataaagcagcagggctggaggaagtccccataaatacagtaggaacattttataggtttctgtggggattctgtaactgtggtgtaaaaaaaaaaaaaatctgttctgcaggaacttaggatatactattcccctcacttagcagttaagaaaatgaagtaacataaagaacagtgtaaggaagttacagttaagaaataactaaatctattaaataagaaatagcaagttaaactaaaagcttaaatgcttaaagcggaagaccacatatactcttactgtctcacagcttgattcttcccagggaaatagattgttctattttctttcctataagtggtagaaatttgtagatgaaaaactcatccctagccttagaaatactgttttttcaataaataacttgttgcctttaatttcacaactgtcacgtaattgtattcaatatagtatatttaatatatacagaatttaaagtgtagttgccagccccaatttatatgtgattgctcacatatgttaaagtaagtcaaaataagtcaaaacaaaaactattctaacctcatttattaaagcaagagacaaagctgtttaatgattatttggcttgtacatgattcagttttatttaaatactggtggttaaacttttatctatgaaactctgaaaacattctcattcagttttcctggagactgcagcataccaattttgatttatttatttatttatttatttatttatttatgtatttatttttatttttttaaggaaaacagtttcgtaccttcaacggtgtatttatagccaggtcactggaatataccctctcatatctgattgtataagcaatacttaaaatagtaccatgcttatcatcattccacccaatgtaactccatattctgtcattgttacccccactttcctagatactcagttttaagaccttagaatcattcatgactcttacacttctactccaatatctagttaatctctaggtcttaatttcagtgttttcagtgtctccctctccccctttccttcctgttctccatagctaccactttagtcatgggactcattactcctagaccactccaacagtctaattggtcgcttttcctccagtccttccccgcttcactgtgtcttgcatactacttaactgttcagccccacatttaagatcctctgaaatctgaccattacccagctcccaacttcatctgcagttgtccaagagaaccagtcaaaatggagttttttaactgttccctgtatgcactgtctgtattgtcagcttctgagtgacatgaatttgctccaccacttttcctcctaacctgaacccaaacctaccttctcttaagccttcctatttgccccagctgcattaattgactgcactccccttcatcaggtgctagccatgcatgtttcactgtattatcatttacgtattgtttacctgcttgcactaggagaatataaacccaagatggacaaacattacatcttaaatctctctgtgtcccccactgccatggtagaaaataatagactaatagttgagaagatggactttgaagtgacacaaacctaggtgaattctggttctgccacttcctggctatatgaccttgaataagttattaaatttctgttagccactatgcaaagtggacatgattataaccctatcaaaggatttttgaaaggattaaataagacatatgtatgtaatgtgcttattacaatacctgatatgtaataaataaaggatggcagttactataattataattatgatcatcctaactgctcaatgtttgtcggtcacagcatgatgcacttccaagaaaattgtataatttatcccttctcatcagtcaggtgactactacatatatcatatgataatagtgttaggggtttttcttctaggctaaatgcaacttgaatatggggtgtgtaatttttttattgtttagtgataaaaaattattcctggtttattccaggaaattgctttgcttatagtctaacctattgcaaaaaaaaaaaagcaaactttgtgaaaacaaaacttaaaaaaaattacctttcttgtatacagttgtcgcttctattccaagaaagacatttttgtgcagcagaaaatagtatcttctcatatagggagagtcgattctgaaactaaaaatacttatagaaagtaccagaacttagaaaggtgaccttttcacatgctgtatcaagtactctatcacttaaatgcaaatgaatccttttacagaaattaaagtagctaataagaaaaataaatctaaagttactttaaaaattgcaggctaagtacaaaacattttaaaactttcatctctttgacagcaaagtgttagaatacaagtgttgtaagaggagcatttaaaaactactgaagaatgttctgttcataaattaacaaaaaggcaaataaatttagccttagagtaaaaaccggcataccagcacccaaatagtcatacaccagggtgttctgaggacattactttagcagccgtttcccagaggtagctggggcttgcagcacaaccagatttaaacagaagaatcttaggagttccagggttgtaccagcgccatcagtaggaacatcttacacaaaatgtattcattccatgtggaattagtctgtatcatatgtcttcagctaatctagaatgaaagatgtggttccttgtcaccttttttctgccttcttcaatgataaagcatattttacagtctatttttttttaatagggatcacatgcagtggtctaaggaagaagaagcagcagccagaaaaaaagtaaaggaaaactcagctgtgcgagtccttctggaagagcaaggtagtcaactgcgtgctgtagctcctagagccagagctttagtgacttttcctcctcctcgtgtcattgcttctgagagttcttagcctctcctgatgccagtccacttgttccatttggtagaattcccagttcttccagtgtagtgggaccaaagttaatgaaatttgtattcaccctataattgggtctttgagtagtcatattattgctttttctgggagatacacacatgggtggcatttcaaacaaaatatgaaaacataattttaaacttttccacttgctatgctgctattactttgctattatgcatttcacttcctaggaactttgaacaaatttataaactttgagcaaagaagataaagtcacatcaaaatggtgctgaagttttaggataaatatagtttcagtaaggattgaaggcagttttcttgaaggcctttatatttaatttaagaaaagccttgccaaccttcataaatggcttttaaaaaattggcctatgctactatcaaaaaaactcaggagccggcgcggtggctcacacctataatcccagcactttgggtggccgaggtgggcagatcacaaggtcaagagatcgagaaaacctgtctctactaaaaataacaaaaattagctggtcgtggtggcacatgcctgtagtctcagctactcaggaggctgaggcaggagaatcgcttgaactcaggaggcagaggttgcagtgagccgagatcacaccactgtactccagcctggcgacagagcgagactccgtctaaaaaaaaaaaaaccggaaatgttgattccatgttatggctactatgaatagagctgcagtagacatgggagtgcagttatctctttgatatattgatgtcctttcttttggataaatacccagtagtggcattggtggatgatatggtagttctatttttacttctttgaggaaactccacactgttttccatagtggtcatactaatttacattcccaccaacagtgtatgaaggttctccttttttcacatcctcaccagcatccattcattattccctgtctttttgatatacgctatgttaggtgaggtgagatgatatctcattgtggttttgatttgcatttctctgatgattagtgatattgagcattttttcgtatagctgttggccatttgtatgccttcttttgagaaatatctattcagatcttttgccatttttttttttttttttgagacagggtcttgttgcccagtctggagtacagtgatgagatcatggctcactgcagcttaatctgactgggttcaggtgagcctcccacctcagcccagggtggtctgaaactcctcatcctcccaaagtgctggtattacaggagtgagccactgccccaaccttgcccattttttaatctgattttctttttcttcctattgagttgtttgagctccttaatatattcccattattaatcccttgtcaaatgggtagtttgcaaatatattcttccattctgtgggttgtctcttcactttgttgattgtttctttgctgtacaggcgcttgttagcatgatataatcccattttctattttcgctttggttgcttgtgcttttgaaatcttttgacaaatgacaaaatagacaaataaaaatgctccaatgtcctggagcatttcccccaatgttttcttctagtaatttcatagtttcaggtcatagatttaagtctttagtccattttgatttgatttttatatatagtaaataagaatctagtttcattcttctgcttacagttttccagttatcccagcaccatttattgaagagactgtcctttccccatcatatgtacttgacacctttgtcaaaaatgagttggttgtaaatgcatggatttatatttgggttctctattctcttccatcagtcaatgtgtctgtttttatgccagtaccatgccaatttggttgctgtagctttgtagtatgttttgaagtcaggtagtatgatgcctccaactttgttctttttttttttttttttctggagacggagttttgctctgttgcccaggctggagtgcaatggcaggatctcagctcactgcaacctctgcctcccaggctcaagcaattctcctgtctcagcctcctgattagctgggattacaggtgcccaccaccacacccagctaatgtttgtatttttagtagagatagcgttttgtcatgttggccaagctggtcttgaactcttgacctcagatgatccgcccacctctgcctcccaaagtgctgggattacaggtgtgagccaccacacctggcctcagctttgttcattttcctcaggattgctttggctattctggatcttttggggttctataaaaactttaggggccaggcacaagtggctcacacttgtaatcccagcattttgggaaacctaggctggaggattgcttgagcccaggagttcaagaccaacttgggcaatatggctaaaacctgtctctacaaaaaatacaaaaattaatcaagtgttgtggtcatgcacctgtagtcccagctactcagggggctgcagctagaggatcatttgaacccgggagtttgaggctgcagtaagctgtaattgtgccactgcactccagactgggtgacagagcgagaacctgtctcaaaaaaaaaaaagagagagaaaaatttcaggattttgtgctctatttctgtgaagaatgtcataggtattttgactgggattccattgaatctataaattgctttgggtagaattgtcattttaacaatattaattatttggactcatcagcatggaatatcttcccattttttaatgtcctttttaatttcttttaagaatattttatagttttcctgtatagatttttcacatctctgatttaattgatttctaggtatcttatattctttgtagctattggaaatgggattgctttcttgatttctttttcagattgttcactgttggcatatttaaatgctactgatttttgtgtgtttattttgtatcctgcaattttactaaatgtatcagttctaacagttttttggtggagtctttaggtttttctaagtgtaagatcatattgttggctgggcacaggggcttacgcctgtaatcccagaactttggggggccagggtgggcagatcacttgaggccaggtgttcgagaccagcctggccaacatggtgaaaccctatctctactaaaaatacaaaaaattagctgggaattgtggtgcatccctgtagtcccagctactcaggaggctgaggtgggagaatcacttgaacccaggacacagaggttgcagtgagccaagatcacttttgcaccactgcactgcagcctgggtgacagagtaagaccctgtctcaaaaaaaaaaaaaaaaaaaaaaaaaaaaaaacatattgtctttgaacaaggctaatttgacttcttcctttccaacttagctgccctttatttctttctcttgcctaatgtctctggccaggacttccagtattatgtaaaattaaagtggcaaaagtgggcatccttgcctgttccagatggatgaatggataaagaaaatgtggtatatatacacaatggaatattattctgccataaaaaaagaatgaaatcttatcatttgcagcaacatggaggaaatggaggtccttaagttaaataagtcaagcacagaaagacaaatactgcatgttctcatccatatgtgggagctaaaacagtggattttatgaaaatagagaatagattggtaattaccaggggccaggaaggggtggggggtgaagagagattgattaatgggtacaaatatacagttagaagggttaagacctcatgttcaatatagatcagtagggtgactagttcacaataatctactgaacatttcaaaatagctagaagaggccggacaagatggctcaagcctataatcccagcactttgggagcccaaggtgggtggatcacctgaggtcaggagttcaagaccagcctggccaacatggtgaaaccctatctctaccaaaaatataaaattagccgggtctggtggcacacacctgtagtcctagctattcgggagctgaggcaggagaatagcttgaacccaggaagcagaggttgcagtgagtcaagatcatgccattgcacttcagcctgggtgaccatctcaaaaaaaaatagctggaagagaataaatgtttctagcatgaagaaaagacaaaaaggtgtggttccaagatggccaaataggaacagctccagtctacagctcccagcatgagcgatgcagaagacgggtgatttctgcatttccaactgaggtactgggttcatctcactggggcttgtcggacagtgggtgcaggacagtggatgcagcccacggagcatgagccaaagcagggcaaggcatcacctcacccgggaagcgcaagggttccgggaattccctttcctagccaaaggaagtggtgacagacggcacctggaaaatcaggtcactccctccctaatactgcgcttttccaacggtcttagcaaacggcgcaccaggagattatatcaaatgcctggcttggagggtcccacgcccacggagcctcgctcattgctagcacagcagtctgagatcgaactgcaaggtggcagcgaggctgggggaggggcgcctgccattgctgaggcttgagtaggtaaacaaagcggccgggaagctcgaactgggtgtagcccaccacagctcaaggaggcctgcctgcctctgtagactccacctctgggggcagggcatagctgaacaaaaggaagcagaagcttctgcagacttaatcgtcgctgtctgacagctttgaagagagtagtggttctcccagcacagagtttgagatctgagagggacagactgcctcctcaagtgagtccctgacccccaagtagcctaactgggaggcacctcccagtaggggctgactgacacctcatacggacaggtacccctctgagacgaagcttccagaggaacgatcagacagcagcatttgccgttctgcaatatttgctgttctgcagcctccactggtgatacctaggttaacagggtccggagtggacctccagcaaattccaacagacctgcagctgagggtcctgactgttagaaggaaaactaacaaacagaaaggacatccacaccaaaaccccatctgtacgtcaccatgatcaaagaccaaaggtagataaaaccacaaagatgggaagaaaccagagcagaaaagctgaaaatcctaaaaatcagagcgcctcttctcctccaaaggaacgcggttcctcgccagcaatggaacaaagctggatggagaaagactttgacaagttgagagaagaaggcttcagacgatcggtaataacaaacttctctgagctaaaggaggatgttcgagcccattgcaaagaaactaaaaaccttgaaaaaaaaattagacaaatggctaactagaataaacagtgtagagaagtccttaaaagacctgatggagcggaaaaccatggcacgagaactatgtgacgcatgtacaagcttcagtagccgatttgatcaagtggaagaaagggtatcagtgattgaagatcaaatgaatgaaatgaagcgaaaagagaagtttagagaaaaaagagtaaaaagaaacgaacaaagcctccaagtaatatgggactatgtgaaaagaccaaatctacgtctgattggtgtacctgaaagtgacagggagaatggaaccaagttggaaaacactcttcaggatattatccaggagaacttccccaacctagcaaggcaggccaacattcaaattcaggaaatacagagaacgccacaaagatactcctcgagaagagcaactccaagacacataattgtcagattcaccaaggttgaaatgaaagaaaaaatgttaagggcagccagagagaaaggtcaggttacctacaaagggtaacccatcagactaacagcggatctctcggcagaaactctacaagtcagaagagagtgggggccgatattcaacattcttaaagaaaagaactttcaactcagaatttcatatccagccaaactaagcttcataagtgaaggagaaataaaatcctttacagacaagcaaatgctgagagattttgtcaccaccaggcctgccctacaagagctcctgaaggaagcactaaacatggaaaggaacaaccggtaccagccattgaaaaacatgccaaattgtaaagaccatcgatgctaggaagaaactgcatcaactaacgggcaaaataaccagctaacatcataatgacaggatcaaattcacacataacaatattaaccttaaatgtaaatgggctaaatgctccaattaaaagacacagactggcaaattggatacagagtcaagacccatcagtgtgctgtattcaggagacccatctcatgtgcagagacacacataggctcaaaataaagggatggaggaagatctaccaagcaaatggaaaacaaaaaaaagcaggggttgcaatcctagtctctgataaaacagactttaaaccaacaaagatcagaagagacaaaggccattacatgatggtaaagggatcaattcaacaagaagagctaactatcctgaatatatatgcacccaatacaggagcacccaaattcataaagcaagtccttagagacctacaaagagactcccacacagtaataatggaagactttaacaccccactgtcaacattagacagatcaatgagacagaaagttaacaacgatatccagaaattgaactcagctctgcagcaagtggacctaatagacatctacagaactctccaccccagatcaacagaacatacattcttctcagcaccacatcacacttattccaaaattgaccacatagttagaagtaaagcactcctcggcaaatgtaaaagaacagaaattataacaaacagtcgctcagaccacagtgcaatcaaactagaactcaggattaagaaactcacccaaaccacccaactacacggaaactgcacaagctgctcctgagtgactactgggtacataatgaaatgaaggcagaaataaagatgttctttgaaaccaatgagaacaaagatacaacataccagaatctctgggacacatttaaagcagtgtgtagagggaaatttatagcactaaaggcccacaagagaaagcaggaaagatctaaaattgacaccctaacatcacaattaaaagaactagagaagcaagagcaaacacattcaaaagctagcagaaggcaagaaataactaagatcagagcagaactgaaggagatagagacacaaaaaacccttcaaaaaatcaatgaatccaggagctggttttttgaaaagatcaacaaaattgatagaccgctagcaagactaataaagaagaaaagagagaagaatcaaacagatgcaataaaaaatgataaaggggatatcaccactgatcccacagaaatacaaactaccatcagagtatactgtaaacacctctatgcaaataaactagaaaatctagaagaaatggataaattcctggacacttataccctctcaagactaaaccaggaagaagttgaatccctgaatagaccaataacaggttctgaaattgaggcaataattaagagcctaccaaccaaaaaaagtccaggaccagatggattcacagccgaattctaccagaggtacaaggaggagctggtaccattccttctgaaactattccaatcaatagaaaaagagggaatcctccctaactcattttatgaggccagcatcatcctgataccaaagcctggcagagacacaacaaaaaaagagaattttagaccaatatccctgatccctgatgaacattgatgtgaaaatcctaaataaaatactggcaaactgaatccaggagcacatcaaaaagcttatccaccatgaccaaatgggcttcatccctgggatgcaaggctggttcaacatacacaaatccataaacgtaatccaacatattaacagaaggaaagataaaaaccacatgattatctcaatggatgcagaaaaggccttcaacaaaattcaacagcccttcttgctaaaacaactctcaataaattaggtattgatgggacatatctcaaaataataagagctatttatgacaaactcacagtcaatatcatacgtacgggcagaaactggaagcattccctttgaaaactggcacaaaacagggatgtcctctctcaccactcttactcaacatagtgttggaagttctggccagggcaatcaggcaagagaaagaaagggaattcaattaggaaaagagaaagtcaaattttccctatttgcagatgacatgattgtatatttagaaaaccccattgtctcagcccaaaatctccttaagctgataagcaacatcagcaaagtctcaggatacaaaatcaatgtgcaaaaatcacaagcattcctatacaccaataacagacaaacagagagccaaatcatgagtgaactcccattcacaattgcttcaaagagaataaaatacctaggaatccaaattacaagggatgtgaaggacctcttcaaggagaactaccaaccactgctcaacaaaataaaagaggacacaaacaaatggaagaacattccatgctcatggataggaagaatcaatagcatgaaaatggccatactgcccaaggtaatttatagattcaatgccatccccatcaagctgccaatgactttcttcacagaattggaaaaaactacttgaaagttcatatggaaacaaaaaagagcccacattgccaagtcaatcctaagcaaaaagagcaaacctggaggcatcacgctacctgacttcaaactatactacaagcctacagtaaccaaaacagcatggtactggtaccaaaacagagatatagaccaatggaacagaacagagccctcagaaataataccacacatctataaccatctgatctttgacaaacctgacaaaaacaagaaatggggaaaggattccctatttaataaatggtgctgggaaaactggctagccatattagaaagctggaactggatcccttccttataccttatacaaaaattaattcaagatggattaaagacttaaatgttagtcctaaaaccataaaaaccctagaagaaaacctaggcaataccattcaggacataggcatgggcaaggacttcatgtctaaaacaccaaaagcaatgacaacaaaagccaaagttgacaaatgtgatctaattaaactaaagagcttctgcacagcaaaagaaactaccatcagagtgaacaggcaacctacagaatgggagaaaatttttgcaatctacccatctgacaaagggctaatatccagaatctgtgaagaacttaaacaaatttacaagaaaaaatcaaacaaccccatcaaaaagtgggcaaaggatatgaatagacacttctcaaaagaagacatttatgtagccaacagacatatgaaaaaatgctcatcatcactggccgtcagggaaatgcaaatcaaaaccacaatgagataccatctcacaccagttagaatggcaatcattaaaaagtcaggaaacagcaggtgctggagaggatgtggagaaataggaacacttttaaactgtcggtgggactgtaaactagttcaaccattgtggaagatagtgtggcgattcctcaaggatctagaactagaaatatcatttgacccagtcatcccattactgggtatatacccaaaggattataaatcatgctgctataaagacacatgcacacgtatgtttattgtggcactattcacagtagcaaagacttagaaccaacccaaatgtccatcagtgatagactggatgaagaaaatgtggcacatatacaccgtggaatactatgcagctataaaaaaggatgagttcatgtcctttgtagggacgtggatgaagctggaaaccatcattctgagcaaactgtcgtgaggacagaaaagcaaacaccacatattctcactcataggtgggaattgaacaatgggaacacttggacacaggatggggaacatcacacactggggcctattgtggggtggcgggagtggggagggatagcattaggagatatacctaatgtaaatgacgagttaatgggtgcagcacaccaacatggcacaagtatacatgtgtaacaaacttgcatgttgtgcacatgtaccctagaacttaaagtataacaataataaaagaaaagacaaatatttaggttgatggatataccagttacactgattagaaggtattaaattatcacatgtactctgaaaatatttatatctattatatatcaataaaaataaataaatgttttataaacctgacaatgacaggcattgacaaggctttggagaaattggagcccttgtgtattgttggtaagattgtaaaatggtgtggctactatggaaaacagtatggaagttcctaaaaaaataaaaaatagaactgccatatgacccagcaatcccacctctgggttatatgcaaaagatttgaaagcaaagtctcaaagagacatttgcacacctatgttcatagcagcactattcacaataggcaaaaggtggaagtaccctaaaatgcccatcatcagatgaatggttaaaacaaatgtggtatatacataaaatggaatcgtgttctggcttaaaaaggaaagaaatcctgtcacatactacaacatggatggaccttgaggacgtgatgctaagtgaaataagccaccacaaaaagacagatactgtatgattccacttatttgagacatctaaagtagtcagattcatagaacgaaaaatggtggttgccaagggctcgggaaatgggggaaatattaagaaaatttaggacaattgcctcttaatcctactgttctaacataattgtttttagctcatcatttagaacttttacccaatgtgtatataattttaagcagttgtaattataatacatatataatttggggatctacttttttaacctcatgttatttcataaaagggggagttgtcatttaattggtatgtagttaatagtttagcaagataaaaacatcctggaggtctgtttcacaacaatatgaatatactcaacagtactgaactatacattttaaaatagttaagatgttaaattttacattatgtggtttgtaatcacaatttttttaaaaagcacactacaaacaaaagaacttggcctgcatcatcctcattgcacagctgggaacccacagacactttacccaactcttatattctctctataggactttctgccttatttttcttaaaatgatttctcccttagaacatgttggttctttttttttctttttaaaaatagtttataaaatagacacagaaatttatacaactcatcaatgaattctcgcatagttcaatgaattttcacgaagttaacacacctatgtaaacatcaaccatatcaagaaacagaatattactattaatccagaagcttccatgtgcttcttcccaattacagtactccccctgatccctgaccccactaatcccacaaatagtggcccataagagccactattctggcttctaatacaatagattagttttgccagaacaacttggttctggttatcattttttggtcactcttgtggcaacatcagtgtaaccgttagatgaagcaagggtcagcaaactagtctatggtcgaaatccagcctgctgcctgtttttgtgaataaagtttattggaacacagacacactcatttgttgacatactgtctatggtcacttttgagctatagtcacagtgttgagtagttgcaacaaagactgctgcagctggcccacagagactaaaatactatctggcccattacagaaaaaggtttccaacccctgagattgaattttgtttctagattgatcagctgtcctggaactccccagggaaagatgttagcattcctctgtgtaaaccaagtataaggaagatcactaatcccactggtagttaactattgttctggtgactttagtctacaaattgaggccaaagtttgaagcaacagtagttggggagcctaagctaatgagactgccctcattagctgcccttacctagtgaagagggcagtgcctacctatcttatcttctggtatcacttgctattccgtagagccagttctccatcctcctcctaagctccttattgtatcctggagagtggacagaaatgaagagcacctgatccacaatgacatcattctatttttatgagcttcaaccacgaagtctttgaggggaatatgaccagagagtattagggttggattcgagggtgcataccagtggcagtactgcttacaaatcagccaatattgcattcctttgcaggaactctgtcacactgtttctgaagaagtataactgtgcttctttgccagcagctgcacagacatattttccacattactcaagcttctgctggtggccacctggatgtgacagacagagtcaagcctaaactgaattaaaagttgtcagccatcttaattcatttccaggaagttaaaaattatccacaatatatttcctgataatatgaaaaaccaaggatttttttgccctattttgaatatttccatttagaacataaatagatgagcagtgctgatagtgttcccttaaagtcgtttgtatgtggctgcctattttgtcctatttatgttaacaatgaacttggtgaagctaatgagaaggttattttagggccttggaaaccgcagtaaaggaaaatgacagttcccatagaaccgtacgtagtgtgactgaaatagaaaggtggtgactggcctctctctgtagaagcaggaaaggcaggcaggagagggttgatgataccactttgaagcatttgatttgcttattagtatgtccagtctctttctgtgcaagttttctgactgctgcagagacacagaacaaaaaattccatttcaaaatgactcaaagagataaaggcttctgctaggtcccttctgcatcccctctgtaacacttcagtgtgatgggctttatacctgtcaggggaccactgcagggagaaggaacacattatgggggtgaccatcttatcacacgtaagcaagggcacacagagcaataactgaggctacccggagggtggtaaaggaagaatacttttgttctgaggaaccatgttgagtggcaggacgttacagtgagagccatccagcgcaatttctgtagggatcacagacgtgccagtctgcagcaccctgggtgaggcttcaggtttgatatttaatgtctctgatgaatatgggtcaaggtaaatagattgtttaaaagctctactttcaaacactgagaccccagaggaagcagtgacctggctcttcggcaagtgcctctgtgaaccaccatcttttcttatctaggagagtcctaaatctttgaaagagccagtgttctcccatcacagagtattctatatgcagattattatacagcaggagcactgtttactgatcttatctcactttattttaatgcaactgggaggaagtactggttgttctcccatgctggccaactctctggcacatttcttttggtctctgtgtgtctcaggctctcctgtcactcccatttcccatttctcacatattgtctcagctgttggtgagaactgaagtcaggaaacactctcacaatctgaaagtaagaaattatgcatcacaaataatagtcttgctgcaggatggttgacatttcatttttgtgattaaaatgtatatggcatctgggaccggatgtggtggctcacacctgtaatcccaacactttgggaggccaaggtggaaggatctcttgagcccaggaatttgagaccagcctgagcaacagtcagaccccatctctacaaaaaatttaaaagttaaccaggcgtggttgtgcgtgcttgtagtcctagctacttgggaggctgagatgggaggatcacttgagcccaggaggtcaaggctgcactgagctgtgattgcaccactgcactccaggctgggcacagagtaagcccctgtctcaaaaaacaaaaacaaaaacaaaaaaactatagatccaggccctcatttctttcaataagattgcccagattaatgatttttaattccacatttcctttttgtaatttattttcaattttactatagctcaaatttattttaaaagcaagttaattcagagaaatgaaagatacatttggcaatttttgagttaacataattatattttataatttcctaaaaaacatctccagtgtgtcatatctcagttatttagcaaatgtaatgagtcttttaaatggaataacaaaagcagctgctatttttactttaaaatatcctgtaattaactatctacctatggaaagttatctatgtcaagcaaaagaatgagtctcactatactttactttgtgaataccttaccattgagaaaatgttctatgtgaaaaaaatatatagagagagtagctaaaagttttatgcttataaatttaggttatttgtttataagttggctttgcttgtttaaaattttatgcagtgctcttagaaacatacttttaatttcatagtttttaagagttttcttttattagacaatgaattttctcactgatgtgtggaaatttccaactttgagagctcaggtatttgcgtaattgatgtgcaaaaataactttaaattgctttttgttacatggaaacttagaataaattttcataattcatattaatcatattatatatgtcatacataaatggtttaattcaatttcttagttgtgatgttgagtgtgattcagaatgaattctgaatatttaaggatggttagcgtgcatattccttctttccctcagcaatattgaatttaataagtgaataattgagaagttgcttcattgggctgtagttaaacagatcgctacatccctcttactgccactggcataaagcagttaactctgaatcaccaacctaggaaagaaaaaaaattttcctccaagaaaaatttgtcattaatacacctgtttagaaagtcagttaaacaagatgaagacagggcagatttctccacgctatattattttatcattcctgacctgccttaccagcagcttgatactgaattttttactcatggtcagagcagtaattcctccaattcccctgttaacacagatactcttgcagttcaggaaattaaatcatacactgaaggtgtttgttgtctcataatcataattatgatgattgaccaagctgtggggtctcagaagctctcacacattactgggaactatggagttgccagcattgattggagaagctgctgaaagccaaattccagacactggtgctgcttctctgttttgtttctgtcccacaaacccatatattctcatagagcatttaatgttcctattgctcatcatttcatcatataactgcatggtttatatttcttataatttaaagtatgcagtttaattaattatgtatttctgatctgtcttaatgaagggtaactccaatcagcattatttttacaatgtagttacactgattgtaagccacactgaggttttaatttcaacttgatacttcataattgagaagaaagtatgaatcagaaaagcagagatgattttcagggggttcatattgactttgtgttcgggaggcagtgtagtgtaatgggtgagagcgtgggctttagagtttagcagacttaggctaggtcttgactctgttctttctggctgggtgaccttggggaaattctttatttcctctgacattgaatttctttctctgcaaattggaataataaaatctatctgagagatactgctaggattaaatgggggaaaaatccaagtaaagcatttgacatagtgcgtagcccataataaacacgtaatatgtgttattcttgtcatttttaatgctactattattggtataatttatgtaattatctgatttcttttctcctaattcctgagtgggaaatagttggaaaaggcttgaaaataggtatattagcaaaccctgactattgccttctaatattacataggctagagttgaatttagatgcttgacatgtttggtttctgaaccagattgcagtcacgtcactacagattcattttctctttaaattgtaaaaattaaaacagtagtacagactcatgtttaaaacggcaatctgatccaagattttgtagtctgtagaactgataatgtttaatgttctccataaattcatggcgcttaataggaaagtacacagaatttttagagcttaaacagactttagagatactactctaattcaaacctttcatcaaatgaggaaattctgtaggcaatttgaatgaagaattcagctaagattctttaatctttgtgtaagaagtagatacagctttgcaaaagaaagagctacctaataatgattaaattgttatcattgcttcaaattttcaacttattgttatgaatgactataaaataaattttagagctgccatcaatgtatatactattctgtgtattttctcttaatattattttcctttattattttattttttatatttatttatttatttatttattgagatggagtttcactcctgttgcccaggctggagtgcaatggcacgatcgcagctcaccgcaacctccgcctcccgggttcaagcaattctcctgcctcagcctcctgagtagctgggattacaggcatgtaccaccacgcccggctaattttgtagttttagtagagatggggtttctccatgttggtcaggccggtctcgagctcctgacctcaggtgatctgccctccctggcctcccaaagtgccggtattgtaggcatgagccatcatgccccgcttattatcttttatttttaaattgctacataaggttaccctgtttgaactgcatggtttgcttgctcattcccatgttgttgggcatttgagttttccccactttttcctaatataaatagaactgctatacacacattttttttttaagtagagacagggtcttgctttgttgtccaggctcatcttgaattcctagcctcaagtggtcctcctgcctgggccttccaatgttgggattacaggcatgagccacctcgcctggccgctatgcacatcttttattaggttactcccctgtacttcccccaccccacttaattcctagaggaatattcccacaaattaatcaagatatagtagtattacagtacattctagttactggtaattgggctcaaacacacttcacaagtagcttgatattgtaaactcaaatactagagatttcactaaatataagtcttcttagatggctgctttttgttaggcagaaaatcttttacctgcatggaatgagttacaaagagagttttttttttttaaggtaaaggaagaagagaaagcttgagaagaccctggagaaatttgactcttttataatttctcctgagtctgattttcagagtgtcattttgttttcttacatagtatatcaggcacactccaatttttaaaagtggagatacaccaaaattattgaaaaagaaggaaaatagagatagaaatatttaaaagacaaatatatagtttcagatcaaccataaataggtttctttccattagtgcagaggtgagtatgttttggacttaatatcacataattcttttgttacaaagatccactttcatttctcagaccttaaatacagatgggagtttcagtctttatagcattcctgctgccagatacaattcagccttgatgggaaggaagtcttgtggccagatgggtggagatccacggtacaaggccataaagataaaattggaaagaagaaaattataagggcctcaggacagggttctgtaacaaagatgaacctgattacaggcaactgcttgttctgagagtaggggcttctttaaaattgtgaaggaaatgcatctcttatttttatttttagtttaatttatttttggaatgtatagtaaattcacatggatcaaaattcaaatgaaaattctccttccaactgtggtccccagccactcctttcctctccctagaggcaaccagtattactgattatgtgattatccttctagaagtattttgtaccttctacaagtgtgtgtgtgtgtgtgtgtgtgtgtgtgtgtgtacatgaatatttctatgtaaccatacatgcgtattttcttcttattttaatgagtggttacagaatatagacactgttatataccttgctttttcacctaacaccaaatcttggaaattattctgtattcctagaaagaaagcttttgcacttttaaaatggcatgcgtctacagtaggttaaagtaattcctaatgcgtggattaggcctattacataatagcactcaagaaattgttactgcctgtagcactgcccaagaacacggaaaaaaaaaaagggaaaaaaaaggaacgtgccaggcgcagtagctcacgcctgtaatcccagcactttgggaggtggaggcaggcagatcacttgaggtcaggagtttgagaccagcttggcccacatggtgaaaccctgtctctactaaaaatataaaataaataaataaataaaagacatgtttgttgaataaatgagggagagagtgggttactttattaatttttttttttttttgagacggagtcttgctctatggcccaggctggagtgcaatggcgtgatctcggctcactgcaacctccgcctcccaggttcaagtgattctcctgtctcagcctcctgagtagctgggattacaggcgcctgccaccacacctggctaatttttgtatttttagtagagatggggtttcaccatgttggtcaggctggtcttgaactcctgacctcgtgatccgcccgcctcggcctcccaaagtgctgggattacaggcatgagccatcgtgcccggcccttactttattaatttaaggagcaaataggaagaggcagaaagcgaagaattacctgaagctctgagactattgacctaaccctgaccacaggatgacatcataaaatgcatatttgttttaagagcatcagaaattttctttaaggcttcatcttgggagatgtcagtaggaagagatgccttggaggttgggggaagaatggagttacgggatggcctccagattccaaaagtcaggagacatggccatggattcactgtgatggggctctaggacttggaacaagtggatttaggtcctttcttcaaatgcaaaaagggaggttggagtaaattgttccaatggacccttttagctcttaaattatgttgtttataattttgaaatttcctgtctgatcaccaatttgcatttatgctgaaattgtatttgtaaatacattaaaaataaggtgtcctttcttttatttgtttatttattaatttttgagacagggtctcactctgtctcactgctccaggctctttttttttttttttttttttttgagacaactcactctgttgcccaggctggagtgcaatggcgtgttctctgctcactgcaaatttctcctcccgggttcaagcatttctcctgcctcagcctcctgaggagccgcgattacaggtgtctgccaccacacccagctaatttttatttttttagtagagatggagtttcaacatgttggccaggctggtcttgaactccttacctcaagtgtccatctgcctcatcctcccaaagtgctgggattacaggtatgagccaccgtgcccagccctcattctttttttttttttttgagacagagtttcactcttgttgcccaggctggagcacaatggtgcaatctcacctcactgcaacctccacctcccaggttcaagcaattctcctgcctcagcctcctgagtagctggaattacaggcacctgccaccacctccggctaactttttgtatttttagtagagatggggtttcactatgttggccaggctggtctcgaactcctgacctcgtgatccacccgcttcagcctcccaaagtgctgggattacaggcatgagccaccgcgcctggacctttctttaagataataaaaaaccacacagcttattggtaacaatgtgattgttaagataaaattagaaagttgtttgcagtgattatatttctcacaaaaattggctaaactattaagataaaagcagattcacaggggtaggactaaatatcccacattttgacacattttgagagaattaaagctctgtagtttcaaccttttatcagatagattaaaatattataatattaaagttattcatttgtaaatataattgttataaatgataatgtatatgtttaacaattatcaagacagtagctaatagtaaatataattcgtagtaaaataaatctttctttttcctctttattttagttaagtatgagagagaagctagtaaatactgggacacattttacaagattcataagaataagtttttcaaggatcgtaattggctgttgagggaatttcctgaaattcttccagttgatcaaaaacctgaagagaaggcgagagaatcatcatgggatcatgtaaaaactagtgctacaaatcgtttctcaagaatgcactgtcctactgtgcctgatgaaaaaaatcattatgagaaaagttctggttcttcagaaggtcaaagcaaaacagaatctgatttttccaacctagactctgaaaaacacaaaaaaggacctatggagactggattgtttcctggtagcaatgccactttcaggatactagaggtattgtgctcaagggacaaaaatgggaggtgacaaataatttgaaaatgtacattctgtattattttattaaaaatccagattttttttggtggaaaactatcaaatgtaaataagcattcagtgtacttctgtgcataaataatatttaagggactcatgtctttaatcagtcaagttttaagtttgtggtttaaatctggttttgctggtttttaaaaaaaaaaaaattgtctgttttcattttaatctgagggcagttttaagtaccaatgaagctttggccttaatttttactctctttgttattacccctttttagatgaaatagaaataagtgagatatataatttgctataatctggtgtagaccttggttttctatttttaaaactaaaccctgtctttcttattttaaaggcaatgtatattgattatagaaaatttgctaacaaggagataatttatcaccaatcctacaaacaaaggatttcaccactgttaacattttagtgacctttttcttcttttttttttttttttgagacagacttttgttcttgttgcccgggctagagtatagtggcgccatctcagctcactgcagcttctgcctcccgggttcaagcaattctcctgcctcagtctcctgagtagctgggattacaggcgcctgccaccacacccagctaatttttttgtatttttagtagagacagggtttcgccacgttggccaggctggttttgaactcctggcctcaggtgatccgcccgcctcagcctcctaaagtgctgggattacaggcatgagccactgtgcctggctgacctttttcttcttttattactgtacatgtattctaagttttgtttgtttctatttaacatggcatcataagcagttttcactatctttaaaaattctctgtaaatattttgatggctacaaaatattttactatgtggagtactataattttacttatctattttcacactactgggcattttaattgttttcagattttctgaagcaaacattttgggtatagcctttacctgcattttcttttattgttttaggttagattttctagttcataatttatgaagatttttaatacttttaaaacatattgcccacttgctttctaagaagttgtactaataccattccatgacagtgtatgtctgtttcatcacaccctcattgattgaagtattattttaatgttttccactttgttagacaaaaattgtaccttgttttaatatgcgtttctttgatgactaagtaggtcacatacttcaaatgtttagaatcatttgtacttcttttttgttctgtccatttattttctctgcttatctgtttttttttttttcctaatgagccttgccctttatcatattcattgcagttttcttcacagcgtattggttatttttaaatttggtttattttgggttttggtgtgtaaaaaatttaaatgtttccatagtcagatttcttagtgtttattcctgtgatttatttcattgcttttgagtttagaaaattatcctgtgcccagagatccagtaagtctaattgtttttttctttaataggagatctgacattggtgacaaaaatttaaccttgctttttttgatatttgcttgttcttttgattttaggttggttgtggagctggaaatagtgtgtttccaattttgaacactttggagtgagttttaagagttttctttctacagaattttacatatttatggaatgttgagaaattctgggaaaatattgtcacgtgtatgccagtagtgtttctaattcttatatgaacaatggctcaagcaaatttcaaaagaaatgtcttaatctcaatgtctactttcatgtgaactgggaattactctgaaaatagtgtttcgtagccatgggttgtccatcattgttttgaagtaattttttaagcttatgtgtatatggatgagagaataagaaaagaggaagcagactgggcatggtggctcatgcctttaatcacagcactttgggtggctgaggcgggtggatcgcttgaggtcaggagttcaagaccagcctgaccaacatggtgaaacaccacctctactaaaaatacaaaattagccaggcatggtggcgcatgcctgtaatcccagctacttgggaagctgaggcaggagaatctgcttgaaccaggaggcagagtttgcagtgacccgactgcgccattgcactccagtctaggcaacaagtgcaaaactcagtctcaaaaaaaaaaaaaaaaaaaaaaagaggaagtgatttcatccttccactgagctgtgaactgctaaacttcagagattatttactctccctagatacttagatgtcattttacacatagacaattgaatgtaaagcttacaacttaagcctcattttgtcatcccttctgaagcaacaccctatgtaagatgtttgcatgccaaatcattgtgtctaggcttaaaattgtttggaggtagcagcaactaatcctaagactcaaaaaagccgatcctggctaacacggtgaaacctcgtctctactaaaaatacaaaaaattagccaggcgtggtggcgggcgcctgtagtcccagctactcgggaggctgaggcaggagaatggcgtgaacccgggaggccgagcttgcagtgagccgagatctcgctactgcattccagcctgggcgacagagtgagactccgtctaaaaaaaaaaaaaaaaaaaaaagcagtcgggcgtggtggctcatgcctgtaatcccagcactttgggaggccaaggcgggcaaatcacgagatcaggagttcgagaccagcctggccaacatagtgaaaccccatctctactaaaaatacaaaaaattagctgggtgtggtggcgggcgcctgtaatcccagctactcgggaggccgagacaggagaattgcttgaacccaggaggtggaggttgcagtgagctgagatgcgccactgcactccagcccaggcaacagtgcgaaactttgtctcaaaaaaaaaaaaagcagagtttgactacagggacagagatttgctccaggctcacccttcctgttcaccatttcacctgtgtcttttactttttccatgatgaacacacaaaactcttcaaacaccttttatctatggccaatctgccaagctctattcttttttaagtttacacattttttttaagttcacattatttttccattataaaatcagcattagcacgttgcagaacatttccattagaggaaaaggagagggagggaatcactcatcatcctaacatagccactgacaaaatttttgttttaattcctttcagtctttatgcatatttttaaatgatgtgatcttttaaactttttattattaaaatgtaaaagcatctggggcctggtgcggtggctcacacctgtaatcccagcactttgggaggacgaggcaggcagatcacttgaggtcaggagtttgagaccagcctggccaacatggtgaaaccctgtctctactaaaaatacaaaaattagctgagtgtggtggtgcacaattgtaatcctagctactcgggaggctgaggcaggagaattgcttgaacccaggaggtggaggttgcagtgagctgagatcgcactactgcactccagcctgggtgacagagcaagagactctgtctcaaaaaaaatttttttaattaaaaaacattcagaaaagcaaagagtacagtgaatttccatatgcctaacacctcaattcaacaattaccaatataatgccaacatcatgatactttatccttgattattcaggatatatctcccaaaactcagtatactctctaatattattataaacctaacataatgaatagtgagtagtttcctactatcatttaataaccagttaatgtggccaggcctgggtgatgctggtaaatttacagttctgaatgtcctttctgtttgtgtctttgttagttttgttttcctttttctagtttctgggctgaaatttcaaacttgcttatgtcacatagccatattcctttaccccagtggtctctgagcttataatacacgtaaatacactacattggcagttgattgtgtgttactttatgactgatctcaaggtattatttagcatgtcatttatttatgccttgtctctccgaccactttttatattccttaaggtagagggcatattttatcctaatctgatttcccaggttgcctaacagtacagcttagttggagctcaatacatattgcctgattaatatctctcattcccccacttgctagttgtatttttcacctctgcttctcccttcagcttataattgcaagctcttggttcctcactccctaactctttcttcttagctctgtctttctttgcctcatacctatgttttagaaattactgtagctcaataacctcagataattaattcatcttttaaaggcaaccagtgattagccttccaaaggaattattagactttttttttctgcttaagaaattatgttttactacttttagagagtgtaggattaatgttttacattttcagaatattttaccataattagacctctgaaatggagaggtcatatcattctccaaggatcatttaattcatagacccctgccaagagagtgcttggtggtgtggtggtagtagtgatatttacacctgtttgctgggagaagagccaaggtagtcagctgattttacagaaaggttctggaaagtcactgggtggtcacaagacatcaccttgggctgctgatacagtgggaattccatcttagaggtcatgctgccaccgtggcaggacacatggcatatggcacatgctttcctttagctcgtagactgttctatatcttatgggtatgtggtaactactgcccaaaggtagactgcagaccttttataatgagctagacataccagtgtccagaaaagcattttgaactatatggaagttttttggtttttgttttgttttgttttgttttgttttgttttagaggactatgttagtttttaagctcctggaaggcaaaaacaatctcctttaataataatagtgatgataataatagcaacaacaattataataatgactaacatttattgagtgcttactctgaatcaggcacctttctggaaactttagctataagaatccattcacttcaaacaaccatcttagatgccatgtttatctctttttttaaagatgagggaattgaattaaagaagagattaagcaactagcccaaggtcatgcaactatgtagtaaagctgagactcaaaccttaggcagtcttgttccaaagcccctgcccttaaccattagccacatagtgctgagtgtttactgagaacatttcaaatacatttcaaacacccagcaaattacaagtcacaattatatggatttaatcagaaaaaaacaggggaacatgctgaagtaaagtgctatttttatgtttgacagatgagaaaagaccaagcagtatgagttttaactttgattcagtactggttagcttttcataacaaaatcctattaatcatactttaacttatttggatagatcttaaattgaatgcaaatccctagtgccatagaatgagtgaattatatgttatcatagttattcatcaatgagttgcctttaagaatataatctgaggccaggtgcggtggctcactcctgtaatcccagcactttgggagtccaaggtgggtggatcacctgaggtcaggagttcaagaccagccttaccaacatggtgaaaccctgtctctactaaaaatacaaaattagccggccgtggtagcacatgcctgtaatcccagctacttgggaggctgaggcaggagaattgcttgaacccaggaggcggagactgcagtgagccgagattgcaccattgcactccagcctgggcaacaagagcgaaactctggggtctcaaaaaaaaaaaagaaaagaaaaaaaaagagtataacctgcacctgggtcagattttgctaaatgcatatttgggcttgtattccatatttatttagaggttcaccttgcttggaatgcttcttgagtcagattagaagtcttaatgatatgcttcaaggcccacctttttatcctgccatataccagtttgggctctcaggattagtgctacttctcatccctggcatgtgactcccacttctaaactcttcaaccatttccccttctcctcacttaacaatacatcctcctccttcagaaattttaagacttatacctcagggtgctgaccctcttgacacccctgtagaagttgtataaaaccaattatgtccccaactagactataaaacccatgagagccaggaccatccttactgtttaatgacatgctgacctctttctgtagttcagacatggtactaagcaacatgatgcaaggattatttgataccagcatacacagtataatcaagaggagtattagtctacaaatttcagagtatatggctgccttaagtaaccatggtccagccatcattactgaatttcagataaaggccaaacagaacatatttaagttaagaagagtccaattaaaaatcataccacctattggccaggcacagtggcatacatctgtatgtagttccagctactcgggagattgaggcgggagaatcacttgagccccagaggtcgaggctgtagtgacccgtgattgtgccactatactccagcctgggtgacagagcgagaccctgtctcaaaaaaaaagctgaggggcgggggtggaaataacttattaacaagtcagacctacagtttcctttcttctctagtttgagtatttctagactccagatataaatatttcttctggccgagcacagtggctcacacctataatcctgacagtttgagaggctgaggcaggaggatcatttgagaacaatagttcaagaccagcctgggcaacatagtgagaccccatctctacaaaaaaatctaaaattagctgggcatggtgaggcacatctgtagtcctagctactcagaaggctgaggaagcaagatcgctagagtccaggagctcaaggttatagtgagctatggtcacgttactacactccaacctgggcaacagcgcaagaccctgtctccaaaaaaataaataaatatttcttccatcttcataggaactctccggagtcctttctgtattgttgtgattttgcttctggagctgtggagctcgtaaaggtatgctactcctgggaatcataccaactgatgcctaaggtattaccccagaacaataaaagttgttttgattttaagatcactagaggcagggcgtggtggctcacacctgtaatcccagcactttgggaggccaaggtgggtggatcacctggggtcaggagtttgagaccagcctggccaacatggtgaaaccctgtctctactaaaaataaaaaaattagctggctgtggtagcacgtgcctgtagttccagctatttgggaggctgaggcacgagaatcgcttgtacctgggaggtggaggttgcggtgtgccaagatcgtgccacagcactccagcctgggtgacagagcagactgtctcaaaaaaaaaaaaagatgaaaggccaacagcgccaggcatggtggctcacgcctgtaatcccagcactttgggaggccgaggcaggcggatcacaaggtcaggagatcgagaccatcttggccaacatggtgaaaccccgtctctactaaaaatacaaaaattagctgggcatggtggtgggtgcctgtaatcccagctacttgggaggctgaggcaggagaatggcttgaacccaggaggcggaggttgcagtgagccaagattgcgccactgcactccatgctggtgacagagcaagactgtgtctcaaaaagaaagaaagaaaggccaacaacacacaagaaatgaccagaaagggtactgacctacaaaatttagaatgtatgcctgcccatgaataatcgtagtccaaacagaacctctttaagttcagaaacagcaacccagagcaggcctctaacaacactgtctactaactcagaaagcctaccctcctctacttttaaagttaaagagggattgcgaaggatatttgttatcaaggccaagagctagccttaatttttttagggcagcttgaaataagctaacaatactgaattggaaaaaagtgttcagactgacagaggaaaggcttttgggagaaaaggttaaaaatttgacctttttatttaaaaaaaaaaaaatcccggaagtctactaagtcctctttttgctttctgttcctttatcatgacagtcacactcgtcctacagagcaacccagtgttttgcctttgttcatgatgtatgtgatgatggcttaccttacccttttccagatgggatcctggatgtcattctccttgtctttgtgctctcttctattcatcctgacaggtaaatgaagacgaaagggcaaagtggatgtgtaaagctcctttatcagtagtggttttcagaactatcaaagcaaaaatgacaatttttgaatttattatttagtgagcaacattatgtataatacacagccttttaaaggcagtttttcctttcttcgtacttttagacagaaactggtcagactacttcattaatgagctttctgtcactgtcagaatgaagtgagcatattctggcaagacacatacctattaaaagtgacagtgcttcaaggaaattacaaattcagaacaacctaatagactcccaagagggaaattgtacttggtgatcagaaacaaacatctttagtgtagtgtcttcctgaatgttcatgaagaggtgggcttgggatctgtttggcttcacacaggcctgttgatgggctttaaaaattttgttctaaagaagcacactagggaatcaggagttattaagatttgccagattatccttggacctttatgatctaaggttagcctgatgccatcatttaaatatttatgacttagtttcatacagtgttttaaaactataaacatagcttttctccagagagaaaacataaagagatattaccagcaattagaatgattacctttcttaaatcttgccatcttctatgtattaaagggtacatatggtaagtaccaggtctgtgctttcataaggtttcttaaaattgggttctcacagttccctggtggaagatacagacttggcgtcaaccactttttgtttgatgagtgtgacccttttccatagaaactgagttaccatgtgcttatttctttgcaattaaaaggccactaggaccctttacagttcttttacttcccattcagaaatgagcactttgattacttgtagaagaacaaattccatttccaaataaatctgaaataagatactttagcacctagtgaggtatgtcaggttttatgaagctactgtttcctcccagtttctataacctatttctttctgctaatctgtttagactgtaggcattgttcaggtactaatagaaagttgtcatctatgtgtttggtttccttatatgaacagttaaaaggatggagaggtggatagagaacaagattccccattgacacccataacaagaaacatctaaattctacatataaccacaaaaagactatttgaaattagttcagataatgtattttctcatgatttgaattgaatgttatagagaagagaaaggccaggtgcagtggttcacacctgtaatcccagcactttgggaagccgaggtgggtggatcacctgaggtcaggagttccagaccagcctggtcaacatggtgaaacctcgtttctactgtgaaacctctgcctcctgtagccaggcatggtggtgggcgcctataatcccagctccttgggaggctgaggcaggagagtcgtttgaactcaggaggcagaggttgcagtgtgccgagattgcaccactgcactccagcctgggcgacaaagcaagaccttgtctcaaaaaaaaaataaaaggctgggcgctgtggctcacgcctataatcccagcactttgggatgccaaggcgggtggatcacctgaggtcaggagttcaagaccagcctggccaacatggtgaaaccccatctctaccaaaaatacaaaatcacctgactgtggtggcacacacctgtagtcccagctacttgggaggctgagacaggagaattgcttaaaactggaaggcagaggctgcagtgtgtggagatcatgccactgcactccagcctgggcaagacagagactccgtctcaaaaaaataaataaatgataaaaatacaaaaattagctgggcgtggtactgcatgcctgtaatcccagctactctggaggctgaggcaggagaatcactggaacccaggagacggaggttgcagtgacccaagatcacgccactgtactctagcctgggtgacagtgagtaagaccctgtctcaaaaaaagaaaaaactaaaaccaaggcaatgtctatagtgtcacttaggactatagtagtagattcaaccccagaaaagttctagaaaagtagcatcttggtagcttggaaaattcaggcataagcaaatggcaagcaatttggctagaccttgagtctggaggacccagcttaaatgggaataaattgtaggtggctacaaaagaagagcgaattgtccttcttgtcactgaaatgaaaatacaaaatattacagagccaagcataaagcaggcagtcaatacattttttatctcttccttctcctctccctctatccagagataagtgaagacagcagagttggcccaagtaggatgaagaaagaaaaggggcttcataccattcctgtcttgtccatctcacccccagcccactcccacctgcagttctcaggaattggctcgggaactgcactatgaaccaagatgagatgagcaagaaaagtagctcccgttccttgcctttatcctcaaccccagacattaaaggatagctgagaggaaagaatttgcaggaggaggtggctacattttaaagtgttcgattgtttatttttctgcattttagtttcatacttgttttactaataattacagaaagattttgctatgtacgtaaaatatttatattgaaagtgaatattttaaggtttagatatgattttctttcattcgcaaagcctatgatataagcacagtatgaaaataacctgtaataaaataaacaaaaaatacgtttcttttttcttttatgtccttatgtgctagtttttttaaaaggacttttcacctaatcatgccacctccttttgtcctacttctttcttgttttatagttgctttcattttctcagtatctgcttccttcataacatgacataatctgagttttaccttactattccactgaacagtgttttaattgaaaggaatttacagattatctgattcaaacttttcatttttttcaaataagaaaacctcagcagctttaagtagcttagataaggcagagacaaggacttagcacacaagctgccatttaccattctctgcccatggcagacattgataatcgattttgtactcggtaactcgcaatgagctttatgagtccttctcagagctctgtaggcagccgatgctgtcactcagaattaatatgagatctgaaatctatgccatccctggcccataatcacacataaagccatgaacacttagccaaaaacactaaatcaagagcagctataagggattgtatttgactggaagccaaataagtagaataaacagtaaaggagaaaagcaaaggctccctgctgttgaactagggcttggaatgtgaataaaatttaaataggcagacagtaaggaggagagaattctttgaggaaaaaccatgtgagcaaaggcagaggctgctcagggccaagcatgacagtttggctaggggagctgcttcagattggaaagctgttggtaagattaattggggtcagtagtaggagatcttaagagctcaactaagaaattgaaattttatcctatggattaaaatcatgaaagtttttgagcaaggagatgatttgacaaaattatcattttaagcagaattattcatcgataacatgcaggaaggattgacagggagaataatacagcgtgttaggaagcagatttgtttccaggcctaaggagataggggttggtactaagggagtacaaatgggaaacaaaaaagacaggaaatatcaaagatgtcattaaaaataaaaattaaagaggacatagaattttatggccacatggagaggacagtggaagaaaaataatttctctttcatgaggtaaatggtggtacctctgaactaaataaagaaaaggagaatgagctcgttttggaggaaagatattccctctttagatatgtacaacttgggatggctttggcatattttttatcttgcaaggaaaatgaagcacactccattgttgtctatctcagaactaccttaattttctgtaagtaccaggagacatctgtggttttgaagtttagctttgacatcatacgtcaagctctgtgaagttaccactctgatcatttgggtgatttcttgatactctaggacttttgaatctagtcatttagcaagttggttttggttttttcttctttacaaaatatttttatttttgttacccttatgtttatggtttagatttctttggccttatcaagcttttcttattttgtcttcaacaaagttaaatccagcatataaaacaagatttctacaaactgggtatctttttaatactttgtttccaaaggatgcaaggtgttgtaaaccgactgtccaagttactgaaacctgggggaatgctgttatttcgagactatggaagatatgataagactcagcttcgttttaaaaagggtaatagtatattcagtttgaggttatttttaaatgttctaaagaatgccttgtttatatttcacatcaaagtatttagttgtttttttttaaaggaatacccttaagagtttctcttttcacaatttttttcaggacattgtttatctgaaaatttttatgttcgaggagatggtaccagagcatatttctttacaaaaggtatgctaatctacaaaaggaaataattggtcataatcgttcttgttagttattatctcattgattatagctcagaagctatgaaactgaggcttcagtcattgattaagcattagatgtcttcatactttgatgcttattactggtctacataaaaggttgaaaatggccgtttactgtttaatctttttccagttaaaactgctttaaagtctcttgttttaccctcatacccagatgaaggtgaaggctgttccattttggagatattgttagcctagatatgaaaaaaattgatgatagccacagccaaaggaggacatttgataagtttatagaaaattacttatcttggcctgtcacaggggtgctcacctgtaatcccatcactttgggagatgaaggtgagaagattgcttgaagccaggaatttgagaccagcctagaaaacaaaatgagactctgtctctacaaaacaatttttttttaattagctggtctggtggtgcatacctgtagtcctagctacttgggaggctaaggtggaaggatcacttgagctggggcagatgaggctacagtgagctatgattggaccactgtgctccagcctgggcagcagagtgaatcttatgtctaaaaaaacaatacattttcaaaatagaaagaaggaaaattacttatctctagctgatttctcttttttttttttttttttttttgagacagagtctcactctgttgcctaggctggagtgcagtggcacaatctcagctcactgccatctccacctcgccggttcaaacgattctcccacctcagcctcccaagtagctgggattacagcctcccaagtagctgagattacctacctccacgcctaggtaatttttgtatttttattagagaaggggtttcaccatttgaccaggctggtctcaaactcctgacctcaagtgattcaccctggccaggctggtcttgaactcctgacctcaggtgatttgcctgcttcagcctccaaaagtgctgggattacaggcgtgagccaccatgcccaaccaatttcacatttttaaaaatgcatttctaacagtaccaagtgaatgctgcattcaaggatttccccacatttatgtgagtacttttataatctgccgttttgggtttctgtaaaccaacaaaaactcagaaagggagcacctttcaaaatattgaaagctgcaaccaatagttttatatatctgttgatgtctgccgtgttagtctgtaaacaggtgtatttttatatgcatggtgtatttttgtgaaatagaagaaactcgcttggtttcacaggtttccttcaccaaattgttctagagagtgtttcttgtataaatgaaatttagatggtcagttattccatcagtgttctactcctgacctcccccatctctagtcacatgtcatatcttttattgccatttttgtctcacaggggaagtccacagtatgttctgcaaagccagtttagatgaaaagcaaaatctggttgatcgccgcttacaagttaataggaaaaaacaagtgaaaatgcaccgagtgtggattcaaggcaaattccagaaaccattgcaccagactcagaatagctccaatatggtatctacactcctttcacaagactgaactttgtaacatgttaaggtacaaagccagaggactgtgctattcaaggactactgtaagtctattgtttctcaaaagacaatgagaaaaaaagaagagaatttgtatttcctgccgttttgtcataggtgagctcctttgtgcattttaagcacatgtaagtggttcagcacagtatgcctttttctgtgctttgaaaacttgatatgctcaagcttgtttgaatttattacatctaaccattttgcttgttccttgatttttataagcattcaattaagttagtattatgtcaagtaattttgagaaaatgtaacttgacattttttgcaagtaaaaaaaattgtttatttgtttaggcttagtaaaccagttcccaaacacagtcagactcttcccattgtcatctgattgcagagagaaagcacaccttatttccagggaaagctacaacaagcccaaggtcaaagtgtattattttttgtcttgttgttgtctattttctcccaatttttttttgaaattcagaggctcatatctgaaatagaattttagttcctctttcctttcctaaaattggggaagtacagcccatgctgacattattttcaggctattcttagatatacaagttgttaggccaggtgcaatggctcgcacctgtaatcccagcactttggggggctgaggcaggcagatcgcttgagctcaggagttcaagaccagcctggacaacatggcaaaaccctgtctctcccaagaatacaaaaattagccaggcatggtggcacacacctgtggtcccagctactcaggagactgaggtgggaggatcgcttgagcctcggaggcggaggttgcagtgagctgagattgtaccactgcgctccaaactgggtgacatggtgagaccttgtctccaaaaaaaaaaaaaaaaaaaaaaaaaggtatgtaagctgacaagctcttgtatcaagggcttttgaaccagagcaacttcatcttgaatagggactgtgtaaaatgaagctgagacctactaggctgcaatcccaggaggttaagacattcttagtcacaggatgagataggaagtcagtacaagatacaggtcatacagaccttgctgataaaacaggttgcagtgaagaagccggccaaatgccaccaaaaccaagatggcaatgagagtgtcctctggctgtcctcactgctacactcccaccagtgccatgatagtttacaaatgccatggcaacatcaggaagttacccatatggtctacaaaggggaggcctgaataatccaccccttgtgtagcatataatcaagaaataaccttaaaaatgggcaaccagtagcccttggggctgctctgcctatggagtagccattctttatgttttactttttttttttttttttttgagatggagtcttgctctggcacccaggctggagtgcagtggcgtgatctcagctcactgccagctccacctcccgggttcacgccattctcttgcttcagcctcctgagtagctgggactacaagcacccaccaccatgcccagctaattttttttttttttgtatttttagtagagacggggtttcaccatgttagccaggatggtctcaatctcctgaccttgtgatccgcccgcctcggcctcccaaagtgctgggattacaggtgtgagccaccgcgcccagcctattctttacttaaacttgttttcactttgctgtatggactcaattctttcttgcacaagatccaagaatcctctcttggcgtctggatccagaccctttctggtatcagtggtaagctctgtttaagacaactgtcatacccaagagaattcttaaattgtggcagttaaaaatgtatttatcccctcgagggccgggcgcagtcgctcaagcccgtaatcccagcactttgggaggccgaggaggcggatcatgaggtcaggagttcaagaccagcctgaccaacactgtgaaaccctgtctctactaaaaatacaaaaaaaattagccaggcgtggtggtgggcacctgtaatcccagctactcgggaggctgaggcaggagaatcacttgaacccgggaggcagaggttgcagtgagccgagatgacaccactgccctccagcctgggtgacagttgttagactgcgtatcaaaaaaaaaaaaaaaaatttatttactcccttgcttcaaaaaggacataagttggcttgcaaatcacattttgtagaaatgaagtttttaagattagtctcatactcattacataatatttattgactacttacatattgagtgctaaattcagtggaataatatgaacaataaagacccagccttgtttatgctcttcagggagcataaatagagtacagctggcaaaacaaaatgtgcatatcccaaacctgtaaatcatgatctaagacaatatacaaacactcaaatagggaacttaccagctagcagactttgattatgaaccacagaacctagaataaataaatactctcttgaaagaaccatcattggaataattaagttccaactgttttttctttctgaattcacttaaaatccaatttctagaagaatatcattggtccagctttagtcattggttcatctcttaacaggctggggcagggcagcttaattgatgatgccaccagaatgggcaacatgggaaaaaccctatctctaccaaaaatacaaaaattagccagtgatggtggcacgcacctgttgtcccagctactcaggaggctgagctgggaggatcttttgagcctgggaggcagaggttgcagtgagctgagatcgcaccactgcactccaacctggagtggaaggaaatttcacttcctggaatggaagaaagttcttcaaaggaaaatcaagacactgctgtcaaaaaacaccaggggagggatgctgtccagtcacagccaacacatcatatagcagtggtagcagtagtaatagtatttccagagagagagagagagattagctctgaaaaagaatggagaagaatcaggtttcttgggggaggtaggtctcaggctagttcttgaatgtacattctcagcagatggtgagaagacaagtgtggtgtgggacattaatgatgagggataggtagaaaagatgggaagggggtcagcttgtagataacctagactagcaggtgtatgacttctagtctctgaactggagccatctgagatcagtttgagatatggtgtcttataaatgtattgagagaggttgaggagttgtctatagaatggaatggagtgaggtcagagatcagtggcaaggaagaccacataaaggtttttgcacaaacttgccttgatggcaagtcctcaaaagtacaattatcaagctttctgtttaaacatgcataagtcagtaaatataaacattaaaatttgcccaagactcttaactcagttgtatttcataattaaagtgtacattaaaaagccaaactagtcatgaaagtattacatacagcaagggcagtttagataagttaatgttgctatgggaaccccagcagatctccttgtgtctccgtttaaaaatcatggcccaaggtggtttcaaaaacaacagaaggtaaaattattctcacattctcacacatgtaaattgtactgtctctctcagttctaaatagcggattcaagccagcctcttgactggcacagtaaaattcggcttcgtgtctttctataatgtattacagcatgtgagttaacctttagaagcttcaaaaatacatcaaccaaatttggactgtgagacacaaactggtctcttttgggctctgtccagcatagccttcctattccacatggctgcgcagcagggccatttccaccagtgtcttctgcttgcctggtcagtctttctgtctcttaacctacctacaacaacttccttctcggggtttgctgctagatagaaatgtagattttggcacagaaagaaaagggaaagacctatttggaattttgtctatagatgttaagaaatcatgaagcgttgcaaatgtaactgcttgggtattagtttaaaatatttgataactgcatgaaattctaatttacccctcacatccataaagctaggaccagttggttaggcagagtttgatatttaaaaattcatcttctgagagagctgaatttcaaaaggaccattttctttccaggagtaaaaggtatattctttcatcttcttacagtacagaaacaatggaatatattgtttaaatgcacccttcatttttttctccatttctaaaaattcacttttgagcatcgtccaaatgtaaaaattctcacacatgaggaactgtttccgaaggttgtgagaaagtcaagataacagtttctattattaaaagttttgcattcggtatgacacatttgcctgtattgaaacacccatttaacattgacttctgagaacttatttgctttgcctctctcgattccatatgctttgtctacaaattgtgaacacgtcccggtttctacccgtgtgtgattctaagtcgttgctgtactctagcttgtacgtgaaaattcacccatatgcagatagctgccctcttggaggcaaaacttaaagctatcagaaccatctggattgttaaaccccaaaacttccaactcatcaaagtcctgaagcctgaatagatcacacattgttacttctaattggttttgatgtttgttatgctcctcacaagtgcagataacttcacatttgcatcactaatcgacctctttcaaagcctctgctcctcctgcttcctgcctctgttagtcatcaggagacttagtgttggcgtgggtattttccccgcttgtgaaagtgcattgtcaattctagagcattaaatatatgtgaggtattgttattaatctacaaggcagtacacacagtattccagcaacagtgactttttcaaaggttttatgagacattgtaagaaagacagtatctttccatggaaaaaagtgttgcctcagagtcaaacaggaagcatgggtcctagttcctattgaactgcttagctactcttaatttagctctgaatgctagattttgtgtatactatacacattatttaatcctcaaactcctaggaattcattttgatgataaccatttacagaagagatgttgggtaacttgctcaggataccacatctagtaagtagcagagtcacaactcggacccagaactctctgattccaaaacctctacttgctgctcttgtaatggatgggcccaaatgctgctgggaaaggcaccagggaagaaagagctttctgagtcaagcagaaaacgatagcagtggagaggagtttgtttcagacgaccttcaaggttatggctcattctagatccaatcattctagcaaataagtaggttacacttgtccacaattacaaattggaaaagaagagaaggaaaggaactgagaggaatgacaaagcaaaaagctttcaatcagttcttttcagcattctgcttctgcctagttctgcactcgccccaccccctcaggcttcagccttccacttggcatccctcctcgcagagcactctcacttgcatactcctcgcttaaagaaaaaaagcattctgtactgcagtggggaaaaaaaacccttaaaatgtcttcaaaaggattcagctctagggtaatgtaaaatatgtgaaatcaggaggtgtccataataaaatatgagtgaaaacatcgttatttaaaacattgtatgtacattaatgccacattaataccaattcaggcatgaaatgttgagcatttcttggaatacggtttcttggaatatggttggggatttgagaggcgcaaaggtacccgcaagatggctttggtgtagttataaatataaatagaagtaaaataacagttgcatcttcatttataatgaatctatattgtggcctcaaagctacagagaaaagtggatgccaaaatctgtctttcattaacatatgtcttaaatgacaaggaagaggtgttgaagataaaattactttttcctatgagtatgaatcagcaacatgcagtaacaagcaagtaataatagttctgcgtgtgagtgcctacagagggtaagaaaaatagcatcagattgaaaaagcaagtgcacctgcagaagggacccaggaggctgcagagcacagctcccttgagcatcatctcaaagtgtctcagagcacagtgaccctaattctggcaagtcaggttggcatgagatggatggagcacactgaaatctccagatggtcagacagcccaccctcagctgcccctggagctcggcaaaggcaagctacaaggcactgctacttggccaagagtttaaaacaacagcttctgattctacagtgtctgtggtttcacaaccacttaaccttaagtaaggaacagctagagttagctgaatgaataaatacacgttaacgttacataaagagggaaaaaaagcaatacttgagcacatagacttcaaatagtgtccagctagctgtgtccttggcatcccagtgatctgggtctttatctttgattttctccagcaggtaggcactgagtagatccagggcccagggcgggaaatgcttctgtatcagatgttacctatcaaataaaatgagcctttgattgcctcctaaagctccagcatcgtctttcctagttgggctgatgaggtttggtccagaaaaatggaattttgttatgcttataaaaattatttggccaaatattttcaatccattgctcctagttcattgcagaaaacgcagaaattaattttttcctcagttaacctttatatatcaagtgttggttgtttcaaaaaacactggaggacagtcaccctttgggcttttaaggcttttccgctggaagcaagcactaaacctgtgtgacttcctaaaattagcaatgagcccgctgctgagtccactgcattagtggggcttttttgttttttgtttttaatgctctgtacttagcacaagcaacactatgtaattgctgcctcatttctctcaccttctgcctcctgagagcaacttgtgttcctcctgaggcagtcctgctaaacagaatgcttggcgtaaagaatgcgatcgctctccttacatctttagttgtgccctgctccctcaggtgagcagagacatatccccctaagcagcatttggcactcgcactgaaaattgcctgaaagagaatggctgaaattgccagtatcacatgctgcattgaaacaagaaagaaatttctgcctccaaggataattgcttttctcattgctcatactttttctttcgcagccctcatttattttaatatttatatctttactttgactttctacaagatattttttaagtttctttttaatccaaatgaaagatgaaattcaggatcccaaaaagcaaggaagatctatcctttccatgaatatattcttaatccaccactctctgagatgtctcttcatttgcagctttgtttcttaatagaacacctgggctctggagattagtgagacaaagcttcattataatcttccttgttttactcacatttcttccatgctttctctccctaactcactctccaggtgcttctttctcttgccaaatagtgcaaggaaatacttttgcagatcttttgtttactttaggaaaaaaccatggatccaggcttccccattcagcactgctgctcatttcctgactggcctttacagtttggctcagtagcaacttggggacttgttttctacccacaggaaaggagctgggtgcccggcagccccatgccggcatgagaattaagtcctgctcattccctggataagcaagctgacgttttcctcatagattttcttttccatttctcaaagctttattgcatactcatttagctttgacttttaaaaagacattttaatagtgttgtttttcctccaagcatgtgcaaaagctgatcatgtgcacgaggaagctctcgagaataaagaattacctctttgctgtttttcacctactacgtcacacactacacaacacacccagggcttacccctactccagtgtcattggcaagtgcctggcctggtataggaggaactgtgacaccagaggaatttggcttgggttacctcactttctaggttcccaagattcccaagttaaggaagctctggttattacatagttgaacattttcttatttcatgtaagttttgtaaatcttctgtgatttcttctcctctttggcacatttacattaaattttattctagttatgtaactgtatagtataattatgtttatatatggatataaattgctctgttcatcctactttggggaatttattcatagtttgctatgaggtcagtaactttccgaagagacaggctttctaaacttgaagcctatacttttatatattaatgcatttttttttacattagaagatagttaacctaagaaagttgaatgataagtagaatgaaagtagaaagcactgactgacaaaacaaagatcttcagtacatcagggatgagtgttgtctttcttaaggacttaatctgtaatataaaatgtcaaatcaaataccatattcggccaggcgcagtggctcacgcctgtaatctcaacactttgggaggccgaggcgggtggatcacctgaggtcaggagttcgagcccagcatggacaacatggtgaaacccatctctaattgtgcaaggaaattagctgggcatggtggcgtgcacctgtaatcccagctactcaggaggctgaggcaagagaatcgcttgaacccaggaggcagaggttgcagtgagccgaggtcatgccaccacactccagcctgggcaacaagaacgaaactccatctcaaaaaaaaaacaaaacaaaaaaaaaccagaacaacaaataccatattcatggtggtacagacaaagactaagctattggcatagacaaggtccaattgaggaagcacactctgtcactggtgatgaggaatccagagttggtcattcccctaaagctcagtcaggagcagtcacctgcagggaaggctaccagcagaagccagcagcactgtgaccttatggaaagtggacagtgttcacaggcacattaggtaaatactgcttcagtgacccaaagaaaaatgcaaaatcacagaagattgtagcaagagtgacttatgactgaatctcagagaactgaactgtaggcttaactatcccctgcctgagctcagagaaagaacccaagaaagagccctagctgagctttggaaataggaaagctagaggccaggagcttttttctgcttacctgaaacaccatttcaggtgtttttgtagcacagaaatggctactaaaagtattagggtgcagaaaacaatggtccaaatgatggtgcttcagcatgctgagcacactgaactaaaggaaattaaaaggccatcaaagctgcctcagaaccaaggagtcggccaggcggggtggctcatgcctgtaatcccagcactttgggaggcgagttgggcagatcacttgaggtcaggacttcgagaccagcctgaccaacatgtagaaatcccatctctactaaaaatgcaaaattagccaggtgtggtggcgcatgcctgtgatgccagctactcaggaggctgaggcaggagaattgcttgaacccaggaggtagaggttgcagtgagtcgagatcacgccattgcactccagcctgggcaacaagagtgaaactccatctcaaaaaaaaaacaaaaaacaagtactcttggtttctccaccccacatcaagcacaggaaggggttctctgtggaagtttccttatctgactgagtagacttcttccaaaagaaatgctgttggcctaaaaccgcctccctaggaaatctcattcaataaccagggaagattaactaccataagagattaaaagtcacctagcccagaccgacttttcatctgtttttctgagggcagttcgaagaggttacctgggagaccttatccacataataagacaacctttgtttacaatgaagttctgcctcttgccttcctaaaatttgttgccacctctcacagagcacaaaaaactttgtcccggccattatctgttctctggtcccattcagttttcaaagagaatcatttacaaactactctctgctctttgggtccactcagttctcctaaaaatcattcactgcctgtgttagtttgttctcacactgctaataaagacatacccggccagacatggtctgtcacacctacaatcccagcattttgcaaggcagaggcgggcggatcacccgaggtcaggaatttgaacctctacctcccgggttcaagcaattctccagcctcagcctcccgagtagctgggattacaggcacctgccaccatgctcggctaatttttatatttttagtagagacagggtttcaccatgttggccaggctagtctcaaactcctgacctcaggtgatccgcccacctcggcctcccaaagtgttgggattacaggcgtgagccactgcacccggcctgcaagttagttattttcttttttttcttttttttgagatggagtcttgctctgttggccaggctggagtgcaatggcgtgatctcggctcaccacaacctccgcctcccaggttcaagcaattctcctgtctcagcctcccgagtagctgagattacaggcatgcaccaccacacctggctaattttgtattttt

SEQ ID NO: 55 - DNA, 2247 bp, Homo sapiens
gcttctctgtgctgcgagtggctagctgggcagagccctgggggcgcggtgctgccgcctccaggtctccgccccgtgtgtgcgccctgcacttagggatccctccctcactgccccggtactcacaagcttctcggccccgaccttcgccctgggaggttctggccaggtgccgggaggggcgctgtgtcgagggcgatccccccaaagcagcgtcccgtgctaaagaaacagagcctcactctgtcacctaggctggagtgcagtggtgcaattatggctcactgcagtttcaacctcccagattccagtcatcctcctgcctcagccacccaagaagctgggaccacagggatcacatgcagtggtctaaggaagaagaagcagcagccagaaaaaaagtaaaggaaaactcagctgtgcgagtccttctggaagagcaagttaagtatgagagagaagctagtaaatactgggacacattttacaagattcataagaataagtttttcaaggatcgtaattggctgttgagggaatttcctgaaattcttccagttgatcaaaaacctgaagagaaggcgagagaatcatcatgggatcatgtaaaaactagtgctacaaatcgtttctcaagaatgcactgtcctactgtgcctgatgaaaaaaatcattatgagaaaagttctggttcttcagaaggtcaaagcaaaacagaatctgatttttccaacctagactctgaaaaacacaaaaaaggacctatggagactggattgtttcctggtagcaatgccactttcaggatactagaggttggttgtggagctggaaatagtgtgtttccaattttgaacactttggagaactctccggagtcctttctgtattgttgtgattttgcttctggagctgtggagctcgtaaagtcacactcgtcctacagagcaacccagtgttttgcctttgttcatgatgtatgtgatgatggcttaccttacccttttccagatgggatcctggatgtcattctccttgtctttgtgctctcttctattcatcctgacaggacattgtttatctgaaaatttttatgttcgaggagatggtaccagagcatatttctttacaaaaggggaagtccacagtatgttctgcaaagccagtttagatgaaaagcaaaatctggttgatcgccgcttacaagttaataggaaaaaacaagtgaaaatgcaccgagtgtggattcaaggcaaattccagaaaccattgcaccagactcagaatagctccaatatggtatctacactcctttcacaagactgaactttgtaacatgttaaggtacaaagccagaggactgtgctattcaaggactactgtaagtctattgtttctcaaaagacaatgagaaaaaaagaagagaatttgtatttcctgccgttttgtcataggtgagctcctttgtgcattttaagcacatgtaagtggttcagcacagtatgcctttttctgtgctttgaaaacttgatatgctcaagcttgtttgaatttattacatctaaccattttgcttgttccttgatttttataagcattcaattaagttagtattatgtcaagtaattttgagaaaatgtaacttgacattttttgcaagtaaaaaaaattgtttatttgtttaggcttagtaaaccagttcccaaacacagtcagactcttcccattgtcatctgattgcagagagaaagcacaccttatttccagggaaagctacaacaagcccaaggtcaaagtgtattattttttgtcttgttgttgtctattttctcccaatttttttttgaaattcagaggctcatatctgaaatagaattttagttcctctttcctttcctaaaattggggaagtacagcccatgctgacattattttcaggctattcttagatatacaagttgttaggccaggtgcaatggctcgcacctgtaatcccagcactttggggggctgaggcaggcagatcgcttgagctcaggagttcaagaccagcctggacaacatggcaaaaccctgtctctcccaagaatacaaaaattagccaggcatggtggcacacacctgtggtcccagctactcaggagactgaggtgggaggatcgcttgagcctcggaggcggaggttgcagtgagctgagattgtaccactgcgctccaaactgggtgacatggtgagaccttgtctcc

SEQ ID NO: 56 - protein, 237 aa, Homo sapiens
MQWSKEEEAAARKKVKENSAVRVLLEEQVKYEREASKYWDTFYKIHKNKFFKDRNWLLREFPEILPVDQKPEEKARESSWDHVKTSATNRFSRMHCPTVPDEKNHYEKSSGSSEGQSKTESDFSNLDSEKHKKGPMGLFPGSNATFRIVGCGAGNSVFPILNTLENSPESFLYCCDFASGAVELVKSHSSYRATQCFAFVHDVCDDGLPYPFPDGILDVILLVFVLSSIHPDRTLFI

SEQ ID NO: 57 - DNA, 1722 bp, Homo sapiens
ctgccccggtactcacaagcttctcggccccgaccttcgccctgggaggttctggccaggtgccgggaggggcgctgtgtcgagggcgatccccccaaagcagcgtcccgtgctaaaggtactgcttaggatgaatatgatttggagaaattccatttcttgtctaaggctaggaaaggtgccacacagataccaaagtggttaccacccagtggcccctctgggatcaaggattttaactgacccagccaaagtttttgaacacaacatgtgggatcacatgcagtggtctaaggaagaagaagcagcagccagaaaaaaagtaaaggaaaactcagctgtgcgagtccttctggaagagcaagttaagtatgagagagaagctagtaaatactgggacacattttacaagattcataagaataagtttttcaaggatcgtaattggctgttgagggaatttcctgaaattcttccagttgatcaaaaacctgaagagaaggcgagagaatcatcatgggatcatgtaaaaactagtgctacaaatcgtttctcaagaatgcactgtcctactgtgcctgatgaaaaaaatcattatgagaaaagttctggttcttcagaaggtcaaagcaaaacagaatctgatttttccaacctagactctgaaaaacacaaaaaaggacctatggagactggattgtttcctggtagcaatgccactttcaggatactagaggttggttgtggagctggaaatagtgtgtttccaattttgaacactttggagaactctccggagtcctttctgtattgttgtgattttgcttctggagctgtggagctcgtaaagtcacactcgtcctacagagcaacccagtgttttgcctttgttcatgatgtatgtgatgatggcttaccttacccttttccagatgggatcctggatgtcattctccttgtctttgtgctctcttctattcatcctgacaggatgcaaggtgttgtaaaccgactgtccaagttactgaaacctgggggaatgctgttatttcgagactatggaagatatgataagactcagcttcgttttaaaaagggacattgtttatctgaaaatttttatgttcgaggagatggtaccagagcatatttctttacaaaaggggaagtccacagtatgttctgcaaagccagtttagatgaaaagcaaaatctggttgatcgccgcttacaagttaataggaaaaaacaagtgaaaatgcaccgagtgtggattcaaggcaaattccagaaaccattgcaccagactcagaatagctccaatatggtatctacactcctttcacaagactgaactttgtaacatgttaaggtacaaagccagaggactgtgctattcaaggactactgtaagtctattgtttctcaaaagacaatgagaaaaaaagaagagaatttgtatttcctgccgttttgtcataggtgagctcctttgtgcattttaagcacatgtaagtggttcagcacagtatgcctttttctgtgctttgaaaacttgatatgctcaagcttgtttgaatttattacatctaaccattttgcttgttccttgatttttataagcattcaattaagttagtattatgtcaagtaattttgagaaaatgtaacttgacattttttgcaagtaaaaaaaattgtttatttgtttaggcttagtaa

SEQ ID NO: 58 - protein, 403 aa, Homo sapiens
MNMIWRNSISCLRLGKVPHRYQSGYHPVAPLGSRILTDPAKVFEHNMWDHMQWSKEEEAAARKKVKENSAVRVLLEEQVKYEREASKYWDTFYKIHKNKFFKDRNWLLREFPEILPVDQKPEEKARESSWDHVKTSATNRFSRMHCPTVPDEKNHYEKSSGSSEGQSKTESDFSNLDSEKHKKGPMGLFPGSNATFRIVGCGAGNSVFPILNTLENSPESFLYCCDFASGAVELVKSHSSYRATQCFAFVHDVCDDGLPYPFPDGILDVILLVFVLSSIHPDRMQGVVNRLSKLLKPGGMLLFRDYGRYDKTQLRFKKGHCLSENFYVRGDGTRAYFFTKGEVHSMFCKASLDEKQNLVDRRLQVNRKKQVKMHRVWIQGKFQKPLHQTQNSSNMVSTLLSQD

SEQ ID NO: 59 - DNA, 874 bp, Homo sapiens
tgtcgtcgtgtccaagggttggttcccaccttgcaccctgagctgaggggataggcttcagccaccctcgaccctgaactggaataattagggatcacatgcagtggtctaaggaagaagaagcagcagccagaaaaaaagtaaaggaaaactcagctgtgcgagtccttctggaagagcaagttaagtatgagagagaagctagtaaatactgggacacattttacaagattcataagaataagtttttcaaggatcgtaattggctgttgagggaatttcctgaaattcttccagttgatcaaaaacctgaagagaaggcgagagaatcatcatgggatcatgtaaaaactagtgctacaaatcgtttctcaagaatgcactgtcctactgtgcctgatgaaaaaaatcattatgagaaaagttctggttcttcagaaggtcaaagcaaaacagaatctgatttttccaacctagactctgaaaaacacaaaaaaggacctatggagactggattgtttcctggtagcaatgccactttcaggatactagaggttggttgtggagctggaaatagtgtgtttccaattttgaacactttggagaactctccggagtcctttctgtattgttgtgattttgcttctggagctgtggagctcgtaaagtcacactcgtcctacagagcaacccagtgttttgcctttgttcatgatgtatgtgatgatggcttaccttacccttttccagatgggatcctggatgtcattctccttgtctttgtgctctcttctattcatcctgacaggacattgtttatctgaaaatttttatgttcgaggagatggtaccagagcatatttctttacaaaag

SEQ ID NO: 60 - protein, 237 aa, Homo sapiens; identical to SEQ ID NO: 56

SEQ ID NO: 61 - DNA, 23611 bp, Mus musculus
  misc_feature (1)...(23611): n = A,T,C or G
aaacagtggcacccccaaatcccggactctgtggaagacccaaaggctcgctatggtgcagacaattacgttctggtatattttagtaatagtaaaattgtgctgtgcacctgtgtattttatttttttgactttcttttcctgtctttttttggggggagggggtgagatagggtttctctgtatagccctggctatcctgcaacttactctgtagagtaggctggccttaaactcacagacatctgcctgcctctgtctctagctccagagtgctgcaattaaaagcatgcgctaccacctcagttgttgtttttgttttttaaaggagttttttttattctgtgtgcgtgggtatggcatgtatgtctgtgtgtcacatgtgtgcctggtacccttggaggctagaaggtattggatctccctaggactggagttacaatttcgagctacatgtgggagctaagaatgaaaaccagtcttttctactttttttttttttttttttttttttggtttttcgagacagggtttctctgtatagccctggctgtcctggaactcactctgtagatgaggctggccttgaactcagaaatctgcctgcctctgccgcccgagtgctgggattaaaggcgtgcgccaccatgccgggcaccgctcagccatcttgttgatccatttttgttgttgttgctactgttttttgtcacaggacctcatgtggcacatgaggatttaaacacagggctcttatatgctaggtgcgtgctctaccactgaacaacacccctaaccaccttaagtttttgttttctaagccagacataagtagggcaggcctttaatcacagcacacaagcgggaagaggcaggcagatctctgagttcaaggcttgtctggtctacacacagagttccaggctggctaagtctacacagtgagaatgttcctcactgatttttttttcttttttaagtttaaatgtaagattgtattaacagcgtgtgtgacgggtgcgtgaccatgtacctgtcacggcaagcccacgggggtaggaggacagctttcagaagtcggttctctgcttctgctgtgacttctggctagcaagcacaggttgccagacttgctgaatgaggtcttacagccaccgcgacacctggctggccccaccgcactctgttgttgacatattcacttatctgaaacaagatttcgtggaaccccgactggcctggaacctgctatggagttgaaggtaactttgttccagccctcctgcctctgcctcctgagtgtgaatacagcatacaccaccacgcctctaatacatgaaatcgaggaaggaacccagagccttgtggaccttaggcaagcattccaccagctgagccacttcccagcccttgttggtttgtttgtttttgagaggtgtctgtgtctgcggcttagcttggcctgaaactcacagcctcgtcccattggtccctggcaaccctacgtcattcattccaagggactggattacaggactgagccgacatgacttggtttaccagtcctttttatttacttacgtacttaacatttttaaaaaagatttattcattttatgtgtaggagttctttgcctatacatcattgtgtgtgtaccgcgcatgtgcctagtgcagactgggcatcaggtcccctggaactggaggtatagatggttgtggagtaatagatgctgggacctgaactctggccctctctacgagagcaacaaatgctcttaacctctgttacctctctggccccttatttattttaatggaatagaatacaatataatatattgtatgccaccacacccatgtatgaaatgtagaacatttcatacatgtcaacaatgtattttgatcatgtacaccccaagtttctctgcagctcccctcaggaacccctactttcccctaccatctcccctaggtatctgacccattccccagtcacccccccccccacctccaggtccccatctccacccttgtgttggttttgagacaaggttttcatgtagtcctggctggcctgcagcttactgtatggaccagcctggcctggaattcacagagatctgcctgcctctgcctcctaagtcctaggactcaaggtgtgtcctgctcagccatgcagcctgctgggacatcttgttggctgcttctgtctgagctgttctagctaataggccacatcaggtctccaaacagtattattccagaagattcttcggcatcctccagctcttacatttttttcccttctcttttctggtgtgttctctgacttttagaaggtgggatgagtcaggcagtggtggcgcatgcctttaatcccagcatttgggaggcagagggcaggtggatctctgagtttgaggccagcctggtctacagagtgagttccaggacagccacctggacagaaaccctgtctcgaaaaacaaaaaacaacaacaacaaaaaagaaggtggggtgggaatttgatatagatgtctcatttttaaaaataccttactatttatttttattctgtgtgcactggcattctgcctccctgtatgtctgtgtgagggtgtcaggtcccctggaactggaaggggacagacaaagacaggtggtgctgggaattgaacccagatcctttggaagaacagccagggcgcttaacctctgagccatctctccagccctggatgacccatttagggttcagcactttctgctcacttgttcttagcactagtcttagactcatgactgtgttcacagctgaccccttgagaaaggctgttctggttaatgttaggagcaacgtcaatgtatgggtgtaagcatgaatatttggaagggagcttgacaagatattcattagtaaaacaacagtaggagattcctccctagggcctgtgatcttcagagccatgggcttttggcaaggtttacagtctacacctacattgcttgctggtttccaatcagaaagcagtggttaccgccctagccttcatgccaatgctactacaccaatgaacagatctttggcaggtcaccgttgtagcatgcaggcttcgctgctgggtaataccactgatgctcacccctaccccacccttgtggcctacatagctagcaccttccagaaccatgaaagctagccagcagagaggaatttttcaggtcaattcaagggggatttttttctaggctctgaaaccaaagactagtgtgtcttcagtaataaggtcttaccattcagttctgctggacaactgagaacaaaaccagccctttcgaaattttatttctttttcttttttcttttttctttttattttgagacagggtcttactatgttgcttaggctagcctggaattcactagataggctggcttcaacctcatagaatctgcttgtctctgcctcctaggtgctggggttatagctgtgcatcactatagtcatttatttttttttttttaaatagtctttcctcccgttttcctagtcatagtccctcagcccctggaagagctggagtgataggcccatgccaccatatttggtctgatactatctcgtttgctcatctaaggaacagggagattccggctgactgggtaggggtgtggcaaattaggggtagctcctagtgccctgtaggctctcagcaagctgggtaggccaggagggaaggcacaggctgacccctagggctcagcctatgagtcagctgtggccagacacacctacatctacccaagtctccctcccaattccacttcctccaaggcgggcaaccctaggtaactacacttctctacttacaaggggcatttccaaaagccagagcaggctgaatttttatctatttatttatctaatggtttttagagacaggttctcagtgtgtagctccggctgttctggaacaagctggcctcaaactcacagaggcccacctgcctctgcctcctgagtgctggggttaaaggcgtacactgccacactggttgttaaagctaagtcctctactgatattgactacatgatccagcattggcctgacctttagaccttggcttcctatacactctggactgtctacctgttgtattgtttactgtactggaggtggaatccagggttttgtatgcgtcaggggccactcttttttcatttgtttgagtcagggttgctctttgttactctggttgttctaaaactcactgtgtagaccaggctggcctcggaagttaaagatctacctgcctctgccttcttagtgctgggatgaaacatgcgcaccacaacacccatcaggaattagcaactgcttgagccatacctccagcccctcactgtaaggacctaggcagatgctctacactgagccaggccccaaccccgaactggggtagtctaggcgggtgctctaccactgagccccccccagcccccccaccccaggagtagtctaggcaaatgctctaccactgagtaatttcttcaaactctctgagacaagttctttatatacctttggcagacctcgaactggtgatcaccttgactgaatatctgaactagctggacaatgagccagctcattgtcaccccataatgcgctctggtctacctagacaaccagcagagtgcaaggtcagcctctgggtgacagagagctggtggccactcccctgcaggctgttcatttggatccagggatcagcccataccctagcctccctccattcctcactgccttcccactgagcattgggtagcattcccatctggaagcaaggaacaggaatcctgcttgccctagggcaagcagaaaggcctctactagtgcgtatgaaggggaagacctggaagtttctcttctgtttctgaataaatcactctgaatttgaaagtctgggaactccccagaagggtggggcagtttttcctggtgccctagggggccaagacagaaggtagtttttaaaaggatttttcaaaactctcccaagaactttaataagttcccccatttcaatggagcgtgcttctaatctaagtgcttggccttggatttgaggccaggctgggctactgtatgagaacttgccgtaaagaaaaaccaatgagcaaacacgggccagtgagatgtctcagtgggtaaagaagcttaccaccaagcctgatgatccctggtgacccacaaggtgaagagacctgactcttcaagctatcacatgtacacagccccctctacacacactcagaattcatcactgtgtaaactgagtgtggtaccgttccccgtgacgctggggatcaagagttctaggtcagaagttagatgcctcagtggttaggaatacttactgctcttgccgaggacctgaattccgttcccagcgtcctcatgaggtgggtttcaactgtttggcacctgcattcatgtgctacacataaactcctgcaggcacacacaggtacacctaagtgaaagtaatacataaaccttttcaaatattttaggctgggcaatggtggcgcacacctttgatcccaacagtcaggaagtagaagcaggatggtcgtcttgaattcgaggctagcctgatctacagagctagttccagaatagccaaggccacataaaaaaaaaaaaaaaaaaaaaaaaaaccaaacaaaaaaaaaaaacctatcttgaggctggagagatggctcagtggttaagagcactgactgctcttctagaaatcctgagttcaattcccagcaaccacatggtggctcacagccatctgtaatgggatctgatgccttcttctgtctgaagacagctgcagtgtactcatatgtataaaataaataaatcttcaaaaattaggagggaggcaaactccccttcccaaaaaaggaaaaaagaagtctcaaacacacacacaataacaacaaaaaacaaaacccctccatttatttgtgtgtggaggtgggtgggtgggtgtgggtgtggtggggaatgtgtggtgtgattttaatgtgcagatcagagggccactgagggagttggttctctccttccaccatgtggtttccagaggttaatctcagacagtaaggaagcaagtgcctttgtccactgagctacctaactcggggggaaaaaagacttccctaagtaaatctttgcttccttcccggaaccagcgaacgttcttttagggctatctcaaggcacatgcttgctttactccctctgctcagaacagagccttttggctgctgagtaggcaggcagcagatatggtaactgagtaactccgaagctgtttgggaagaaagggccatctgctttggccccaggctattccttttctgggtcatcttccctgatcacttgctctctgggcctggagagggcagcctgaagctggccccaaaggctgagaagttaatcagctggaggaacccacactcctggacaaacctcctgtaggaaaaagccctgcggagtcagggttatcagagcatgggtgaggtggccctgcaagcaggcatccagtagacttttccggtggtaccctacgtatgaccagggcctttggcttgccctcattgaactctgagagatagaaatatgtactaaggaggaggtggggccaggaattccaactttggagcagtccttggacctagtccccggggacattccagaggccactttacccagggaggggccctgtgaggcagagggcaggctgttagctcaggggcccctgagtacagaggcattatggctggatcttaaagcactgggcgctctgtcaggcccatctcagttttctgaacctgtaaaaagggagtatgttttctggaacgttccaggccctccctcattcatttagtgccttactgacatcctgctgtctgcagggacccgccctcttggacagagctcctgctactgtgacaggaagttcccctcttcctcaatttctcacttgaaaatgtgcagcttagggtcttcctggccagctgggcttgaatgtccccaggagaagtgacatatggcttctgagaggaggatcagagagtgggccttgaattaggttgtaaatattctctcgtcccaaggcttttcagggaaggggacccttgtggggggaagtgcactaaagctacaggtgtcacccatgctctgggccaggctgtggctgccagctgggtgcctgacagtaacagtgacagctctttgtgagggcaaagttctctggagaaggccagcttcacttcctctgccttccccttcctccacttcctcttttccccacccccaccctgttctgtgctttccgtctcctgtctgcaccccaaacttaacagctgaggccccctccacctctgccggcctctcagggacctctcctttgtcagggctgaggacacccagacgatctctcattcattccacagaacagagcccctcagtgtgtgtgtgtgtgtgtgtgtgtgtgttagtggaaggaagtggggggtgatggggcccctcaaagggctggcttgttttatgttgtccgggctgggggaggtgctgagttattaagactagcctgaataggcaccatgactgtcttcataagcacacaggaagctgaggcaggaagagcaggagtttgaggccagcctgggctacatagggagccactgtttcaaacaaagaagctgggcatggtgatatatgcctgtaatcacaacannnnnnnnnnnnnnnnnnnnnnnnnnnnnnnnnnnnnnnnnnnnnnnnnnnnnnnnnnnnnnnnnnnnnnnnnnnnnnnnnnnnnnnnnnnnnnnnnnnnnnnnnnnnnnnnnnnnnnnnnnnnnnnnnnnnnnnnnnnnnnnnnnnnnnnnnnnnnnnnnnnnnnnnnnnnnnnnnnnnnnnnnnncaccctcaatttccaacaaaccaagagaaatcccccccacgccacccccaagaatgtgaaagagaacactggaaaatgatcattgcagacaagacagaccagaattgtttcagaggtcgggtggggctgaggtgcctgccccttgaccagtcccaggactgagaggtgacaaagtggcaacacaggtcctgcctgggaatctggtctgctctaacctagtaaagctgtctggtgtcacccaagaggctccctccacatcctgcacccctgatggctgatggcatctttctcccttgcaccccaccagggttctcctgggaatactctgggctctccttattgacaggcagcatttgccctgccccacccccacctgtgacttgcaggactggcaggtccttgggcagctggcaaactgcctgagcaactgagaaatacaaggccagggccagggcagtcctgtcccccggaggcagggaggagactgcctgggaaagttctctcagggttggtgactgcagaagacttttgtcaaattttttttttttttttggtgggaaagataactaggggtgtgtttccagttcacagcatatgctggggtgatggtcacctcttccagacaaggcctcagcaacttcaaaatgccctgccaccagccaagaacaaggaagctggccactgtagtccatatatggatgaagccttctttggtttcaacacctacactttgtgagccagtgaacacctacctatgcatgcactgaggcacggcaggcccagagcatctcacctgaagcacccttcttgcctaaatccagctttctgtcacactctcccagaaggtgcgtgtccttctaagctaagctgagggatccggccctcaaccctgaccccgtgtgtagctctcagccaaatagctggcttgctaagtagaacactggtacttaggtgagggggacaggggctgcttctctctggaggatttggggctccggtgaccaccaacttttccctgagcagcttgtcactcccagaatccccacggctggcagatggactagtgcacaactcagctgtggctgcacataataaatagaggatagatggtgggccccagcccagcgatgtctggcagtcacccagagacactagctaacggcccaggcttagtcttgcctgggtgtgatcaggcagttctccaaaagtgcctgactccatgagaagttttgtttgttctattgagcacagttcctttctagatccggggcaggggatatctggaggcatcttcttgcaacacctccagttattggaccactggggctcgccctatgcttgggataggatggccttgagtctctaagaggtcaagatccatgaaaacctctccaaccagagttctgcttccaagttgaaccccaacacacctagcaaattagaaccacagcagaaggggcccccccggatctggctttccggctattgctagcaattgctagcaagggggagtgactctctgtccattcaatccaggccccgcgtgtccctcaaacaagaggccacacaaatagggtccgggcctcgatgctgaccctcatccacttaagtgctcgatatccacgtgacatccacacccagagggtcctggggtggttgggtgacccccagaatgcaggcctagtaaccgagacattgaatggggcagtgtccacaagggcggaggctattcctgtacatctgggcctacggagccagcacccatcgccaaaactcttcatcctcttcctcaatctcgctttctctctcgcttttttttttttcttcttcttttttttttttttttcaaaaggaggggagagggggtaaaaaaatgctgcactgtgcggcgaggccggtgagtgagcgacgcggagccaatcagcgcccgccgttccgaaagttgccttttatggctcgagtggccgctgtggcgtcctataaaacccggcggcgcaacgcgcagccactgtcgagtcgcgtccacccgcgagcacagcttctttgcagctccttcgttgccggtccacacccgccaccaggtaagcagggacgccgggcccagcgggccttcgctctctcgtggctagtacctcactgcagggtcctgaggatcactcagaacggacaccatgggcgggtggagggtggtgccgggccgcggagcggacactggcacagccaactttacgcctagcgtgtagactctttgcagccacattcccgcggtgtagacactcgtgggcccgctcccgctcggtgcgtggggcttggggacacactagggtcgcggtgtgggcatttgatgagccggtgcggcttgcgggtgttaaaagccgtattaggtccatcttgagagtacacagtattgggaaccagacgctacgatcacgcctcaatggcctctgggtctttgtccaaaccggtttgcctattcggcttgccgggcgggcgggcgggcgggcgggcgcggcagggccggctcggccgggtgggggctgggatgccactgcgcgtgcgctctctatcactgggcatcgaggcgcgtgtgcgctagggagggagctcttcctctccccctcttcctagttagctgcgcgtgcgtattgaggctgggagcgcggctgcccggggttgggcgagggcggggccgttgtccggaaggggcggggtcacagtggcacgggcgccttgtttgcgcttcctgctgggtgtggtcgcctcccgcgcgcgcacaagccgcccgtcggcgcagtgtaggcggagcttgcgcccgtttggggagggggcggaggtctggcttcctgccctaggtccgcctccgggccagcgtttgccttttatggtaataatgcggccggtctgcgcttcctttgtcccctgagcttgggcgcgcgccccctggcggctcgagcccgcggcttgccggaagtgggcagggcggcagcggctgctcttggcggccccgaggtgactatagccttcttttgtgtcttgatagttcgccatggatgacgatatcgctgcgctggtcgtcgacaacggctccggcatgtgcaaagccggcttcgcgggcgacgatgctccccgggctgtattcccctccatcgtgggccgccctaggcaccaggtaagtgacctgttactttgggagtggcaagcctggggttttcttggggatcgatgccggtgctaagaaggctgttcccttccacagggtgtgatggtgggaatgggtcagaaggactcctatgtgggtgacgaggcccagagcaagagaggtatcctgaccctgaagtaccccattgaacatggcattgttaccaactgggacgacatggagaagatctggcaccacaccttctacaatgagctgcgtgtggcccctgaggagcaccctgtgctgctcaccgaggcccccctgaaccctaaggccaaccgtgaaaagatgacccaggtcagtatcccgggtaacccttctctttggccagcttctcagccacgccctttctcaattgtctttcttctgccgttctcccataggactcccttctatgagctgagtctcccttggatctttgcagtttctgctctttcccagacgaggtctttttttctctcaattgcctttctgactaggtgtttaaaccctacagtgctgtgggtttaggtactaacaatggctcgtgtgacaaagctaatgaggctggtgataagtggccttggagtgtgtattgagtagatgcacagtaggtctaagtggagcccctgtcctgagactcccagcacactgaacttagctgtgttcttgcactccttgcatgtctcagatctatccatacagtttcacctgccctgagtgtttcttgtggctttctgaacttgacaacattatttatttttctctacagatcatgtttgagaccttcaacaccccagccatgtacgtagccatccaggctgtgctgtccctgtatgcctctggtcgtaccacaggcattgtgatggactccggagacggggtcacccacactgtgcccatctacgagggctatgctctccctcacgccatcctgcgtctggacctggctggccgggacctgacagactacctcatgaagatcctgaccgagcgtggctacagcttcaccaccacagctgagagggaaatcgtgcgtgacatcaaagagaagctgtgctatgttgctctagacttcgagcaggagatggccactgccgcatcctcttcctccctggagaagagctatgagctgcctgacggccaggtcatcactattggcaacgagcggttccgatgccctgaggctcttttccagccttccttcttgggtaagttgtagcctagtcctttctccatctaaaggtgacaaaactcctgaggccatagtacaagttaagtctgatttctgtcactcttctcttaggtatggaatcctgtggcatccatgaaactacattcaattccatcatgaagtgtgacgttgacatccgtaaagacctctatgccaacacagtgctgtctggtggtaccaccatgtacccaggcattgctgacaggatgcagaaggagattactgctctggctcctagcaccatgaagatcaaggtaagctaagcatccttagcttggtgagggtgggccctgtggttgtcagagcaaccttctaggtttaaggggaatcccagcacccagagagctcaccattcaccatcttgtcttgctttcttcagatcattgctcctcctgagcgcaagtactctgtgtggatcggtggctccatcctggcctcactgtccaccttccagcagatgtggatcagcaagcaggagtacgatgagtccggcccctccatcgtgcaccgcaagtgcttctaggcggactgttactgagctgcgttttacaccctttctttgacaaaacctaacttgcgcagaaaaaaaaaaaataagagacaacattggcatggctttgttttttttaattttttttaaaggtttttttttttttttttttttttttttaaagtttttttgttttgttttggcgcttttgactcaggatttaaaaactggaacggtgaaggcgacagcagttggttggagcaaacatcccccaaagttctacaaatgtggctgaggactttgtacattgttttgtttttttttttttttggttttgtctttttttaatagtcattccaagtatccatgaaataagtggttacaggaagtccctcaccctcccaaaagccacccccactcctaagaggaggatggtcgcgtccatgccctgagtccaccccggggaaggtgacagcattgcttctgtgtaaattatgtactgcaaaaatttttttaaatcttccgccttaatacttcatttttgtttttaatttctgaatggcccaggtctgaggcctcccttttttttgtccccccaacttgatgtatgaaggctttggtctccctgggagggggttgaggtgttgaggcagccagggctggcctgtacactgacttgagaccaataaaagtgcacaccttaccttacacaaacagcttgtggctctgtggctttgctgggtgtggggagcaggttgggtgggtgtggagctctattggggggggcatctagggtgggctaggccttgctgatggtatctagtgggagggctacaggccctttaatgaagtctcacaaataaccacaccttcagactgtcttgaagagttgaaaaggtactcctccagaaacctaggccaagttggcctgcactaacactaccttcctcaaccgaggggtgtccacaccctttgcctccatctgcataactgggtttcaagcccctctgctagtctgaagctgccctttccagagctgtgactgacagcaggaaggtgtgaagcctatggcttccttcccagggatgggcatcttttccctggttttgttttgagagcctaggactgaggaacacctcagagggaggaagggggtcatcctggaaatcagccccttccacatggcacgcagctccagcctttgtcagtcgtgatccttggacttgggtgccgcaagttagctttgactgggatcatttgttcacacatgcagagaacactggttggttgagtcctagtcatctccatccagctatcagctatcactccactcagctatacacacctatcagtccatccttcaatccatacatctagcccttcacccacccaaacaatcacatgggcaacacagaaaccaaaccagatgttcacctgccttcaggaagtgtccagtatcactgtacattgagcattatgagtccttaagtgaaggcaaatgcatacacaaacaggtttggggctaaggttcatgaccaaatccagggagagcagaggccttgctaaagagcactggatcttaattctatgggatgtggtctcagtgtagataccgaagttcaagggccagatgtggatacctgtcatctgaggctgagcaaggctgaggttagcttggactacaaaatgagtccctgggttaatgagtccataaatctggtatttcagaggagaatgcaggaggaggagttacaaggccatccctatctacgtactgagtttgaggccagcctgggatagatgagacaccgccttaaacaaaagtccttaagccaaccctaaataagctacctcgagtgataacaaaaacccaagaaatttgacttctttttctttttttccccatcaggctgggcactatagtgcacacctctagtcccagtacttgaggcaggtggatgtgtgagttcaagatcaccctgctctatgtagtaagttccaagacagccagaactgcatagtgagaccttgctgcaaaagagacagaagaaaaggtaacagaggcccaggtaacacagacaccagagcagagcgacgaggagggcgaccaggccagacagtgcaagtgttggtggaaatctagggttgactggggacaaagctgggagacaaaacactacctccccgtaggacagaacagggcacaggttggttgccaagttgccatttgagaaatggacacaccagtagctgatgcgccttccatctttgccattaaaggatcccaagcgtagccttcacagtatccagtgcagcctctggctccgcccctttcctcctgggtccagcaggcaaactggctattcaaggccaggctccaacaaagcctgtcactgtgcatagctttttttttttttttttttttttttttgacatgaggttgtgttagtaccaggtcctcacacctcacacatcccagagaagtctaccttcaaccctttccccatcctcctgcctccagctcttgaatgcttcccccaaacctccagtactatagcaataacagtagctacagttcagttgacagagatcttgcctaggtcatccttggctacatagtgaattagaggccagcctggacattgaggacattgtctcaaaacaaaaacaaacaaagtctcggtgagtggtctaataagcaagcgtttcccccactcttgattctttgctttccagaaatgtgaaattttgttctataattagcagcttctgttctgtgttccctcctccatctgcaggagggcagtttcgcctttgcagattctaccccagttggctctggtcttttcaggtcactggatcccccatgaggcagttctgaccctaatactcacctttgaatacttgaatcccacactcctcctacaggccacccaaaacttgtgccaatgcaggtgggattccagatcttccttcatggaaccccgtaaagacgacagaggcatctgctcagcctcacagtgatcgtggcaagaacccaacacaagccaggctggggagagcaggctgggagagtatccatcgctttagcaacacaagaaggtcaaatggtggggcccgagtggaaaggtggccctcccagtgcatactgcatttgaccagctgggagtcgcccaacagagagggcaggaaccgaaccgtttacagcccacaccacggactagatccttactgtcacttattatccaacaaaatgtgccggtgtgctgggtgtggtggcgcactcctttaatcccagcactcgggaggcagaggcaggtggatttttgagtttgaggccagcctggtacacaaagtgagttccaggacagccagggctatacagagaaaccctgtttcgtaaacccaaaaaaaaaaaaaaaaaaaaaaaaaagaaagaaaaaaattaattttagtagaatgaagaatttgattttttagtcacacaggctacattgcaagcatgcaacagaaggcatctggggggctggggaaacagcttagtgggtaaagtgttcagtgcacaaccatgagagactgaatttggtacccagaaatgtcgagctggtcacagtgaacatctgtaatcccagcactcccacattggatgaggtagaggcaggagaatcccttgaagttcaggccagctgtcagggctcacacagcagcagacaagagaggctgtctcaaacaaggtagaaagtaaggacaccagagtaacctactctctctctctctttttggcttttcaagaccgggtttctctgtgtagccctgactgtcctggaactcaccccatggacttaggctggcctcgaactcagagagagatctgcctgcctcctgagcaatggtattagaagcatgcacaatcacactgggggaaaaagccccatgtctaaaaatttttcatttattttatgtgtgtgggcttacatatgaaagtaagcaggtgtgtaggtgtgtgtgtgtgtgtgtgtaagaggacaatttgtgggggtcagttctccttccattatgtggggtcctgaggttgaatactcaggccagtcaccttctgaaccccaggacctgagctcctccagattttgttttaaagcggattaactgtgtatgtggctcagtggcaaagcacttccctagcatataggagttctcctgattctgtacccagcatggagggaaaaaaatattccctcaagcagtttttaggcacacggtgagatccaagggaaagcactgagagtccccgtgaagcctgcctcacccacccacggccgcctccactgccagcacagggaagcaggctgctccatttgttacagtgagcctacattcacacctttcttgtctccagtgcagaggctgcagggtacaatggggttccccctgggtggggtaccccttgtaggtttgcacacctctggtgactgaaactgaccactgtagggaccgacagtgactagtcaccggagtgaagagtctgggcttggggctggaagccatgattcagcagttaaagagcactggctgcttttgcagaaggcggctcaggtttgagtcccacatggtcgatcacagctgtccagtactccagtcccaggggatctgacaccatcttctgagctctgtaggcactacatgcatgtgatacacagatacacatgcaggcaagacatccatacccgtgtgaatgtttgtctgtgtgtgtttagacacaggcatgtgcaggggtctgaggatgtcttgcctggtaccaaactcaggttctctggaacttcagcacacactctctcaactactgagcaatctcttcatcctggacgtgattttttttttctcgagacagggtttctctgtgtagcccttgctgtcctggaactcactttgtagaccaggctggctttgaactcagaaatctgcctgcctctgcctcccaagtgctgggattaaaggtgtgagctaccacatagggctcctggaagtgatttttaaaaaagtgtttttgagacagggtcttactttgtagctttggctagcttgaaactatgtagaccaggctggccttgaattcaaaataatctactgagacttggcagagaactcactcagacaccagattctcagcacaaagattcactaccctgaaggcacggtggggtagtaaatctggactggacaaagaaaagtgactttttaaggagaaaaggtcttggctggggtgaggtgggaagtcctgattagatattctagtcactgtaaccaaagaatgaattttgattgctggaccttggtgttttgatagttggaccttggagttttaggcaggcataagtaagtagccaaataaggcactagaccttggtgctttaagaatctagtagtttagcaagggagagggcaagcccaatgccacgtttgctttgcttggacccgtgcttcacgctgggctggagagatggctcagtggttaagaacaagcctatgtgttcttttatagtgcacttttattaaaatctaaattaacttagcagatcttttatattaagtagtgtatttagtttctgacttttggttttttatgtttcgtttgtataaatattaattatttgggctaatgcatctggaccatgttcaaggtcatggagatgccaaatatgtatgtagccaaggccaatgaggctgttggggagtatggagctgagaagtgtctaagcagatacaaaatagaggcagacaagatggcgttaccttagtcacttcaagacaaaccactgtttgcacgtgaagaccagaggacaactttattttctctttctagttttatgtgggttctgagccaccttggcagcccaactctcttcttctttttttcagtttgaaagatacttcaagacaagccttgtatcactggtctccacccaggccagtgatatctttgtagtgtgtcacagtcttggcttttcttggaatgtccttgagctggaatccagtcccacgctgggagccttttctgattggcctcctttgttgcataatgtgcctccaagtttgatggcacacatctgtgactctggcacctgggaacttggaaaggcaggaggagctgcagttggaggccagcctgaaataaatagtaaccttcggaccagtctaagctttatgataccgtagtgcaaagaaacctggaaagggcttgcaaagcggctcactgaggaagagcatctgccgcacaagtgacctgacgacagccaatagaaaccactgctggggctggcgagatggctcagtggttaagagcgccgactgctcttctgaaggtcctgagttcaaatcccagcaaccacatggtggctcacaaccatccgtaacgaaatctgatggagtatatgaggacagctacagtgtacttacatataataaataaataaatctttaaaaaaaaaaaaaaaaagaaaccactgctgatggggctggagagatggctcaacggttaagagcactgactgcccttccagaggtcctgagttcaattcccagcaattcccacatggtggctcacaaccatctggtgtgtctgaagacagcgacagtgtactcatatacattaaataaataattttttttttttaaaagaaaccactgccaaaggaggaaactgactccccgggtctgtccttcaacgtctgcatgtgcttcctgctacatgcacctatacacctctctctctctctgtctccccacacaatgtaaaataagaaatataattaaaaatgaaaagggaagaagttgttgagtgttgatggtagtggtgggagatgggctggggtgtacatttgtggccatctttatctggcacagtgagaatcagctgatgtcgagcgatcgggctccatcagtggctccaactcacccctgtgcccacccctttctgtggcttcctgttgctcgtaaattttctcttctctgtagtagatgacaatgctaaactggagggtttaaccaggggcttcaaactcagctttcctgctgtgttcataatttgattaatttttataattattattttagttatgtgtcccaagggaagaagggtgtattagttcctctatagccttggcagtcctgaaacgcactatgtagaccaggctggcttcaaactcactatatagcctagggtaaccttgacctgcaggtcttcctgcctccactttctgagtcctaagattgtttccgtttggtttggtttatatagtgccagggacggaaccccgggttatgtatctgctagacaaatactcaaatgaactacatccccagctcccattaaactattatcttaattttaaaccatctggacttccttcctgactctttctctgtgtacactcgagcgagagcacatgtgcatgaccagtgcagacacagacaccagagggcagcttctagaaggcagtcttctccttccagcgtgtgggtccttggaatcaaactcacttcaggtggtcagtcagagtcaagctcctttccctgacgagtcatttcacgagctctaggaaaccatttttaactggaaacgccgtggaaacatttattattcatttattcagcaaatatttatttgttcagtgttgacatgcaaagaacagtaccaggcagactctctgcttagttatgggggtacaggcagggtgcttacttagcacgcatgaaaggaagccttaggttcaatcctcagtagtgttaaaaaacaaaacagccgggcgtggtggcgcacgcctttaatcccagcactcgggaggcagaggcaggcggatttctgagttcgaggccagcctggtctacaaagtgagctccaggacagccagggctatacagagaaaccctgtctcgataaacccaaaacaaacaaacaaacaaacaaaaaaacaaaacaaaaccaaaaaccaacaacaacaacaacaaaacaagatggggctggagagatggctcagcggttaagagcactgactgctcttccagaggtcctgagttcaattcccagaaactttgtctgaagacagctccagtgcactcacatacattaaataaacagtggcctaggcatagatgggaggcagaggtaggcggattttgtgacttcaaggccagcttggtctttatagctaattccaggacagccaggactacagagtgagactcaaaacaagcaaaaaggcttagcaagtcaggcggtgcaaagagctattgagagttgtaacgcaagatgaggggcaaattcaggagcgtgtgcacatgaaggttgctatggttatctaggatacctgagcgctgtgacagatgacttggagcgcagtgtgtagcgcgaatggcaaatgcaaaggcctggagcagaacgcatgttgttggagcgacagcaagaaactgcggaggtagcttaagagactggtcactcgtgaccttctggacgcctctgaatcctgagagtactttatgccacacccaacatggcgaccgcaccgggtccatccgggcgcaagcggaagtacgtctaggcgtgcgccgcagccacgccccttaccggggtctctgtggagctgtggccgcgccggcttcgagcatccctacgctggcaggctgggggactgtgaggctgcagctccggcggctagctccggagaggtacgacctgcacctccagccccggcggctggagtcccctctgggcttccctcccgaccctggctttattccaaggcccatccttgccgtctcctaccctcctaccaggccctctcctctcctgaccccatctgttcccaggcgcacaatctcgatggccagaatggaccctttcacgtggcctgctgagtttccaggcctttcccccgtctccttgtgtgttggctctgccctcgcagctatgggacgttgtcccttctgcttgtgttttcttgtttgttttacactgtagcccagtctagcctggagttcagtgtgcagcccaggctggttttgaacgtacagcaatctttctattgtagcctttgtaaatctggggttacaggtgtgcatcatcacgcggtggttaatgtgcagctaagggtggaactcagggcttcgaccccattcccagccctggcttcttctttttttctatcagcttaagtgcagcccacttctttctggagtctacttgtgatgcgcgggagtgtgatagggcgtcggactgaccccagagctttatgatctaggtcagctggagaatcccactgcgtcttgttacgggtgtgcagtatttttttctgcagacgacagtatggggccgtggcgggggttaggggagcacctggtagcttccctgttgccttcctccctatcttgagttatatttgttctttcctaggtactcgcatctgggggtacacctatttatcatattagcgtgtgtgtatgcgtgagtactggcatgtgcatgtcatgggtgcgtgtcgtggcgtacatgtggaagtcagaggaccactttgaagagttggttgttgccttttatctggtttatattagtgtgtgtgtgtgtgtgtatgtgtgtatgtataactgtgtgtgggtatgtgtacatgagtacaggtgtctgaggagaccagaggatcatgtgcacccggtgttggagttacacaggtggttattcgcctccccagtgtgggtactgggaatcgaactcaggtcctccgaaagagtagtactaaattatcgcttctgcctttccccccagttgagacaggatctctcttgatggtgtatactccagagtagctggcttgtgagcttttgacagatgcccctatctcctcctctcactttgcgctagcagtgttgggatggcagatgtgggtcactgcatccagcattttatgtgggtcccagggtttgaacttgggtcatcgggtttgcaaggcaagctctcttgctcacttagccgtcttgctgatctctgggcacacttttaagtcctaggagtttccttgcatttatccagtgagacttacaagtgttttccagggtatgaggactatgtctggggtctgttggaagcttctctttctttgaagaaaactggactcagaagtgtctctttgattgacaggaaagagagtgtgtggtccagctctagactaatgagagaggagtgaggtggtagaaagttatgtctctagcaagaggagttccaggatagtattgctgtattagtagctctcaatgacttctacgtcctagggattaaatagacatgtctgctcgtgtgatcctatggagtcctgactcaaaagctcctctgttccctgagtgagcaacatagccagccagtaaggtttgagcctctgagattagattttgctatggtgcctaggctgctgtcaacttcacaggttcaaggtgtcttcccgtctcagcctcctaagtagccaggactgtagacccacattgctgtgcttggctcctgtgcgtgctctcgaatgtgggagtgcttgtggaggccccaaatcaatgttggatgtccacaagcactctttactttagaaagcattttttaaaataaaagatgtatttatttatttattttgtgagtacactgtagctgttttcagacacaccagaagaaggcattggatcccatt

SEQ ID NO: 62 - DNA, 1891 bp, Mus musculus
cactgtcgagtcgcgtccacccgcgagcacagcttctttgcagctccttcgttgccggtccacacccgccaccagttcgccatggatgacgatatcgctgcgctggtcgtcgacaacggctccggcatgtgcaaagccggcttcgcgggcgacgatgctccccgggctgtattcccctccatcgtgggccgccctaggcaccagggtgtgatggtgggaatgggtcagaaggactcctatgtgggtgacgaggcccagagcaagagaggtatcctgaccctgaagtaccccattgaacatggcattgttaccaactgggacgacatggagaagatctggcaccacaccttctacaatgagctgcgtgtggcccctgaggagcaccctgtgctgctcaccgaggcccccctgaaccctaaggccaaccgtgaaaagatgacccagatcatgtttgagaccttcaacaccccagccatgtacgtagccatccaggctgtgctgtccctgtatgcctctggtcgtaccacaggcattgtgatggactccggagacggggtcacccacactgtgcccatctacgagggctatgctctccctcacgccatcctgcgtctggacctggctggccgggacctgacagactacctcatgaagatcctgaccgagcgtggctacagcttcaccaccacagctgagagggaaatcgtgcgtgacatcaaagagaagctgtgctatgttgctctagacttcgagcaggagatggccactgccgcatcctcttcctccctggagaagagctatgagctgcctgacggccaggtcatcactattggcaacgagcggttccgatgccctgaggctcttttccagccttccttcttgggtatggaatcctgtggcatccatgaaactacattcaattccatcatgaagtgtgacgttgacatccgtaaagacctctatgccaacacagtgctgtctggtggtaccaccatgtacccaggcattgctgacaggatgcagaaggagattactgctctggctcctagcaccatgaagatcaagatcattgctcctcctgagcgcaagtactctgtgtggatcggtggctccatcctggcctcactgtccaccttccagcagatgtggatcagcaagcaggagtacgatgagtccggcccctccatcgtgcaccgcaagtgcttctaggcggactgttactgagctgcgttttacaccctttctttgacaaaacctaacttgcgcagaaaaaaaaaaaataagagacaacattggcatggctttgttttttttaattttttttaaaggtttttttttttttttttttttttttttaaagtttttttgttttgttttggcgcttttgactcaggatttaaaaactggaacggtgaaggcgacagcagttggttggagcaaacatcccccaaagttctacaaatgtggctgaggactttgtacattgttttgtttttttttttttttggttttgtctttttttaatagtcattccaagtatccatgaaataagtggttacaggaagtccctcaccctcccaaaagccacccccactcctaagaggaggatggtcgcgtccatgccctgagtccaccccggggaaggtgacagcattgcttctgtgtaaattatgtactgcaaaaatttttttaaatcttccgccttaatacttcatttttgtttttaatttctgaatggcccaggtctgaggcctcccttttttttgtccccccaacttgatgtatgaaggctttggtctccctgggagggggttgaggtgttgaggcagccagggctggcctgtacactgacttgagaccaataaaagtgcacaccttaccttacacaaac

SEQ ID NO: 63 - protein, 398 aa, Mus musculus
HCRVASTREHSFFAAPSLPVHTRHQFAMDDDIAALVVDNGSGMCKAGFAGDDAPRAVFPSIVGRPRHQGVMVGMGQKDSYVGDEAQSKRGILTLKYPIEHGIVTNWDDMEKIWHHTFYNELRVAPEEHPVLLTEAPLNPKANREKMTQIMFETFNTPAMYVAIQAVLSLYASGRTTGIVMDSGDGVTHTVPIYEGYALPHAILRLDLAGRDLTDYLMKILTERGYSFTTTAEREIVRDIKEKLCYVDFEQEMATAASSSSLEKSYELPDGQVITIGNERFRCPEALFQPSFLGMESCGIHETTFNSIMKCDVDIRKDLYANTVLSGGTTMYPGIADRMQKEITAPSTMKIKIIAPPERKYSVWIGGSILASLSTFQQMWISKQEYDESGPSIVHRKCF

SEQ ID NO: 64 - DNA, 23456 bp, Homo sapiens
ccaggctgatgtgcagaggtacgatcatggctcactgcagcctcaaactgctgggctcaggcaatcatccctttttttcttttcttttctttttttttttgagatggagttttgctcttgttgcccaggctggagtgcaatggcgctatgtcggctcactgcaacctctgcctcctgggtccaagcaattctcccaccttagcctcccgagtagctgggattactggcatgtgccgccacgcccagctaatttttgtatttagccacctacctgcttgctgggattacaggcgtgagccactgtgcttcggcctccgttcttagttcttcaggcaccccgaggggctgaaggatgtgagctccatcccagcccaatcacgtgtcccccatatcagaaccacgggtgggaatcttcaccccacctcagaacaagggagactgaggctgagaggtgcctggcctcccaaggggcctgcttgcctgcctgccttccttccttccttctctctctctctttttttttttgagatggaatttcgctctttgtcgcccaggctggagtgcaatggcgcgatctcggctcactgcaacctccacctcccgggttcaagggattctcctgcctcagcttcccgagtagctgggattacaggtgcccgccaccacacgcagctaatttttgtatttttagtagagatggggtatcaccctgttggccaggctggtctcgaactcctgacctcaggcgatcctgcccgcctcagcctcccaaagtgctgggattacaggtgtgagccaccgtgcccagcctctctttctctctttgtctctttctttctttttctttaagactgagttttgctcttctcgcccaggctggagtgcaatggcgtgatctcgatctcagctggctgcaacctccacctcctgggttcaactgattctcctgcctccgcctcccgagtagctgggaatacaggtgcccgccaccacacccagctaattttttgtatttttggtagagatggggtttcaccatgttgcccagactggtcttgaactcctgacctcaggtgatctgcccgcctcagccttccaaagtgctgggattataggcatgagccactatgcccagctccaaggggcatttctgaggtcccaggccaggcaggagagcgtcagggataagcccagccagccaggaaggggcgagtccctcgcactgaccctgggcctggactgcagaccccgcctcactggcccctctcaggggccacctgggagctaggtaaccccctgccccttttcacagctgagggcaagaggcccagggcagggaagccactgcctgggacagtccttagcatgggaaggacccacccttggcctgtgcagcaccccaagagggtgtcagagccagggcctcgggaaccccacttgacctgaacttgaacttgctactgacccccatctctcctggcccaacttgtcacccagcttctgaggccccactcgggacaaccagaagggtcctgagtcccaagggctaccttggcctctaggagagtggttgtgagtcccggggaggatgagggtgcccgcagcctccccctccaagcgcccacagcctaggcctgcaggccccaaaggatccagttcctctctgcacatgtggtctctttctcatctggagaagggggagagctggccctacagcagatgggtccagagaaagcaaaaagcgttcagtgtgtgtgtgtggtgtgtgtgtggtgtgtgggtgtggggtgtgtgtgtggtgtgtgtgtgtgtggtgtgtgtgtgggatgtgtgtgtgtggggtgtgtgtggtgtgtgtgtgtggtgtgtgtggggtgtgtgtgtgtggggtgtgtgtgtggtgtggtgtgtgtgtgtgtgtgtgtgtgtgtaagggggaagcccaggaaaccgcattttctttttctgaataattcaatcaaataagcaagtccaggaactccctaggaaggctggaagggtttctccgggtaccctgcgggctggagacagagggtagtttttaaggattttttaaaactctcccaagaagtgttagaagttcccacttcctctggggcagggattccccttagcctggtgcctctgccaaggagctgcagaggcccagggcagagctactgaaggcagccaagtgaccaccccaggctatgtctggaggccaggtgtatgtggggaccaaggctctgctggtcacctcctctgaggagccctccctgactgcttttcttttttttttttagatggagtcttgctctgtcgcccaggctggagtgcagtggcacgatctcgtctcaccgcaaactccacctcccaagttcatgccattctcctgcctcagcctcccaagtagctgggactacaggtgcccgctaccatgcctggctaattttttatatttttagtagagacggggtttcaccgtgttagccaggatggtctggatctcctgacctcgtgatccaccctcctcagcctcccaaagtgctgagattacaggcgtgagccaccacgcctggccccctgactgctttctaagcagcactctctgctgcgtgcagtggctcatgcctgtaatcccagcactttgggaggctgaggcaggtggattgctttaacccaggagttggaggccagcctgggcaaatggcaaaactttgtctctacaaaacattagctgggcatggtggtacacacctgtagtaccagtaagtcaggaggctgaggtaggaggatcaatggaggccaaaaggttgagcctggagtgagctgagattccaccactgcactccagcctggtgacaaagtgagaccctgactcgaaaaataaaaaaaagcaccttccttttttttttttttttttttaaatatagagacaaggtcttgctatgttgcccaggctggtcttgaactcctggactcaagtgatcctcctaccttgtcttcccaaagtgttgggattatgggcgtgagccaccacactcggcccaacaccctcctttttttttttttttttttttttttttttgagacagagtctcgctctatagcccaggctggagtgcggtggcacgatcttggctcactgaaacctccgcctcccaggttcaagcgattctcctgccccagcctcccgagtagctgggactataggtgtgcaccaccatactcggttaatttttgtacttttagtagaggtggggtttcattatgttggccaggctggtcttaaactcttgacctcgtgatctgcctgcctcagcctcccaaagtgctgggattacaggcatgagccactacacccagcaccccctaatacctcattctgaaggaaacctgttgcttttcctcctgatgccattaaacttgttgttctcttgctctctctctcatttaagatctgtcttaggaattgtgcttgctttcttcagggtgcttttctcatttctcaaaacagtgccagttaactctggaagcatgtccggctggtcagtgacggtgtgctgcatgcaggagcagtgtgatccaggagctgctccaggcaaaaggcccttcagctcctggctgtgcccttactgggtgatcctggctgggtcactgcccctttctgagcaggaaaccttctgctgttagagtagaagagggaggaagtcatggcaggcttcctggagaaggcagcctgaagctggcccttaaggctgagaaggtggccaggaggcagagagaccccactctgttttattttaaaaaataaaataggctgggcacggtggctcatgcctgtaatcccagcactttgggaggctgaggcgggcggatcacaaggtcaggagatggagacggagaccatcctggccaacatggtgaaaccccgtctctactaaaatacaaacaaaattagctgggcgtggtggcacgcgcctgtagtcccagctactcagtaggctgaggcaggggaatcgcttgaactcgggaggtggaggttgcagtgagctgagatggcaccattgcactccagcctggtgacagagggcgagacgccatctcaaaataaataaataaataaataaataaataaataaataaataaataaaggccgggtgtggtggcttacacctgtaatcccaccactttgggaggccaaggcagacggatcacctgaggtcgggagtttgagaccagcctggccaacatggtgaaaccccatctctactaaaaatacaaaattacctgggtggggtggtgggtgcctgtaatcccagctactcaggaggctgaggcaggagaatcgcttgaacccgggaggcagaggttgcagtgagccaagatggcgccattgcactccagcctgggcgacagagcaagactctgtctcaaaaaaggaaaaaataggccacgcacggtggctcacgcctgtaatcccagcactttgggaggccgaggcggtcggatcacaaggtcaggagatcgagaccatcctggctaacacagtgaaaccccgtctctactgaaaatacaaaaaattagccgggcgtggtggcgggcgcctgtagtcccagctactggggaggctgaggcaggagaatggcgcgaacccaggggggtggagcttgcagtgagcggagatcgtgccactgcactccagcctgggtgacagagcaagactccagctcaaaaaaaaaaaaaaaaggaaaataaataaataaataaataaactatccaggcatggtggctcacacctgtaatctcagcactttgggaggctaaggtgggcagatcagctgaagttaggagtttgagaccagcctggccaacatggtgaaactccatctctactaaaaatacaaaaaaaaaaaaaactagctgggcgtggtggtgcgagccagtagtcccagctactcaggaggctgaggcaggagaatcgcttgaaccctgaacccgggaggcagaggttgcagtgagctgagattgtgccactgcagtccagcctgggcgacagagcaagactccatctcaaaacaacaacaactaaaaacgaacaacaacaacaacaaaaaactgaggccaggtgcagtggctcacacctctaatcccagcaatttgggaggctgaggtgagaggatcacttcagctcagcagttcgagaccagcccaggcaacacagggagacagaccctgttatattgcagagagaccccatctccacaaaatataaaaatattagtcagatgtggtggcatccctgccgtcccagctactcaggaggctgagacaggaggatcgcttgagcccaggaggtcaaggctgcagtgagctgtgatcatgccactgcactccagcctgggccacagagctagaccctgtctctaaaatttttagagaccttatctctaaaaataaattaaataaataaaccgggagcacctactttttctttttcttttactttttttttttttttttggagacagggtctctatcacccaggctggagtgcggtggcatgatcttggttcactgcagcctcgacccctcaggctcaggcagttctcccaccttagcctccccagtagctgggactacaggcacatgccaccatgcccggctaattttgtctttttttttttttttggtagagacagggtctcaccatgctcctcaaaactcctggactcgagagatcctcctgcctcggcctcccaaaatgctgggattacggtgtgagccgctgtgcccggctattttatttttaaatgaataaaagctggagcacccaacttttttgttgttgtttttctgagacagagttttgctcgtcacccaggctggagtgcagcggcgcaatctcggcccactgcaacctctgcctcccgggttcaagcgattctcctgcctcagcctcctgagtagctgggattacaggcacgcgccactatgcccagctaatattttgtatttttagtagagacaaggtttcatcatgtttgccaggctgatcttgaatttttgacctcaggtgatccacccgccttgacctcccaaagtgcagggattacaggcgtgagccaccacgcccagcctggagcacctaatttttaaatttaatttttcttttcttttttttttttttttgagacagggtcttcctctgtcatccaagctggaatgcagtgacttgatcatagctcactataaccttgaccttccacgctgaagcaatgctcccgccccagcctcccaattagctgggagtacaggcacgtgccacaacacccagctgattttgtagagataggatctcccgtgttgcccaagcttgtctccaactcctgggctcgagcgatcttccctcctcggcctcccaaaatgctgggattacaggtacaagccatcacaccccagtgggagagaccccacttgctgccacgtgaccatgggctgatggtgtcctctctgggcctcaggtgataaattctgaggagggaggtagggcccaggaattccgactttcaaacagcctttggactcaggccttggggacattccaggggaccctttaccagggaggggcagtgtgaggcaggaggcagggctgccgcctcagggaccctgagcctagagtccttcccaccgcatttggggacttgagcacttcaccagtcctgactcagtttcctagtctgtgaatgggggtgtgtctcctggaatgttgccccccctcattcattcattctcctctcactgagcacctaccgtgttcagggtccctgtcctcctagagctaactcaagtcttggagggaagctctgtctcagttccttcctctacaaaatggagcttgaggacgggcacggtggctcatgcctgtaatcccaggactttgggaggctgaggtgggaggatcgcttgagccccccggagctggagaccagcctgggcaacatggtgagaagccatacctctacagataatttaaaaattagccaggcttggaagtgtgtgcctatagtcccagctactcgtgaaggctttgagcccaggaggtcgaggctgcagtgagctgtgatcgcactccagcctgggcatcacagcaagaccttgtatcaaaaatagtaataataataaaaaggaggttggattccctcctggcaggatagggagggcgctgcagtgcccagggcaaggtggctgggtggttgttttgcgggagggccaaggagtggtccctgggtctgcgctgtaagagttggttgcctggaggccttgcagggtgggggtgtcaccaaagcaaaggcttggaggggaaaaaacaaaagtcccagccaggcaggtggagtccccttggctgagttcaaccgagggttctccgggggctgcgtgcgtgccccagtgacagctccgaaagctcccttacagggcaaagttcccaagcacagaagagaacctgttcacttctcccctgctcggcccgccccctggccaggcacctctacttcctcttttcctgctccgctgcttgctttctctcttcagctcctccctgcccctcaccccaggctgctcggccacctccaacctgccacctgaggacacccaggcagtcactcattcaacagcgaggagccctggggtgggtgtagtgggaaggagtgggggtgacggagaccctgggagggctcgcagcctggtggctgaggcccagttctaaatgccagctgcaagccttggtctgaggtagggaggaaggcgtggctgcagaggctaaaacgcttccccaaagaggggctttctgggatgggacttgaagggtgcataggagagcactaggaagtggccgctgcagacagagggaaccacaagccaggaggacaggccaggaatgctgcagcccggggcggggtggggctggagctcctgtctcttggccagctgaatggaggcccagtggcaacacaggtcctgcctggggatcaggtctgctctgcaccccaccttgctgcctggagccgcccacctgacaacctctcatccctgctctgcagatccggtcccatccccactgcccaccccacccccccagcactccacccagttcaacgttccacgaacccccagaaccagccctcatcaacaggcagcaagaagggccccccgcccatcgccccacaacgccagccgggtgaactgtagcgttggcaggtcctgaggcagctggcaagacgcctgcagctgaaagatacaaggccagggacaggacagtcccatccccaggaggcagggagtatacaggctggggaagtttgcccttgcgtggggtggtgatggaggaggctcagcaagtcttctggactgtgaacctgtgtctgccactgtgtgctgggtggtggtcatctttcccaccaggctgtggcctctgcaaccttcaagggaggagcaggtcccattggctgagcacagccttgtaccgtgaactggaacaagcagcctccttcctggccacaggttccatgtccttatatggactcatctttgcctattgcgacacacactcagtgaacacctactacgcgctgcaaagagccccgcaggcctgaggtgcccccacctcaccactcttcctatttttgtgtaaaaatccagcttcttgtcaccacctccaaggagggggaggaggaggaaggcaggttcctctaggctgagccgaatgcccctctgtggtcccacgccactgatcgctgcatgcccaccacctgggtacacacagtctgtgattcccggagcagaacggaccctgcccacccggtcttgtgtgctactcagtggacagacccaaggcaagaaagggtgacaaggacagggtcttcccaggctggctttgagttcctagcaccgccccgcccccaatcctctgtggcacatggagtcttggtccccagagtcccccagcggcctccagatggtctgggagggcagttcagctgtggctgcgcatagcagacatacaacggacggtgggcccagacccaggctgtgtagacccagcccccccgccccgcagtgcctaggtcacccactaacgccccaggccttgtcttggctgggcgtgactgttaccctcaaaagcaggcagctccagggtaaaaggtgccctgccctgtagagcccaccttccttcccagggctgcggctgggtaggtttgtagccttcatcacgggccacctccagccactggaccgctggcccctgccctgtcctggggagtgtggtcctgcgacttctaagtggccgcaagccacctgactcccccaacaccacactctacctctcaagcccaggtctctccctagtgacccacccagcacatttagctagctgagccccacagccagaggtcctcaggccctgctttcagggcagttgctctgaagtcggcaagggggagtgactgcctggccactccatgccctccaagagctccttctgcaggagcgtacagaacccagggccctggcacccgtgcagaccctggcccaccccacctgggcgctcagtgcccaagagatgtccacacctaggatgtcccgcggtgggtggggggcccgagagacgggcaggccgggggcaggcctggccatgcggggccgaaccgggcactgcccagcgtggggcgcgggggccacgcgcgcgcccccagcccccgggcccagcaccccaaggcggccaacgccaaaactctccctcctcctcttcctcaatctcgctctcgctctttttttttttcgcaaaaggaggggagagggggtaaaaaaatgctgcactgtgcggcgaagccggtgagtgagcggcgcggggccaatcagcgtgcgccgttccgaaagttgccttttatggctcgagcggccgcggcggcgccctataaaacccagcggcgcgacgcgccaccaccgccgagaccgcgtccgccccgcgagcacagagcctcgcctttgccgatccgccgcccgtccacacccgccgccaggtaagcccggccagccgaccggggcaggcggctcacggcccggccgcaggcggccgcggccccttcgcccgtgcagagccgccgtctgggccgcagcggggggcgcatggggggggaaccggaccgccgtggggggcgcgggagaagcccctgggcctccggagatgggggacaccccacgccagttcggaggcgcgaggccgcgctcgggaggcgcgctccgggggtgccgctctcggggcgggggcaaccggcggggtctttgtctgagccgggctcttgccaatggggatcgcagggtgggcgcggcggagcccccgccaggcccggtgggggctggggcgccattgcgcgtgcgcgctggtcctttgggcgctaactgcgtgcgcgctgggaattggcgctaattgcgcgtgcgcgctgggactcaaggcgctaattgcgcgtgcgttctggggcccggggtgccgcggcctgggctggggcgaaggcgggctcggccggaaggggtggggtcgccgcggctcccgggcgcttgcgcgcacttcctgcccgagccgctggccgcccgagggtgtggccgctgcgtgcgcgcgcgccgacccggcgctgtttgaaccgggcggaggcggggctggcgcccggttgggagggggttggggcctggcttcctgccgcgcgccgcggggacgcctccgaccagtgtttgccttttatggtaataacgcggccggcccggcttcctttgtccccaatctgggcgcgcgccggcgccccctggcggcctaaggactcggcgcgccggaagtggccagggcgggggcgacctcggctcacagcgcgcccggctattctcgcagctcaccatggatgatgatatcgccgcgctcgtcgtcgacaacggctccggcatgtgcaaggccggcttcgcgggcgacgatgccccccgggccgtcttcccctccatcgtggggcgccccaggcaccaggtaggggagctggctgggtggggcagccccgggagcgggcgggaggcaagggcgctttctctgcacaggagcctcccggtttccggggtgggggctgcgcccgtgctcagggcttcttgtcctttccttcccagggcgtgatggtgggcatgggtcagaaggattcctatgtgggcgacgaggcccagagcaagagaggcatcctcaccctgaagtaccccatcgagcacggcatcgtcaccaactgggacgacatggagaaaatctggcaccacaccttctacaatgagctgcgtgtggctcccgaggagcaccccgtgctgctgaccgaggcccccctgaaccccaaggccaaccgcgagaagatgacccaggtgagtggcccgctacctcttctggtggccgcctccctccttcctggcctcccggagctgcgccctttctcactggttctctcttctgccgttttccgtaggactctcttctctgacctgagtctcctttggaactctgcaggttctatttgctttttcccagatgagctctttttctggtgtttgtctctctgactaggtgtctaagacagtgttgtgggtgtaggtactaacactggctcgtgtgacaaggccatgaggctggtgtaaagcggccttggagtgtgtattaagtaggcgcacagtaggtctgaacagactccccatcccaagaccccagcacacttagccgtgttctttgcactttctgcatgtcccccgtctggcctggctgtccccagtggcttccccagtgtgacatggtgtatctctgccttacagatcatgtttgagaccttcaacaccccagccatgtacgttgctatccaggctgtgctatccctgtacgcctctggccgtaccactggcatcgtgatggactccggtgacggggtcacccacactgtgcccatctacgaggggtatgccctcccccatgccatcctgcgtctggacctggctggccgggacctgactgactacctcatgaagatcctcaccgagcgcggctacagcttcaccaccacggccgagcgggaaatcgtgcgtgacattaaggagaagctgtgctacgtcgccctggacttcgagcaagagatggccacggctgcttccagctcctccctggagaagagctacgagctgcctgacggccaggtcatcaccattggcaatgagcggttccgctgccctgaggcactcttccagccttccttcctgggtgagtggagactgtctcccggctctgcctgacatgagggttacccctcggggctgtgctgtggaagctaagtcctgccctcatttccctctcaggcatggagtcctgtggcatccacgaaactaccttcaactccatcatgaagtgtgacgtggacatccgcaaagacctgtacgccaacacagtgctgtctggcggcaccaccatgtaccctggcattgccgacaggatgcagaaggagatcactgccctggcacccagcacaatgaagatcaaggtgggtgtctttcctgcctgagctgacctgggcaggtcggctgtggggtcctgtggtgtgtggggagctgtcacatccagggtcctcactgcctgtccccttccctcctcagatcattgctcctcctgagcgcaagtactccgtgtggatcggcggctccatcctggcctcgctgtccaccttccagcagatgtggatcagcaagcaggagtatgacgagtccggcccctccatcgtccaccgcaaatgcttctaggcggactatgacttagttgcgttacaccctttcttgacaaaacctaacttgcgcagaaaacaagatgagattggcatggctttatttgttttttttgttttgttttggttttttttttttttttggcttgactcaggatttaaaaactggaacggtgaaggtgacagcagtcggttggagcgagcatcccccaaagttcacaatgtggccgaggactttgattgcacattgttgtttttttaatagtcattccaaatatgagatgcattgttacaggaagtcccttgccatcctaaaagccaccccacttctctctaaggagaatggcccagtcctctcccaagtccacacaggggaggtgatagcattgctttcgtgtaaattatgtaatgcaaaatttttttaatcttcgccttaatacttttttattttgttttattttgaatgatgagccttcgtgcccccccttcccccttttttgtcccccaacttgagatgtatgaaggcttttggtctccctgggagtgggtggaggcagccagggcttacctgtacactgacttgagaccagttgaataaaagtgcacaccttaaaaatgaggccaagtgtgactttgtggtgtggctgggttgggggcagcagagggtgaaccctgcaggagggtgaaccctgcaaaagggtggggcagtgggggccaacttgtccttacccagagtgcaggtgtgtggagatccctcctgccttgacattgagcagccttagagggtgggggaggctcaggggtcaggtctctgttcctgcttattggggagttcctggcctggcccttctatgtctccccaggtaccccagtttttctgggttcacccagagtgcagatgcttgaggaggtgggaagggactatttgggggtgtctggctcaggtgccatgcctcactggggctggttggcacctgcatttcctgggagtggggctgtctcagggtagctgggcacggtgttcccttgagtgggggtgtagtgggtgttcctagctgccacgcctttgccttcacctatgggatcgtggctgtcagccttgagggtcagcctggcccaggctcccataggcttaggagaggccgcaattcctacctgttcatccagacagagggggacctggaatcaaagtcaagttggggtagggggtccatggggccatatctggcctgcagacagctctggttagctatgggctgaggtctggattctgccttgtgactggagactgggcgccatcccgtggcctctgagggcccagtttgttcgtgacccatgctgcagagggagatacccaggctcctggacctcagggcctgcctggcactgcaggccaggttctctttttatttctgagacggggtcttgtgttgcccaggctggagtgtaatggcacaaccatggctcactgcagcctcaactttgggctcaagcaattctcctgcctcagcctcccaagtagctgaaactacacaggcatgccccagcacgcccagctagttgcaggtcagattctcattgttctacagggccctgagttaaatactctcgcaagaagaaaccaagcctggcctgccttccctctgctagaagctgtgattgacaccagcagagaatgaaggaagaaaagggggtgaggatcccttgcagggatgccgtttaccccaaacaccacctggtgcatagcagttgttctggaaatgatccggtccccccaggaggcctggactctcaactgtgcacagtggcctactggcagagaggaaggtggtacccttcctcctgtgttatcttggaggtcccctgaagggctctctggggtggttctagctcttttggtctgatttctgcagtggtgagccctgggccaccttgggccacttaatcattcaacccccattcattgagtgaccactctacggtgggggaggctactgagatgacctggacaaggaccctgccctggaggagctgtcagtctggaagtgaggatttaattcatttgcccattcattcattcattcattcattcattgaggacttaattcatttgctcattcattcattcatttgctcattcatccattcattcatccatccatccatccatccaatcactatttgtgccagatagtgcgggtatagaggagaaccaaccagatgtgttccgtgtcctcaccaggcacccagtttaatggggaagacatcacaagcacgaaggcaaacaaatgagtgtacagtgacatgctgtgatcataggaagagagagcagagactttgatgaacacgagcatcgggtgatgttcattatgtcgattgtggtggtggtcttgcaggtgtagacatacttcaaaccttatctaattgggcctgctgtggtgacgcatgcttgtaatcccagcattttgggaagctgaggtgggaggatcacttgagcccaggagctcaaggctgcagtgagctatgattgcaccactgcactccagcctgggtgacagaacaagaccctgactcttaaaaattaaaataggccaggcaggcgtggtggctcgcgcctgtaatcgcagcactttgggaggctgaggcaggtgggtcatttgagcccaaatgcagcctaggcagcatagtgagatcctgtctcaatttttttcttttttttgagatggagtcttgttctgtcacccaggctggagtgcagtggtgtggtgtgatcttggctcactgcaacttttgcctcctgggttcaagcgattctcctgtctcagtctcctgagttgctgggattacaggcatgtgtcaccacgcctggttagtttttgtatttttcacagatacagggttttgccatgttggccaggctggtcttaaactcctgacctcaggtgatccacccgccttggcctcccaaaatgctgggattacaggcgtgagccaccacgcccggcggttgtgcactccttatgagcatctaatgcctgatgatctgtcactgtctcccatcagccccagatgcgactatctagttgcagggaaagaagctcagggctctcattgatcctatatcatgatgagttgtagaattattttatcatatattagaatgtaataatagagatggtgtacgcaataagcgtaatgtgcttgaatcatcccaaaaccatccccctgcccccattcatgggaaaattatcttccacgaaactggtccctggtgtcaaaaagacgggactgctgacattggtgatgcacagctgggacagcttcacccataggttgaccagcaacttcagcagctcctgcttcttgccaaggaagtcccagccttaatcttgcgtatagctgcacaagcgtctgctgccaccacctactccaagagaaagaggaagagggccagaaacacagattttaaaaagcaaagggagaccagcctgaccaacatggtgagacctcatctctactaaaaacacaaaagttagccgggcagggtggcgtgcacctgtaatcctagctactcgggaggctgaggcagaagaatcacttgaatctaggaggcagaggttgcattgagccaagattgtgtcactgcactccagcctgggagacagagtgagactctgtcccctccccccaaaaaacaaaggagccaggtgcagtgtctcatgcccgtcatcctagcactttgggagactgaggcagtcggatcacgtgaggtcaagagttcatcccagcactttgggagaccgaggcagtcggatcacatgaggtcaggagttcgagaccagcctggccatcgtggtgaaaccccatctctactgaaaatacaaaaaattatctgggcatagtggtgcacacctgtaatcccagctactcaggaggctgaggcgggagaatcgcttgaacttgggaggtggaggttgcagtgagctgagatcgcaccactgcactctagcctgggcaacacagtgagactccatttcaaaaaaaaaaaaagcaaaggatcactgaacatgggcagacatgggggtagggagagaggagctgtcactctttttctgttgttttattttttgtagagatggggtcttgctatattgcccaggctggtcttgaactcctggcctcaagccatccactcgtcttggctccccaaagtgctgggtttgcaggcgtgagccatcacgtccagcctatttcattttttacaatcagagtctcactctgtcacccaggctggagtgcagcactgtgatcatagtttactgtaacctccaactcctggactcacacaatcctcccgcctcgacctcccacgtagctgggactacaggtgtggaccaccatgcctggctaattgggccgtcactcttgagtaggcttccccagagggcttcctggaggaagaatgcttgagctggctccggaggccagaggagtcccctggggaggtggtgtgtctcagaggcatggattgactggggacacaggcccaaagaggagatacaacctccaagacagaatggagcattggttgattgtcagacacgttgtctatgtggctttgggaagtcacatcactgcccatatccccatttgagaattgggcatatcagtaacaactggaaggtgactgtagcgggtgcactccatcagtactttcattttattttattcttgttatttttttgagacagagtctcactctgtcacccaggctggagtgcagtggtgcgatctcggctcactgcaacctctgcctcttgggtttaagcaattctcttgtctcatcctcccttgtagctgggactacaggcgcgtgccaccatgcctggctaatttttgtgtttttagtagacacagggtttcgttatattgtacaggctggtctcaaactcctgacctcaggtgatccgcccaccttggcctcccgaagtgctgggattacaggcatgaggcccttttattttatttatttatttttttagatggagtttcactcttgtcacccaggctagagtgcaatggcgtgttctcggctcactgcaacctctgcctcttgggttcaagcgattctcctgtctcagcctcttgagtagctgggatttcaggcacacgccatcacaccaggctaatttcttttgtatttttagtagagatggggtttcactatgctggccaggctggtctcgaactactaacctcaggtgatccacctccctcggcctcctgaagttctgggattacaggtgtgagccactacgcctggctattttatttttatttttagagatgtgatcttgttctgttgcccaggcttagtgcagtggtgtaatcgtcgctcactgcagcctcgaactcctggcctcaagtgatccttctatctgttggtctcctagagggctgggattaccagcatgagccactgcgcctggccaagactttcctttttttttttttttttgagacagagtcttgctctgtcgcccaggctggagtgcagtggggcaatctcggctcactgcagcctccgcctcccgggttcacaccattctcctgcctcagcctcccaagtagctgggagtacaggcacctgccaccacgctcggctaattttttgtatttttagtagagacggggtttcaccgtgttagccaggatggtctcgatctcctgtcctcgtgatccgcccgcctcggcctcccaaagtgttgggattacaggcgtgagccaccaggcccagcctagagatggagtttcaccatgttggccaggctggtctcgaactcctgacctcaaatgatccgcccacctcagcctcccaaagtgctgggattacaggcgtgagccgccgcacccggcctcacctggctaatttttaaaaatcttttgtagagatggaggtcttgctatattgcttgggctgatctgaaactcctggcctcaagcagtcctcttgcctccaccttccaaagtactgggattacacgtatgagccacctgtaattaaatgcagatatttaattaatcaaatatgactaattacttaaatatttaattaattaaaaatgcatatttaattacccacgatgatggaacacttgatcttagccaaaacgctgagtagtggtaactatccacagtgataaatgccatctaggaatattccgagggacaatggcagaggatgcgacggaatcgtgacatggtctagggaagggtaggggttctgcagaagggatgtgaggaagatgaagagaaattagccatagttggggtgagggccactcaccaaggtgagtagctcatgcaacggccctgaggccattaggtatgagtgggaggatccccaggagtgagaaggccagatatgcagttcaagcctggcccagtggctcacacctgtaatcccagcactttgggaggctgagacgggtggatcacttgaggtcaggagttcaagagcagcttggccaaatggcgaaaccctgtccctactacaaatacaaaaattagctgggcatggtgacacgtgcctacaatcccagctagtcaggaggctgaggcaggagaatcacttgaacccgggaggtgaaggtttcagtgagctaaaatcacgccattgcactccggcctgggtgacagagttagactccgtcttggggaaaaaaaaaaattagctgggtgtggtagcacatgcctgtaatcccagctactcaggaggcaatgctggagaattgcttgaacctgggaggcagaggttgcagtgagctgagattgcaccattgcactccagcctgggcgacatgagcaaaactccgtctcaaaaaaaaaacaaaaacgcagttccaaaaaaattaatagactttattttttagagcagttttaggttcccaacaaaactgaatggtgagtgcagagttcccaggtacccgctgtccccagacacccacagactccccctctatccacacgcccaccagagggttacatgttacagttgatgaaactgcgttgacacggtatcacccagagtccacggtttacactagaattcatactttttttttttttttttgagacagagtctcgccctgtcacccaggccggagtgcaatgtcaccatctcggctcactgcaacctccgccccctgagttcaagcaattctcctgcctcagcttgccgagtagctgggattataggggtgtgccaccacaccaggctaatttttgtatttttagtacagacagggtttcaccatgttgaccaggctggtctcgaactcctgacctcatgatccacctgcctcggcctcccagagtgctgggattacaggcgtgagccacagcgcccagcctagaattcattcttgagtttagagactagcctgggcaacacagtgggactctttctctatttaagaaagagagaaagaaaaagaaaaggaaagaaagatagatgatggcgaccaggcgcagtggctcacacctgtaatcccagcactttgggaggccaaggcggttggatcacctgaggtcaggagttggggaccagcctggccaatgtggcgaaaccccgtctctactaaaaatacaaaaaaatgagctgggtatggtggcaggtgcctgtaatcccagctacttgggaggctgaggcaggagaatcacttgaaaccagggggcaaaagttgcagtgagctaagatcatgccattgcactccagcttgggaaacaagaatgaaactccatctcaaaaaaaaaaaaaagaaagaaaagaaagatagatggtagcattgcaaccatcctggctaatttttgtcgtaatggggtttcgccagttggcccaggctggtctcgaactcctgcactcaaggaatcttcccacctctgcctcccaaagtgctgggattacagccactgcgcctggcttcggaccccactgtggatgaattgaaaaggagtggagagtggggcggtcacagaccactaccatagcctgcctcatttctgggtcctgtgccagggtctcagtgaactcacagggcctagtgctctgtcctggcctcagggtcccactgcccaccacagtcagccaggcgctccagggggctctcacaccatgagctgtggggacactgtgaggaactgtcacccagatccggcctctccaatcccagaaaggcctgtgtgagaataagagcagccaggtgctggcaccgactctgcccctggggtctttgcacccaacactcactggtttccatctttcttttttttcaagatggagtctctctctgtcacccaggctggagtgcagtggcgcaatctcggctcactgcaacctccgcctcctgggttcaagtgtttcttacgtctcaccctctccagtagctgggattacaggtgcccgccattacaccgggcgaatttttgtatttttagtagagactaaagtgctgagattacaggtgtgagccactgcacccagcctcattggttttcatgttgaatgttcctgaaacttggggacacccatgcaatgtgggagtccttccttactagaattcataacagtattagtggttatagtttctgttgattgaatcactcctctgcactggacacgagatgcatcatctcattcaattcaccatttatttggcaaacattgatcaagggcctgctactgccaagcactgttctagtggaggacagaaaataaacaggtcaggctgggcagagtggctcatgcctgtaatcccagcactttgggaggtgggaggatcgcttcagcccaggagtttgagatcagcctgggcaacaaagtgagaccctgtcagtacaaaaaataaacaaaattagctggacattgtggtgcatgcctgtggtcccagctctcccttgggaggctgaggtgggaggactgcttcagtccaggagttgaggctgcagagagctgtgattgtgccattgcgctccagcctggataacagagcaagatcctatctaggaaaggaaaaaaagggagtggggggaggagaaggggaaggggagggaaaggggaagggaaggactgctgcaatgaaaaacgtatcttgtggccaggagcggtggctcatgcctgtaatcccagcactttgggaggccgaggtgggcagatcacctgaggtcaggaactcgagaccagcctcaacatggagaaaccccgtctctactaaaaatacaaaattcgccgggcgcggtggctcacgcctgtaatgccagcactttgggaggcagaggcgggcggatcacgaggtcaggagatcgagaccacagtgaaaccccgtctctactaaaaatacaaaaaattagctgggcgcagtggcgggcacctgtagtcccggctactcgggaggctgaggcaggagaatggcgtgaacccggaaggcggagcttgcagtgagccgagatcctgccactgcactccagcctgggcgacagagcgagactctgtctcaaaaaaaaaaaaaaaaaaacaaaattagccaggcatgcctgtaatcccagctactcgggaggctgaggcaggagaattgcttgaacctgagaggcagaggttgtggtgagccaagatcgtgccgttgcactccagcctgggcaacgagagcgaaactccatctcaaaaaagaaaagacaaaacaaaaaaaaagaaaagcacatcttgtaacagattatagggaaaaaaggaggaatgggtcagagaggctgggaaagagaattccagggaagacgtgctaggaagatgcaacatttgagttatggccagaaccagcaagaccagggggaaagtattttccccagagaagggacccttgcagtgcgtagatgagaccttgagtgtttcacacatcatggaccagagtggctgagcagaggagaaaggaggaggacaggcaggtggcaggaggcctggaggagagaaacttcagggttctgtgaaactctcccagatgcttgcctgggccagaattaggccccaatagcaaacaatgggaactatcattaacactatttttttttttttgaggcagagtttcgctcttatcgcccaggctggagtgcggtggcgtgatcttggctcactgcaacctctgcctcccaggttcaagagattctcctgtctcagcctcccgagtagctgggattacaggcgcccgccaccatgcctggctaatttttgtatgtttagtagtgacgaggttttgaatgttggccagactggtcttgaactcctgacctcaggtgatctgtcctcctcggcctcccaaagttctgggattacaggtgtgagccactgcacccgccccaacactcatttttgtgatacctaaagttgtactttactgtggacgaaaccatgagctctttgggggcaaggactgtccctctgttccccagccacccccgtgatccacaattggagctcaccagagacctcttcatactaataagtggatcaagcctatgaagttggagggggaaagaggcctgggggttatgagatgaaactcaatgtgcta

SEQ ID NO: 65 - DNA, 1167 bp, Homo sapiens
caccgccgagaccgcgtccgccccgcgagcacagagcctcgcctttgccgatccgccgccccgggaaatcgtgcgtgacattaaggagaagctgtgctacgtcgccctggacttcgagcaagagatggccacggctgcttccagctcctccctggagaagagctacgagctgcctgacggccaggtcatcaccattggcaatgagcggttccgctgccctgaggcactcttccagccttccttcctgggcatggagtcctgtggcatccacgaaactaccttcaactccatcatgaagtgtgacgtggacatccgcaaagacctgtacgccaacacagtgctgtctggcggcaccaccatgtaccctggcattgccgacaggatgcagaaggagatcactgccctggcacccagcacaatgaagatcaagatcattgctcctcctgagcgcaagtactccgtgtggatcggcggctccatcctggcctcgctgtccaccttccagcagatgtggatcagcaagcaggagtatgacgagtccggcccctccatcgtccaccgcaaatgcttctaggcggactatgacttagttgcgttacaccctttcttgacaaaacctaacttgcgcagaaaacaagatgagattggcatggctttatttgttttttttgttttgttttggttttttttttttttttggcttgactcaggatttaaaaactggaacggtgaaggtgacagcagtcggttggagcgagcatcccccaaagttcacaatgtggccgaggactttgattgcacattgttgtttttttaatagtcattccaaatatgagatgcattgttacaggaagtcccttgccatcctaaaagccaccccacttctctctaaggagaatggcccagtcctctcccaagtccacacaggggaggtgatagcattgctttcgtgtaaattatgtaatgcaaaatttttttaatcttcgccttaatacttttttattttgttttattttgaatgatgagccttcgtgcccccccttcccccttttttgtcccccaacttgagatgtatgaaggcttttggtctccctgggagtgggtggaggcagccagggcttacctgtacactgacttgagaccagttgaataaaagtgcacacctta

SEQ ID NO: 66 - protein, 147 aa, Homo sapiens
MATAASSSSLEKSYELPDGQVITIGNERFRCPEALFQPSFLGMESCGIHETTFNSIMKCDVDIRKDLYANTVLSGGTTMYPGIADRMQKEITAPSTMKIKIIAPPERKYSVWIGGSILASLSTFQQMWISKQEYDESGPSIVHRKCF

SEQ ID NO: 67 - DNA, 1814 bp, Homo sapiens
ccaccaccgccgagaccgcgtccgccccgcgagcacagagcctcgcctttgccgatccgccgcccgtccacacccgccgccagctcaccatggatgatgatatcgccgcgctcgtcgtcgacaacggctccggcatgtgcaaggccggcttcgcgggcgacgatgccccccgggccgtcttcccctccatcgtggggcgccccaggcaccagggcgtgatggtgggcatgggtcagaaggattcctatgtgggcgacgaggcccagagcaagagaggcatcctcaccctgaagtaccccatcgagcacggcatcgtcaccaactgggacgacatggagaaaatctggcaccacaccttctacaatgagctgcgtgtggctcccgaggagcaccccgtgctgctgaccgaggcccccctgaaccccaaggccaaccgcgagaagatgacccagatcatgtttgagaccttcaacaccccagccatgtacgttgctatccaggctgtgctatccctgtacgcctctggccgtaccactggcatcgtgatggactccggtgacggggtcacccacactgtgcccatctacgaggggtatgccctcccccatgccatcctgcgtctggacctggctggccgggacctgactgactacctcatgaagatcctcaccgagcgcggctacagcttcaccaccacggccgagcgggaaatcgtgcgtgacattaaggagaagctgtgctacgtcgccctggacttcgagcaagagatggccacggctgcttccagctcctccctggagaagagctacgagctgcctgacggccaggtcatcaccattggcaatgagcggttccgctgccctgaggcactcttccagccttccttcctgggcatggagtcctgtggcatccacgaaactaccttcaactccatcatgaagtgtgacgtggacatccgcaaagacctgtacgccaacacagtgctgtctggcggcaccaccatgtaccctggcattgccgacaggatgcagaaggagatcactgccctggcacccagcacaatgaagatcaagatcattgctcctcctgagcgcaagtactccgtgtggatcggcggctccatcctggcctcgctgtccaccttccagcagatgtggatcagcaagcaggagtatgacgagtccggcccctccatcgtccaccgcaaatgcttctaggcggactatgacttagttgcgttacaccctttcttgacaaaacctaacttgcgcagaaaacaagatgagattggcatggctttatttgttttttttgttttgttttggttttttttttttttttggcttgactcaggatttaaaaactggaacggtgaaggtgacagcagtcggttggagcgagcatcccccaaagttcacaatgtggccgaggactttgattgcacattgttgtttttttaatagtcattccaaatatgagatgcattgttacaggaagtcccttgccatcctaaaagccaccccacttctctctaaggagaatggcccagtcctctcccaagtccacacaggggaggtgatagcattgctttcgtgtaaattatgtaatgcaaaatttttttaatcttcgccttaatacttttttattttgttttattttgaatgatgagccttcgtgcccccccttcccccttttttgtcccccaacttgagatgtatgaaggcttttggtctccctgggagtgggtggaggcagccagggcttacctgtacactgacttgagaccagttgaataaaagtgcacaccttaaaaa

SEQ ID NO: 68 - protein, 371 aa, Homo sapiens
MDDDIAALVVDNGSGMCKAGFAGDDAPRAVFPSIVGRPRHQGVMVGMGQKDSYVGDEAQSKRGILTLKYPIEHGIVTNWDDMEKIWHHTFYNELRVAPEEHPVLLTEAPLNPKANREKMTQIMFETFNTPAMYVAIQAVLSLYASGRTTGIVMDSGDGVTHTVPIYEGYALPHAILRLDLAGRDLTDYLMKILTERGYSFTTTAEREIVRDIKEKLCYVDFEQEMATAASSSSLEKSYELPDGQVITIGNERFRCPEALFQPSFLGMESCGIHETTFNSIMKCDVDIRKDLYANTVLSGGTTMYPGIADRMQKEITAPSTMKIKIIAPPERKYSVWIGGSILASLSTFQQMWISKQEYDESGPSIVHRKCF

SEQ ID NO: 69 - DNA, 30810 bp, Mus musculus
gctgaagtggatactttgaaactcagaattgttaacagaagtgtctgtccagtgtcctgttgtctctgtgctctgctgattgtcacagatgaccatccatccagactatatatgctagtgtaaaaaatgttaacctctatgggatctgtccagtgtcctgttgtctctgtgctctgctgattgttacagatgaccatccatccagactatatatgctagtgtaaaaaatgttaacctctatgggatttgggggtgaatagatttggcaggaaataaatgttttaaagatagcttataaaaaattcatcttttattttatgtgtatttgcctacctatgtatgtgcacaatgtatgtgcctgatgccctcagacaccaaaagagagagaatcagagcctctggaaagggagttagaaaagactgcaagccatggtgttttgtgctgggagatgaaacctgtcttcccaagtacagcaagagctcttcttcactgagccagttctccatcccccaaactgcattctgtttcctagtaattatgcaggtaaataaggtgttgtgtttgtaccgctggagggaaacaatttatggcaccccctttctgtgagtggccttaactgcatatcaaaggcatctttgaatacacggagaaatataaaagacctgttaaattaatcaagccaatgtggataagtggctagcataagctactgattacattgaaatattaaattagtagaaaattatgggaagtacttttgcttccactgctttttgtttcatggttagttttctcttttgcactttcggcagatttactagtggattaatattaggaatatcctggtcttgaagttccttttagaatgtgcctatatataattgtgcatatataaatccacaatctaaaaccaagacattctcttggtttcttagtgcatttggggacagtcatctgagacatgtcacttggtcctagttatgtggtaatgagaatggaaagatttctgtagccatagtttctagtcccgtggaagacactggagatatatattttttttttttcattcattcattcctgaattcggccttttgctgaaacagactataaatgagtttacccatccttgtgtgaggtgtagtgtgttgtaaaaactagatgtttatagtaagaagtatgtgtggtgttcatccattcacagaaatgggtgtgatttgttcagaactccctcctcttaactaataaatctgttattactgatagcctgatttctgatttcttagacctttgctccagtgctccaaactagagttagaacttgcttaagatatgtaagtgcacactcttctgtcagtgtcgggggtgtcttttggttcatgagtagtagccatgtgctttggatggttgcactgaattatggaaaccaaggacatcatgggctttcttcttctctctgcacccccagcaagctattcctttggagttttaccgctaccatccatgacttacatgagcttaaacatgagtagatgtaaattaccgaagaattgacggtggagatctgaagaattaggacgtctttttctattaagtcaaggaaatctttacaaagcaaaaagatagttcatgtttcctctcagacaagttttcatctttctttgcaaagtttaaccctgctgttcctgtccctaacccacagtagacgttgctaagtgtgtgtgtgggggggttctctctccctattcctctcccctctctcttcccctctctttctccccctctctcactcccccccctctctttttctcttcccctttatctctctttcttcccccctctctccctcccctcacgggtgtgtgtgtgtgtgtgtgtgtgtgtgtgtgtgtgtgtgtgtgaatttttcccttcaattcccttgggttggagctgctcatagagacaggcagctaatatcttttggggggagggagggtatttcgagacagggtcttttctgtgtagccctggctgtcctcgaactcactctgtagaccaggttggcctcgaactcagaaatccatctgcttctgcctcccaagcgctgggattaaaggcgtgcgccaccactgcccagcaggcagcaaataacttgagttgatgtttgagctctataccagtttgtctccactaaagtaataggcagaatcttcctcatctctttaagggtctatactacaggacataggcctgcaagcctctgtaaagggcaggataataatttagactttgttgacatccttatcagggccattcagctctgccattttaacctggtgacaatcaaagatgatgttcattgaatggcgtgactgtgttccagtcaagctgtttccaaacacagcttgcagctgctggaaatgcagctcagtgatggaatgcttgcccaggagatgccaggttcgacccctaagtatcttttctgttccaggctctgcattaagttttaattatacagcattgatcatgacacctagaccctagtccacaggatatttaattgtcttaactttaactgttagtgtgcattgggacaaactcgagacaatttatgcacgtcacacagcctggagggaattttatcctgtgttcattcttgtgtttgttttgttttatgggcaggatctcaacatgtggctcttactgtctagaactcaaaaagatcctcctgcctctgtctcctaagtgctgagattaaaatttgtgccatcatcacggctaacctaaaagcagttgttatggtgaggtagggatgcctgcccctgtgtgtgagacctcaggcaaacactggaggtgctgtgttctgtagcagtgtagctacccaactgcaacttcagtgtgccttgaccagcagatgctgtgctatcagcagacacttagtatccaagcaatgctgtggaatcaagttgaaacaccagctttcttaaaggtcctttggtcagtttcttgcagtttcctctatatggtatattgtttgtgctatattatttctggccctttttttctgattttcattattataaagcgggtttctgttccgaattggggctcatgttttaaaaataggccataagccagacggtggtggtgcacgcctttaatcccagcacttgggaggcagagtcaggcagatttctgagtcccaggacagccagggctatacagagaaaccctgtctcgaaaaataaaaaaacaaagcaaaacaaacaaaaaaaaagagtagtctatatattgatcttaataaaaattcacaataatttggatgtgtcattttgttgcctgctattaaattactactagatacttgtactattagaattcttacgttgatttttaagtattttccgtttctcaatataacatactaccctttaggttgtctgctgagtcaaggcccctgagcggttttcagagcagagctttttcctgtgttcctgtaaatacttggtgttgtttctttcctcttcctgtgcctgtgtgatggtcaggcttcattctgaagagttctaattccatattagacttcctctgatacctttgttccttttggccttggtatattcttttctattgaaacgctgtagttctctataagtcagttcctggtttccacttgaagtcttcattgtgtttctcatagcacacgctcctcccacctttggtggcactgcagtttgaacccacaccctgatgctaggttacagccaagcactgagccatatccctcgcttagtctctgttttgtctttccctataaggcttcttgagagcaagtgtgctctattcccttttataactaagacatgtaagaccaagtagatgcctatcaacatatattttattctgtagccatcttttttacatgccattgttagtggactttcccaaggcattagaatacccagtaagtagtgttgcttggagggcactggggcactctggcttttaaatgtctagtgtcatattttggctttactagaacgtgatctgattcagaaattttggttggaaactatatatagcttatcgggtgatagcttaatgaaatgtgaagtagcctaaaagttccccctcttgtttttcccagtggtttaactattgaccacagacatatatggagtgtagatctgtgcttaggaaggtctgtacctccttattccttaggcttggcatttgtatgtgtttctgttatataaatcataggatgcaaaagttaatatctttcaataatagcagatatgtaacttacagtaaattggctgctaaccattgcagattgtatcagcagataaagctagggctagagagaactcaacagttaaaagcacgtgctgctcttgcaagacctgggtttagtttccagtgtccacatgaaagctcacaactttgtaacttccattccagaggtgaggaacttagacaatatacatatattcatgcaagcagtcgtacacataaaataatcttagaaaaataagaccaagtagaacataactgttcaacatgcccctacacctgatggcattgccggaagcagagctggcagctaaatacactgattgcacaggtagtctcagaacttcagagaggttgacatgataaagaggatccggatttaggccaggctaggcacaaggccctgtaagaaaggaagagagcaggaacagaaaccaaaaccaaaaatacgcatgcttgctgaggcaggaggatagtgttccaggccagcttgggctatgtgagagtttgtcttacacagaaacattaatgccgccttgtgatcatggaaactcaagtatataatggacttgtgtgtttggttcatcttcctgtgtcatactttttctttgtcaaaaataagtctgcacaaaatgcagtggagaatggaagatcctgatgggtcaccagtactgattgcctcctcccagaccgttgcctttacaattggatgctttttgtttcatttcctttcttgaggtctatagtctagcccatactggcataaaccctagatcctcctgtctcagcctcctgactagtgaaattaccgacatgccaccacatatatcatagctaaaatgtgtgtgagtgcaggcatgtgtgtggcacaccttgacatgcagaggtcagagaacggcctccagtgtcagtcctcatcttctagcttgtttgagactaggaccttttgttgtttgccactacctttgcaagactagttgacttgcaacctctggggaccctgtctgccttcatcttgctgaagagcactggagttacagatagtggctacagtccccagcctttgtatgggtgctgggagtcaaactcaggtgtcacagctgactggcaagtgcttcagccatgtgtctcctcagcttttagagtccatgtgtctcctcagtgctgcttttagagttccttggctgtctgaagtcaagcactgtgaacagctaggtagctaggatctctagaacagcgggttaatattcactctctgcttacttactgtgttgctcagtcgcttaacattttgggcactgtgtttcatttgatcttcgaaactctgaagggattctgttaatcctatccgttaaggaagtgacacatacagaaaggccaaataatgacaaaggtcatgcccagtccagcattaacttttactgtatttttctagtttatcataaaaattaccttaaacccttcctgtcatagtctactatctatagcaagtagtaaattaatattcataatgcagttatctaaactgtcctgcacaggaagcctgacaagtaagtgcacttgcctggagagctagcaacgtgtctaataagaaaaaagggttgggttgtttgttttggatttttgtttgtttgttttgggtcagggccttgtttatctggtcactcggctgagagaagcctgtagtgcagttaatgcattccctgcaatcaggtcctgaacgcaaaggtgacgtgtgtaacagaactggaagacatggtcttgagttgcaggtcaggttttgttcctgaagatttcagtaaaagatttggcaggattggttgggattatagctctatttactggaactgttaatactaacccatgaagtggtaggagagaccttttccctatttgtggtactaaatctggtcagaacggacagaatgctgtaagcagcttcatgttggttggttcttcgttatgtttggtttgtgaggccgcctcactgtggccccgactcccccgtcctgctgcctcagcttcccaaaagcagaggctccactacacctggctaagagttttatttttgacaggaatctgggcctctttttttcttgaaagataatttttaaacctgctcagtcctgaattctgttactgtgcccagcaggttaggctgtgtgtcctgacactgaattagttaaagtttttggaagcgaaaggagacgttggtgatcatcaggaaccgttgcggtgctactttgggacttggaggcggaaagaagtcaggcatcatctcacttgcagagtttagtgggagaagtagcatcccttgacatcaggaactagtagttaaggggttttacttagccctttgtaatttaacatcgaagaattccaattgagggaggagagttaaactaaacaacttgaggataagaaaactgcttgttaccgacattctaaggggagcatttgtagctacttgtagactctttggcatagaattttactggaaaaataatcaggcataatcaggcctttaaaatcttgctttttgaggctgaagagatgactctgtgagttaacatacacaagaagacctgagttcaactccagcaccataccccactttgtcctttttatacttcccaagcttaattctcgtgaccgtttccctccctcccccctcccccaatttggatgatagttggagagaaagccctgctattgccctatttagaaattagaaaaaagggttttcactgaatgaagcatcttggagatttttgggttaccaagccacaaggaagaagaaaatgtagctctttatatcttcctttggttgaatactcaatactgttaataggtttcctagttatgggcagtgtatgtgtaggcaaattgtgacattatagtcagacctttaaaaatctgtatcatatttgaaaaatacacaaaaacatattgaggcggtgctttcagagagggttttttatgtaattcacgcacgcacacacgcacgcacgcacgcacgcacacacactgaccagtgtgtccctaaggaagatttcttaataagtttcagttttcagaacatgttgggctgtttgcatcccctgtcttgatgcttttaactgccttcataagtgaggggtagttcagttggtatagctaaagttctagaacatgtctccacagattccctaaggtgtgcagcctgtttctgacacagaaggaaatgtagctgtggtggtgtgtttatgacaagaagatattcccaccatcaagaaaaagtgccttgtaataattcaatcctctaaaccttgatgagagtatagggtacttggatgctggcatatggcagaccttaaccgcatacttaagagctacatgtttcacaggctataatctattcctacaaattaaagtgtttcctgtgcttacactttaaacataaagaagtgtcttccttacacacacatctctaatcccacccagcactgaggaaactgagaataactgcgagttcgaggccatcctggtctggaatgagaccctaccactaaaaaacaaacaggagaataaaggtttcccagtagattgtgaggttcccccgacaaaatatctgttagaaggcaaaatgattacaaactgataaaatgattgtcaccatcagggttttataggtgatccaggtgaagtttgagcttagtccctcatgtttgcctgaactgatggttggttttactcatcttcagtccccaatgggccagcttgaaaagcttatggggccttttccctgcgttctctgtaacaggtgaaagcaagaccacccaggccaaaacaaatgtgagacaaaacctcacagatagatgagcaaagaatcaaacagtgttgacaagtggttccactcacagtgcgaatcagaaagccagctgccttctccataggctacttggttacaagtcttgctgtagcaggtcagggagatgagctcaaggagtcagatgagagcctctgacagtgctgctagacctggggagctttctgaagtgaggctgtgagggtcttcagcatgagaaggcaggaaatactaagcatacagttattacttacttaagcaaaaaactgaccatactagaaaactgcctcccctgggcagagcagactgctgcttttatgatttgaggtaaattatgaaacttaaagattggcaaacttgcagaggcaggagtaagttatcatggactgcagaatggaagaactgtagagctgggatcttacagtgtggctcaggttagcctcaagcctgtgtcttaagagttctgagattgtagggatgcgccatcgtgcctggatgctgtgtttccagttctacatgtcacagtcatttttctagaacattgtcccagggaacagggattttcctctattcgttgagtatatgcctgttctcagctacttacagttgatagttgtatgtggttcaggttgtttactgttgtcttaagatggtttgagaaaagaggggtaggtatgtcatgttagcttgtaagtcgtaaaaagctcttagtgatgtttctcagccaccaccccaaccctctttttttcttctccttttcccttggatattctaattgaaattattattaatgcttgcttctagattcttgggtcttaattagtaaattgaaggaagtgcacatagattgcatactaacaagggaaaagcagagcaatagtacatgtcaggtgtgctgcagagacatgagtaggctttcaattaggaggacccagggctccaggtcgttgtcccgggccttgctttatgggctcttggcaggagaggaggcgtttgactgcaaagggaatatgaggctgtggggtggggtctctgttttgcttggctggttttgctcactgcctttctcgtgatgcatccagttttaatcatatacaatgcccagctatgggtaaacataagatggtacttaggaattctctaaaagttcactgagcacagtttgccttactgcacaatgtcccaaaactagttcagggcagatctgccctctcatgctattcctaatgtatctaggattattctctgtccatgacacagggcttcttgagacttgctaggggagatttaaaaacataccctgttgtttgtggtggagcgtgcttgtagttggatgcaagttgtgggtctttggatgctcacagttgggggcgaggggagtcttagaactccctgtggctagtgcctgctctggtgcaggtcaagaagggtatatgggtcgcctaaacagagtggtgtcacatgcccataagctatttactatacttctctgccccaaaaagagggaactaaaaagtattgtctgtaactctttgtatcttccctcattattattatgcatgtgtgtgacatgcatgtgtgagtacatgtaccatgtgcatcatcacatgtgggactatcaggatagctttgtggacttggctgttgccttccacctctacatggattgattatcagactcgagttgccaaggcgttgacagcaagcactataccgagacagcacgcactttgaacctaactctgtagaaaacttgcacagtgctcccatgggaatctagtctagtaatcattttatgtaaagctgttagtctggctgtcttataaagagcacataaataccaagacttaaagattgttttccttcttctttaaccaggtactaagtgtgacagtgtgcaccatgcgtgaatataagctcgtcgtgcttggatcaggaggcgttgggaagtcagccctggtaagtcgttcctgcccagtggaagcttttcacttcactatggtcttttctactgaggtggcttttgttttgttctcatatttagtagtcaaatggaaatcttgactttaaattcctacttctgcctttacataattctgggaatgctggctgaggttgcagctttaaaggccacgtccattcctatagtgatgtggatagaaccaagggcttcccgcagggggcagagcactccagccaagctacagctcagcttttgttgtttatggttttgtttcctgagacagttttttccgggtacactagactggccctaaccacgtgacagtcctcacttgtgctggaattagaggtgtgtacaccacacccagctcttgtaagatatgattttggttatttgtcttggtctgattaaggtaagatcccataacttgacaagaaatataagatttttcttgtaattttagacaattattaggtgtatctgcatagcatttatgttatatgagaattaagtttaagctttccagagagtagcggcctacacatgtgtgtatatttgcatgttagtgcaatatagagaaattgagggttttgtttaaatttgtaagtgtgtgtgtgtgtgtgtgtgtgtgtgtgtgtgtgtgtgtgtgtgtatttgcaattagtcttttttccaagcctttctctatgtagttttgtattgtttaatgggcatcttttccctagcaagggttagctttagaagaaacagttggatgtgatgagggagacagacagagttagcttaagtaaatcagaatttagcaaagaaccacaagaacacagaccaagagaatggtggtgcactcctgcaagcccagcacttgaggccaaagagagatccagagttaacggccagcctgagctacatgggactgtgtttcaaaacaaacgtagattgactttctctttactgccgataagataaaccatcttacttggtctttttaaatggccacctaatgctgtgcatggtggtgcatgcctttagttccagcactcaggaggcagaagaaggtggagctacgggagttgaaggccacctggtctccagagtgaggccctcgacagcaaggccacacagagaaaccctgtctcaaagacagacagacaaacaaacagaccgcctgtgtaggatttaaccacccttaaatcagactgagaagtgtatacaatattcatttgcttttttgtttgtatctgcagtaatggggagatgtgttgactgtgtttatgggttaaaattacagtgccaacactgcacaaatgctctttgagtcactgttgtactcactgtatagatgtgtagtaagtggttgttaacactgtgtagttaacagcgacaaactttatatgatcagtgcacacgtggtctggtttgtccttatcctgaattatttttgatccatagttggttatggaacccacagatacaaatagttaactgtaatttaaaactacagatttaaactgagcatagtggtgcaagcacataatctaacacttgggtaggagaggccagagggtcactgcaagctccaggccagagtgctctatgtattgagttccagactagcctgagacacatggtaagaccctgcctcaaaaataaaattaagaaaagtttacagattcaaatgtgttcttctttttggaatataatgttattttaactttttcccagactgtacagtttgttcaaggaatttttgttgaaaaatatgatcctacgatagaagattcttatagaaaggtatgttactttttaaaggcctttaggttttaatacaaatgtaaagacttattttttagtttttacttatcaaatgttttatataaattaaaatgaaaagatgtttgttagtggagtgttcacgtgctatctcttgtcattgcttgcctaccaccgtcagcaattcataagcacttatacacacgagtgagtagaacgtttacatttattccaacctcagaattgtgacttgagtgtcagttcacgcagcaggcccgtgttcccaggccccactcactggaaagactgatagccttcagctctctcactcttctggaggcagcctccagtgggcttcccatccttgctgcttatcgcctccttggcccatactgccgcagcagaaaagtgagtgccggtgtttgctagcacagcacatgtgcagacagacttactttagtagtgggagttgactctctaccttttattcctagaaaacattagaagggaaaacacggatacgcactttatttcattgttgtgacactgcttccttgcttccagaaagtgtgttctagtgtgacaagacagtagagtgtccagagaagtaaaggcatcacagggtgttacgggcgggctgactcgcagtcacgctgccctgttgagctcttgccttcctgcttggctattctgaagacatttctattccagagtcagtgttgagccccattgtggagtgacttactgggacatggggttgacacctgactaggatttggggtgctttgaagactgtgatccttcctgttctcttgctgtggtagaacgggggacataaagaaggaagtgtgtgtctgggcctacggtccgtcgtggcagcaggccgcaggcatggcagcagagagcagagcagagagagcacgctgagtctcgggagtgtgcttctgccactgctagaccaagtgggagccacgtgctcatatgccttaaactaccgtgccattcctaggaaacaccaccacagtgacttaggtagtttttaagtattgcttgatatgaccctgtaaagatcctatagcttgttacctgttgtgctttttactgttgtggatattttaaagtagttttgcatgcataaaaaaataaaggactattttcattattttttcctttagcaagttgaagtagatgcacagcagtgtatgcttgaaatcttggacactgcaggaacggtatgtaaaataaaattatcaaagatacgcagtgtatagtgctggttttttaaatgttgcactttctaaatgtaatatgccaatagcaaatgttttaaatgctggagtggacatttccatggtctgcttgtactggtccacttaagacagacttactgttatttcaggtggtgttgacaatgcgtggtgcacattgattctttgacgctatgaaattgttgtttggtagctgtcctcagaagtgctctgacgtaactgtcaattctgttactatcatgaaatgcctatagccagctagctttgtaaatgtaggtgtgttttattttgttccggaggtgcaaggtctaggaactgagtctggtgatggcttatgttcctgacagaacctcaaggccaccagtgcataacaagtgacaaggcacaggaacatgcatccacgtgtctctccctctcctgtaaggagcctgttcccctaacaacttgaatcctaattgcttcccaaaggcctcactcttaacgtccatggaattaagtttctgcctctggatacctcagaatgaggcttcagttttggcatatgaagcctttgagactattcagtcattgagaccataacaaccaattagatttgtaggtattcaaaagtaagggaaggattctgggtacaaaaccatcagacatagtgaagaagtgtagaaaaatacagtaaaatacaaatttccatgcagacagccccacagaatgatggctctgtcatgctgtacctctgggataagacgagagtgctcaacacttgatggtaggttaaaggctgctcttagagacactgtatttctgttccagttgaacatctgttgtatgtacgtctgtggtaagactttaaaagaactaatataatctctccagcagtatcttgctgtaatgtgtagttttaaggagtgttacgtgatgattttctaagctggtatcttgtacctcccaccacaggagcaattcacagccatgagggacctgtacatgaagaacggacaaggcttcgctctggtttactccatcacagcacagtcgacatttaacgacttacaagatctaagagagcagattctgcgggttaaagacactgatgatgtaagcagacttagtcatgaagacttaggtttattccaaacctagttaatagtcagttttaaaatttaaatattctctcaacttaattagtttttttgatacagggtttctctgtgtaaccctggctgtcctggaactcacgctgtagaccaggctggtcttgaactcagagatttgtctgcctcagccttccaagtgctgggattaaagagaccaccacccagcttgcctttatttttttgctcctgcttttttaaaagcagtttaagtgtttgctgctcaggcatgatctcctttttgatctcgccacaccagaattaccacctgcaggctttgtgtctctgtttctagaccatgagtatgtggggagggagaaagctgtgtgtggccacattcacggtagacttaacagactctccctatagcccaggctagccttgaacttggagtgagcctcctgccttcttcccccaagtgctgggttgatgggcaaaatgctttgaaagtaagatctagccacatttatctatgaccatatatatgcctaaatatgtctctgtattggaaaggaacataatggtaaagacaaacaaccaatatgttcagttctaaaacattaaatttaggtgtccctgcagagtgaagtgtaatggactctaaaatctatagatttcacaacggtggctttaattcctcattacctgtggcataggttcttaagtttgtgtgatcttatatcaaaatttcagtaggaattgctacagaacctttgactcacgaggctagtgtagggcttgagaatttgcctttttgacaggtttgttggtgatgctgctgcggatgtgaatgccacactttaatgaccattgtagcgctgggcggttgggtgtgcacttattcctagcaggttcctggacagccagagctataagtgagactcttagctcaaaacaaaacaaaataaaaaacaaacaaacaaaaacagaaagaaagagacaggcagacagacagaaaagaaagaaagaacgaaccaatcatagagttaagtgaactaatattgaaagagctaagtgcctttatggtggatgctgtcattttctgcacttctgtttcttttaaagatttttttttaatgtttttatgtgtctgagtgctctctctacatgtatacctgcatttcagaagaggacatcagatcctattatagggcggttgtgagctgctatgtggctgctgggaattgaactcagaagctctggaagagcagtaaccagtgctcttaaccactgagccatttctccagcccctttctgcacttctgtaactgagaatctgcaagtttttgtttttctgcaattgcattattgtttatttaaaaagtatcttttaaaatgttaatggccactagtggtttgcattactttccccgtactactcttttaaaattacaaacattagatctagcccaacttgagaggccattaataagtatttatttgtactaagttgatttattttgtcatagactgtgaaatgagaggttacacttaggacgtgagaagctgaaatttctgctttagggaccttcttaatttcccctttttgtattgtgtaattcagtaaccgtgtgtcaggaaccaaacaaacgtgaagttggttcacacccttaaacattttgaagtgttgaaatctgccagcttttcatggtaacaccctttgtacttcctattaaaaaggttttttgattactgtgattgggtccgctgtggtatgaatctcccctctgttgtaagcaccttatagcttggtcgtattgtataattgtctttttccctcatgactgtcttcgcaggttccaatgattctggttggcaataaatgcgacttggaagatgaaagagttgtaggaaaggaacaaggtcagaacctagcaagacagtggaacaactgtgcattcttagaatcctctgcaaagtccaaaataaatgttaatgaggtatgtgcatgtgtacttagaatagcttcttaggctcagtgcagcatcttaaattaatggagaggcggggaggtggctgagccccgaggcgcttacttactcttctgagaacccggggttagttcccaggactgacatggtgactcatgaccatctggaacccaagcaccctcttctgatgtcgctgggagcctgcatgctcactgtgcacataaactcatgcatgacccaaacacacacataaaaataataattttttgccagatggtagtggcacatgccttaaataccaacattcagaaggctgaagtgggtggatctctgagttggaggccagcctggcctaccaagcaaattccaaatagctggggctatactgaaaaaccttgtctccaaaaattaattaattaatttttaaagaaaagtattacaaagaactctaagttaatatatgctcttataggccaaaaaaaaaaaaaaaacttgtctggcatatgcatgcatatgagtaacaatatgttggtttaagggaaagttaggcagaaggccagttttaaaaaccattaatttcattgagtatttgagagtttatataaaggctaaaactcagaaagatagtgtggtccttgaagtaggtgacgccccatagatagcaaggcacaaaagacgcgcaaagccaagccgtctgagacagtaaagggcttctttgttgtaggagagctaactgcattaagtagaattcttcaactcttactttaatagaaatggttttaattttctcagaaaacaaaacaaaacctggtacttataagaacactggctttacactccttctgcaaaagaaaacgtggagattcctttacagctgtggaaattgccaggagtttttgtttctctttttcatttttgggttttttgagtttgttttccctctttaaaaaaacaagtggtggtggtaataataataatagtaattataataataataataaaatatgtttgcagatcttttatgacctagtgcggcaaattaacagaaaaactccagtgcctgggaaggcccgcaaaaagtcatcgtgtcagctgctttaatgtactgaatgcattgtagctctgagccaggtacgttgcattcacctcactaaatgatgtttaatccttacagatagatatcaggacttggtgtggaaatcctggggactcagattacatgttcatttacatattcatcagaagtgaggggcttcgcaggagtgaacttggttgttcagcacatacttctatcctggggaccctgaaagcttctgatcagagccaaccttctcttccctcttagttatatttagataattgagacacaatagaagagggagacaagctgttgtaagatgtgcatggtgtgccgacaagggcttgtgatctctgctcactcaggaggacaagccttcaaggcaggaactcagtatccctgctttacagttgcgacggccaggcacaaactaggctctctgcttaactctaggatcaggatgataaacagtgccaagccctgcagttggtgacccaggcagagccagggtttcagcagattgcccagcttctgagtccatgcccagtgctgtgctgcagtaggttctgaagaggcagacgacggcaccaactgccattaaatcggagcatagggcaagtctgtcagagtctgaagtgctgagctgtgaggtgcaagaaggcagtgctggaggaagaagggtcctcactcagctgggtaggaggagaaccaaagggagacgaagggcagggcacctggtggtggcagcggcaacatcggctgtgcacagctttaaccccagcacgagggaggcagagttccaggacagccaggccttcacagagaccctgtctccaaaaaaaacttaaaatacaaaggaaacgaagattttttttttcaagttgttaatactgctatttgtctgttaaccctaaatcttctagtaagattggtttgaccataaattttaatgtgattttttccccttgtttttgatttattgatttatttctggggtgtgtgtgtgtgtgtgtatgagacatgtgtgtgacatgtgtgcctgatgtccagggaggccagaagaggacccgctgacattggggttactgcagtagtgagcagctgtgtagtgctgagaatggaacctgagtcctctgggaagtatccagtgctctgcaccattgcgctgtctctctcgcccccattttctttgctttttaatcttcggaaggtaatacagaaatttgctttttgtctagttgatttggtttttcaagacagggtttctctgtgtagccctggctgtcctagaactcactctgtagaccaggctggcctcgaactcagatctgcatgcctctacctccctaaagctgggattaaaggcaggtgccaccacagacctgcacagagcttttttttttttttttttccttctatttttggcctagggttttcattggtctggcttctaggacagcagcagtatggagtgccatcttttttggaataaagatacaaaaatgtcttagctgccattaatatgaagactagaaaacagcaagactttatcttgctgtttcctttcgttctttattgtactgtttctgttaacgcgtatttttccccttccacaggtctgaagaactgttgcccaattcagcagtgccagcattccaactttgttaaacctaccaacatcttaaacggactttcctgtggtggtaccctgagaggcggatgaaagctactctgtcagtttgcacattctaatcactttccagtatcacgagagatttttacttatataatagttctagagtatgcagctggtaaaaccagaggctacatccagtattactgctaagagacattcttcatccaccaatgttgtacatgtatgaaaatggtgtactgtatactttaacacaccccatactttgtattggagagtacaataatgtaaatcctaaaagcaccactattttagcataataaaagaaagtccaaagagctcctatatagactactccagataactttgcttctttgatacttgtagcttattgtaattttttttaaattcaaggtcattatcattgtattatacaaaataagcgctttgattaacacagctatatagtttttttaatttttcaaaaacctgtggagacagtgatcttgtctttaaaatatgatagtcctttcagtataatgtcttagattaaagacgttgcctttaatatctgttgggaaggaaatgtccagacttttcaaatctccttattatatgtttccttttttgtttacatagggaacaatgtttatagttgtgtgtacagtgggggtctacaacaagaagtgtatattttcaaacaattttttaatgatttaacaatttttgtaaatcattttcaggcttctgcagctgtagattctcactgtgactcccttgcttgctcatgcatatgtgtgtctgcaataccaaatatacaggtttagtatctgcctgttagtgattgtttcccatgtgtaacgtttcggttgagatgttaactggtggacgagtactgtggatgtgaatgtgggatgtcattttaatcatgtgtaactggtcacaaggcctaatttgcagtaactattgctgttttatttaacaatgccttgttgttttgtatgcataaatgtttgggtgtaaagattgtgtgtccatccaacagggagccacagtatttaaattgaccaacctgatgttacaacgactttgaggtggccaaatgtaaactaaaagccttaattaaagtggtgcaattttgtataacttagcatccgtagttcaataaatttggattgccgtgcaagggcttgcattatagttacttgccactgaatgtgttttgtgtaatgttttaacagtgctagtaaataaatatgggtttacctttttaaatgtaataggtgttattttacacagtgtgatttcataatttataccgtataggtaaatcagactcttaattccaagaatgatgaatgaaagatatcagggttcagttttggttttgttttcttttcttttctagaattgtttgactatccacataaaaccaccctttgaacttttctttgagaaagaatgttataaagcaagcagtattacttagggacaatgcctttggctggtgttcagtaactctgtggggaaaggaggaaggattcaaatactttgggtactgcactatggattttcttttttctgatagaatacaaatctttggggaattaatacacagaaatttccaccatttatgctcaaaatattactatggttatacaatttttgatgtggattcatgctacttttcttttattatctctgtcttatgtgtgctatgattgaactctgtgaaatttataaagaagctcttaaacgttttcatagtacttgccagctgctggagcaactacttagtggtaccttctagtttgcaggtgtgccagtcctccacacgtgctgtttgaaatgggacattaaaggctttcgtttgaagacggtcgtactcgttatgtatttaaattacagggcggctgcactgcagggcctgaagtcagtgttgttcttcgtgctctcgggttttagtcctcgagacatatggtttagtaaagcctggggtgttggggattttttatatatataagcatctggggatgcctgatttcactttactatcttcatccactggcttagcaatagtaagtgcaacaaccgagaccaacccaagggccgccctcttcgaatccatgcctgtaagattgctaacctgggacacttgacattctgtgctgggtgatgtattgtggggcttaccctatgcatgtaaaatcctaaactaacacccactagccgtgataacccagttagagtgaataaaagaactgcagacatcagatgtgccacagctgtgccctaggtaagacgggctctgatggaaagcactgagctgcagacaagggtcaggagcccagcgtgaccactctaatatagtaagtcaccatgtgggatgcagagccacagtgagggaccccagctatccacacccagcgttacccggtacagttgagcaaacccggggccttgtaagttgtggcaaggttgcaccacctgtgttgactgtgtcttgtgctagatgaggatgctgacagcatttgcaggagtgaacgctagcgtcctgctgcgtaatcctaagggctgcgctttatatttatagcaaacaccatttctcttgtacagaagtagaaggtgcatctgaggtatgggaataacatgtaggtggacttccctgaatggaataataggaagataaaaaaaaggacaagggacagagagacctgtcatgtcccgagagttggagaagctggactcggggggaaaaactatttccttttttttcccctctttttcacatatctgtgtaagaatgttaaaaacttactgttcttgcttttttgcacatgtgagttgtgtgtaatgctttgtaatgctttcatgtgtgggtgcacatgctgtgttctagtatgtgtggagactagagatttatatcaggtgtcctctgaagtcactcccaccttacatatcaggccgccatctctcagctgaaaccaaagcttgcaggttctgctggtctagccagctatccccgttgtccaggtcctctctctacctcccctgcactgagattatatgcagtcaccccagctacctggcaagcactgcacctcctgctgagccttctcattggtccctaggcagctgtttggtttctatgtcagttcaagtttcccccccccccccattaagactgtttaccataaattgacattaaaaattccattgcaaagttaggtttttggttttttttagtcatctcatcttaggtgtggattacaaacataaggcattgctataagtcgtctttccagctccttcaggatgtgtgttcattgagtgtaaaactctaggctggaggtgtgacccagggtacttgactagcctgtatagagaaagaagtactgggaaatgggcatgccctttatagttaatattcctactgcctaaaaaataagggttaccagtttgtctctcttaaactgttagtgtgcctataattttaaaatcagttgtagctttatagtacatcgtacctgacaaacgcgtgcatgagcggtaggtatggcgagtggaacgtgctcctttcactggagaaggaaaaatgcacaagtgtgttggggatggggactggtgccaaggctgacagttgctgaagctccatacaagtccgtctttattgttattactgttttgatggtggtggatttttgttgttttaggtttttttgtttggttgggaatttttgttggttggttggttgggtttttttcatttgtttttcaagacagggtttctctgtgtagccctggctgtcctggaactcactctatagaccactcagaactcagaaatccacctgcctctgcctcccaagtgctgggattaaaggcgtgtgccaccaccgcttggcttagctttggttttgagacaaggtcttgttgagtccaggctgatttcagacctgctgtgtagtcaaagacgaccttgacctcttcctggccgcatttgctgagtggtgactggtgaggctacaggcaaaccccaccacgcccggccgaccgtagtttacattctgcaaaagtagacacaaaatgactgttctaactggatctgttttctgactccaggggggttttatgtatcctatatgttttaagcctgtttcccttacaaccttgtaagttgctgatcttaggaactagaggttatatctagaaccttgtaagttgctgatcttaggaactagaggttatatctagaatttgagatacctacctcattgccaccgttctctccagcgcctgctgtattccaggcactattcacagtgctgaagatgaagcaggtgttctgcctgtgtggagatgcgcagccagcaaagctctgccggccgtatgttgaacctgcacagagccttccatcttgatggtgtggttagtttagcaaaacctgctatcaagtttgacaagttcaaaggctttttctcctttgctgtcagccttctcatctgttggagaagagtgggcagaactgttactatttggcttgatggctggttagacctaggttagcctcatctctgctggacctaagctagcctcgtctccctcactgttgttgggaagtgtggtaacgcccatctatagcctttagctcttcagcatttgacttttctagaaacaacacccttaccttagaggatttctgtgtgagtaatgtaccaacccaagttaaaaggtcaccgcagtttttaaataaggcagagaacaaaaagtctttcgagttttgtcttctgcctgttgcccattcagatttctgtttatggtgtggtagtctgcgtcccttatgaggaatgatttcagaacaagaaactatcactgtcaaccctgcaatgtgctccagggctggggaagaagtgataaggcaaagaagtcacgtcttccgaagacttaatgagtccctccacagtgggagaggcgaaggcagtgaattccaggcatgctgaggaactgctgagctagacttaaccccttaagtgatttgggcgtattgctcgggtaaaaggaaaaacccaaaaaccgtaagagtgactagagaactagttagccgttaaccagttggtaagagtgactagagaattgattagcagttaaccagttggtcctcaaccctgctgacgctgcggccctttaccacggttcctcatggtatagggactccgcccaagaacaaagtcattttccttactacttacgattttgttactgtcgacgattcaattcgtaatgtaaatatttttggaggtagaggtttgtcagacggggtcgagacccacaggttgagaaccactagaacaacttagatgccaaggcttgggggaaaaaatgtctgaggttggtgaggaacaaagggattgggcaccgatgaagataatctagagaagctgacaagaagttgttgttgggatacatttaaggagaaaaaaaaaacaccttggggaagggtgggtttatgttgagtgatggctgtcttcttccccagagagccacgtttgaccagttgcccttactaataggtatgggtgacatttgcttccataagaactgagcatgaaagcctggtagaagcagacttgggatggacagggttggattaaagattggaggcagagggtggtcatcatctcccaccatacgcccctcactgtttctgctctcattcacacctcctgatggggactgacagctgatccaaggcaccaggcctctgtggatctctaccgagtgccccagagctgctgatagctgggccacggctacgggtacaggccaccaccaggtgtgacatggcttcccaatgtcacatggcttcccaataaaggccacacttttttccccctcatttttcttaaacaatactttagtacttggccagaaatgttttaaagataaattaactgtttttgtaatgagctgtagctctatttatctaattctctggggaagcatttgtgtcctaaacagagtgttctaacagatgtggtggtttaagctatagaggttcctgctcacatccccaaatcaaaacaggactgcacacttgctagagacgccagaagcaagcccgttctttggcatttaaagatacttgtgatggtattcagagcccatctggataacccagtgttatttgccaaacctttaattgcatctgcaggtgcccccttttttttcagttgattgtagcatcaaaggttttgggggttgggggtgtcagtgtaacctttggggggccattgtctgccagagtctaagtcagcagacctctgtaacggtcagaagcacctcccgcagtcttggatttaaagtgctctgtggggattctgagcaaatctgggattaggtgagacatccgtgagtcaccgctccacgagacagtccacaataaaggaaaggtgcctgaaaggtgtttacagcaatcttaattctgccttgtcctgctgcctgggtcggggctcatttcaagaaatgaggggtaaagtgggtatggtgacacacacctaaaattttagtgctcaggaggaggaaacagaaggatacctgccctgactaagagacctgtctcaggggagaaaaggagctatgggcgtggctccttgatagagcctttgcctgaaacagtagggctgatgcttagtacatactccaaaaaggattaaatgacctcggctttggggctcttccctcagtatacagcccacttccattctcaatatgcttttcttccttaataattattccatgcctaacataaaacacatgtggttttcctccatttctctgtactgtatttttctcttaagctgataaaattgtcctcaagctgggggaaatgataattaaatgacctctggtgggctatgtgaagttcattaataaagcgctttcccagcttgtttgagcccttgggtttgatccctaacaccatgaatatttgaacaagttcagattaattcagcccgctgattgggggtgggctatgcatccaacattagggctgggatttctgcttttataatcacatcttgaaaatgaacttcgaacccaccaagtaatagtgtgtatcaccaaaggtttgattcaaatatcaacagttattctagaaaaaaaaatatttttttgctgctttccttaatctgtagactccggcatagcatgggtctaataaagtttaaacaggagtcagatgtgttggtgcgcaccttcaatcctagccctgcagaagcaggctgatctcagtctgggctacagagtgagaccatgattttaaaaaaaagaaatcaattagagactttaatactgtcagccactaacatgctactaattgtatggtgcccgtatttaaaggacttactgagaggaggaagtggcgcctgcccactcaccctgaacctgtacaggacattctagtcagagcatctagacaggatgtggctggtgacaagcaccgacttggttgccctcaggatgtcattcaaacagggtgaatataataatgtatcaagcatgtcggccctggaaggttgacatattttcaatgtcgccttccctgcctgtcaggattgtcaattgcacgatgtccatcttcctaaggtagctatagggaaggttaggtggtagtggtagtggtggtggtggtgttttaagcttagtcctaaacctcattctacaacagtggaattagccatcagtgttgtaactgctttattgtactctggaaaggaaaggtagttttaggaactagattttttgatgaatctgtgttggtatccttagagaaacagttggcgatgacaggtgtttcagagggtcatattaggccggtgtgctcaacagagccaggggactacctcctacaaggactagctttctgctggacaggcttccagaaccccgtggccactcagatgggaaagctgcatgtctcagcagccctgatgtgatcctgatgacctggagatccctgggacatcattggtcctcagtatgtgtgaaagactgaaggagctgggttctgtttgtctgtgtagccctggctgctctgtaggcaatgctgacttggaactcaagagagccacctgcctctgcctcgtgagtgctcaggttagcctggctaagaagctagattctgatgtcagagaggatgggagaactgtctgccccagtggagcagacaccagcaaggggaggagcccctccctggactcctggagtagagcagaatcgtcctctgattaccacacacagagtaaaagctgtcaagaaacaattcaaaagaaatatgtataagatggctacacatttgatagcaacagagttaaatcagttgtaggattatacagctgataatagccctggggaggctaagagagcctggacattatagcttcaatctggactatgtagaccctgtctgaaaacacaaaccaggctagcagctaagagcacccagaggatgcattttcaaatctctgtgcttatatgacaacccacacgtctataactccagatggaggggacctaacatcttttggcctcatttgggccccaggtacacacattgagtacatgcaggaaagcgcgctcttacacataagggagcataagaaaatagaaacgcaaaacaaattcgattggcccataaatgggtgttttagccaatagccacagaaatgtaaatcaacgtaaatactcgaagagtttaacatggatgaaaaactacaaggagagtcccaaggttaaaacataagaagccattgctagccaggcgtggtggcacacaactttaatcccagcacttgggaggcagaggcaggtggacctctgagttcaaggccagcctggtctacagagtgagttccaggacagccggggctatacagaggaaccctgtctcaaaaaaacaaaaaaaaaaaaaaaaaaaaaagaagaagaagaagaagaagaagaagccattgctaatggaagtgtgaatcagagaaactttaggtaagccaaaaatcgggaactatctgcaaatatttattaaaattcaaactacacctgtttaaccaggtgaccctaatgtctgtacctaaagagaaaaggttatataccaagctgattaaacattggcactgtgtgcctatcaataggaagaataattgaacaatttacgactgatgcataacaaacatacatcagttgtaagcagtaagtttggtggtgatcatgcctgttgtcccaggcctccagaggctcaggtaggatcctaaactcaagaccagcctggagataaatacagatatagacacacatgcacacatccagggtgaggggggtggggtggggaacgggcatgttaagtgcgtggtggcacaagcctgtgatcccagcattcacaattttttttttaatctttcaaaaaagccaagagtttagctttctgatattacctgaaattcaaccttttttatgcagctaactcagtcttgtgaaggacaaagaagcaaaagcactcttctaggatcgtcagcttttcctaaagactaaactccatcgttttcaattgcaaatgggcagcctgggtggattcggaagcatggatttacttactgtcctttgctgagcgacccaagagtctaagcagacttcaagggcgtccctcgaatggccaagcttcagggcccatctttccgtgcttcggaacacacttctatttttagaacgcacataatttgcttttagatgacagtaaatttgcactcacaaggtatttttcaagtcaatttctgctcttgatctgtaaactaaattgacttttgtgtttgtggctctggggacagaaccagactttggcacggtgccactgaactggagcctcaaccctcaagagtccatccttctgaattctctagaagagccgtcctcggccttcctagtactgcaccctttaatatagtcctcatggggtggtgaaccccacccataacattattttattgctacctccaaactataattttgctactgttatgaatggtaaagtggatatctgatatgggaacccttgtccacccacggggttgagaaagcttactgctctagaaggtatttgactatagacagagttaaccattttatatagtaacatctaattgtctcagtatttgttacattgtttctcaaagttactgttacattgttactgtctatagctttctgctcttacagaagacccaagtttagttcccagcacccataaaccaactgtaactccagctccagggaacctgacacttttctggcccccacaggcacctgaaccccacatgtgcatgcacaccacctataaataagaataactcttttgaagtcatcattgtttcaggcgataatgagtgtttgctgtccctttgcacctcactccctgtccatcttacccagctggcctccaaggccaggagtctccaaagatgagaaacaactggtggtggtggtggtgttttaagatgtagcccaggctggccttgaacttgtaaccatctgccattgcctcctgagtgctgagatggctggtttgagccaccactctgccttcgcctgtgttttttattgttctggttttttgttttgttttgttttgtgtgtttgagacggggttcattgtaaccctggctggcctagaacttgctatgtagtccaggctggccttgaattcagagagatctgcctcttaaatgctgacattaaaggcgtctgtcaccatgcccagactgaccagtgttcctaagaacagagaggagcctccagactttggagagacacccctggcactctccccgacccttcaaaccaggcagaataagggcgtggtaacactgaagaccagagaagagaaaaacctgagtgtgactttcatttcccaatgagtaaagaccatgccagccgcattcacagaataccacccagacagaataaaagctgtcccaattaaacagccaaactgttttctgataagtcctccaacgaatgtggatgtgcgcagggcttacaggacgtctgcgactgcagagatgtgaagacgggaactcgggtgctgggtgtgcagtaatggttttgtggtttagctagagaatgtcctgtgataacgattttagtttttcagttgctcctaagatcatttccactattgatgaggcctgcagcgcctgtagagaggagtcgctgcgattgatttccttgtctggccagtcttttgtcagcaaattcgcacagctttgaaaatgtcaccagatatactgtgcttaaggtactaaaggcaaaagcacagtgaaaacgtgtagtaaaacagcaacacgataccaggctggcagcaccgtcttagggctgaaagcgtgtctaacgacctgagaacatggctcgcgcatgcgcgcacatgctagtacctatattgacgagcactgccttgagttgatggcagaattgtaagaagcattctcgtatttatcattccacaataaaagtctatcagattttgtcctagtttgatttctgttgctgtgataaaacactgatcaaaggcaacttggggaggaaaggtgtcctagttagggttattgttgctatgacgcgagtggatgccgcgcccccaccttgcccacaagccaatctgatggaggcagttcctcaactgatgtcccctcttcccagagatggtctaggtttgtgtcaggttgacgaaaacatgatcagtgcagatataattttttttttacatttgttttatacttaatgtttattggtaatttaaaagcctttcgattcagggtatgtaatccta

SEQ ID NO: 70 - DNA, 2406 bp, Mus musculus
ggtactaagtgtgacagtgtgcaccatgcgtgaatataagctcgtcgtgcttggatcaggaggcgttgggaagtcagccctgactgtacagtttgttcaaggaatttttgttgaaaaatatgatcctacgatagaagattcttatagaaagcaagttgaagtagatgcacagcagtgtatgcttgaaatcttggacactgcaggaacggagcaattcacagccatgagggacctgtacatgaagaacggacaaggcttcgctctggtttactccatcacagcacagtcgacatttaacgacttacaagatctaagagagcagattctgcgggttaaagacactgatgatgttccaatgattctggttggcaataaatgcgacttggaagatgaaagagttgtaggaaaggaacaaggtcagaacctagcaagacagtggaacaactgtgcattcttagaatcctctgcaaagtccaaaataaatgttaatgaggtctgaagaactgttgcccaattcagcagtgccagcattccaactttgttaaacctaccaacatcttaaacggactttcctgtggtggtaccctgagaggcggatgaaagctactctgtcagtttgcacattctaatcactttccagtatcacgagagatttttacttatataatagttctagagtatgcagctggtaaaaccagaggctacatccagtattactgctaagagacattcttcatccaccaatgttgtacatgtatgaaaatggtgtactgtatactttaacacaccccatactttgtattggagagtacaataatgtaaatcctaaaagcaccactattttagcataataaaagaaagtccaaagagctcctatatagactactccagataactttgcttctttgatacttgtagcttattgtaattttttttaaattcaaggtcattatcattgtattatacaaaataagcgctttgattaacacagctatatagtttttttaatttttcaaaaacctgtggagacagtgatcttgtctttaaaatatgatagtcctttcagtataatgtcttagattaaagacgttgcctttaatatctgttgggaaggaaatgtccagacttttcaaatctccttattatatgtttccttttttgtttacatagggaacaatgtttatagttgtgtgtacagtgggggtctacaacaagaagtgtatattttcaaacaattttttaatgatttaacaatttttgtaaatcattttcaggcttctgcagctgtagattctcactgtgactcccttgcttgctcatgcatatgtgtgtctgcaataccaaatatacaggtttagtatctgcctgttagtgattgtttcccatgtgtaacgtttcggttgagatgttaactggtggacgagtactgtggatgtgaatgtgggatgtcattttaatcatgtgtaactggtcacaaggcctaatttgcagtaactattgctgttttatttaacaatgccttgttgttttgtatgcataaatgtttgggtgtaaagattgtgtgtccatccaacagggagccacagtatttaaattgaccaacctgatgttacaacgactttgaggtggccaaatgtaaactaaaagccttaattaaagtggtgcaattttgtataacttagcatccgtagttcaataaatttggattgccgtgcaagggcttgcattatagttacttgccactgaatgtgttttgtgtaatgttttaacagtgctagtaaataaatatgggtttacctttttaaatgtaataggtgttattttacacagtgtgatttcataatttataccgtataggtaaatcagactcttaattccaagaatgatgaatgaaagatatcagggttcagttttggttttgttttcttttcttttctagaattgtttgactatccacataaaaccaccctttgaacttttctttgagaaagaatgttataaagcaagcagtattacttagggacaatgcctttggctggtgttcagtaactctgtggggaaaggaggaaggattcaaatactttgggtactgcactatggattttcttttttctgatagaatacaaatctttggggaattaatacacagaaatttccaccatttatgctcaaaatattactatggttatacaatttttgatgtggattcatgctacttttcttttattatctctgtcttatgtgtgctatgattgaactctgtgaaatttataaagaagctcttaaacgttttcatagtacttgccagctgctggagcaactacttagtggtaccttctagtttgcaggtgtgccagtcctccacacgtgctgtttgaaatgggacattaaaggctttcgtttgaa

SEQ ID NO: 71 - protein, 165 aa, Mus musculus
VLSVTVCTMREYKLVVLGSGGVGKSALTVQFVQGIFVEKYDPTIEDSYRKQVEVDAQQCMLEILDTAGTEQFTAMRDLYMKNGQGFALVYSITAQSTFNDLQDLREQILRVKDTDDVPMILVGNKCDLEDERVVGKEQGQNLARQWNNCAFLESSAKSKINVNEV

SEQ ID NO: 72 - DNA, 69652 bp, Homo sapiens
agagcaagacctcgactctaaaaaaataaaataaaataaataagagatatttaagagacacaacaattaaatgtaatgtttggatttgtttggactatgaattaaacaaacaagcagtaaaaagttatctttggtacaatcaggaaattttaaatatgacctggatattagattgtgttaaggaatcatttttatgtatgtatgtatgtatttatttatttatttttatttatttattttttttgagatagagtctcgcactgtcgcccaggctggagtgcagtgacacaatctctgctcactgcaagctccgcctcccgggttcacgccattctcctgcctcagcctcccaagtagccgggactacgggcacccgccaccatgccctgctgattttttgtatttttagtagagatggggtttcaccatgttagccaggatggtctcgatctcctgaccgagtgatccacccgccttggcctcccaaataaggaatcatttttaattttgttacatgtgacaatggcatcgtggttatattttttaaatgttctatctgtggggaatgcatactgaattatttataagtaaaacaaaatgatgtcttggattttctttaaactactccaaccagaaaaatagagaggatggatgaaacaagattagcaaactgaggttaaatgttgaaatggaatgatgaggacatggtgattcattaaactcttctatttatttatgttcaaaatttgccataagaaaaagtttttgttttttttttttaattaacactgctatttagagactagttgagaggaaggacaaagtgaaagcacataaataaaccagccagacaataaaaataaagaaaagtagttagatttgactgactgactctggagtcagtcagaatcaataggatttgctgaagaatttgctacgtggaataaggtagagggaagtggcagatttctgtttcagggagctggtgccatttattgataggaggattcctggaggaagagcagtcttgaaggaggtcatcaaggaaagctttccaggaggcaactggctctatgcatctggagctcagcagagaagtctgaactgcagatagggatctatgagttattggctattagacagcatgtaaaaacatgggcaagactataaaattgcccagcagaaatatataaggaaaaactccaggatcaaattctgagggactgcaacccttaaaggacaggaagaggaagggacaggccaaagagaaattgagaaggagcagtcagagaaaggaggaaaccatgagaatgtggtgctgtaaaaactaagggaacaaaaaaacttttcttttttaagatggaatttcactattgtcacccaagctggagtgcagtggcacaatctcagctcactgtaacctctgcctcctgggttcaagcaattctcctgcctcagcctcccaagtagctgggattacaggtgcccgccaccatacctgactatttttttgtatttttagtagagttggggtttcaccttgttggccaggctggtctcaaactcctgacctcaggtgatctgcctggcttggcctcccaaagtgctgggattacttggcctaaaatagactttttttgagcttccctaataatcaaatagcatgttaacgtactcatggtataaactttatagcattgtttccattgcagaaatatcttcaaattgcaaactactgacaaacacaaccaatttttgagaactgtcataagcaaagcaatgtgaaagtttaataaacatttgttgaattcttactatgtttgcacaaagcattattgtgccagaggaagtagcagaaagcaacatatattgataatccgttagatgatgatagccagtagttaatagagtgcttactctgtggtaagcactattctatttgtactgtgaactcatttaattctcacaataacccatgacataggttatattattgtactcattttacaaatgagaaaactgaagtacccgaagtaaattcctcaggatgagtagagcctgtatttcgacatgtggagtatggcatcagagctggtccgcttaaccactactctatattacttccattttgacatgtgacctattttaaatccttttaaaaggcctaaattataaacattgttatgagcattttaaagactaataaaaaggccaggcatagtggctcacgcctcgaatcccaacatattgggaggccaaggcaggaggatcactgaagcccaggagtttgaaaccaggctgggcagtatagagagacccctgtctccacaaaaaaaatttaaacatttagtggggcacagtagtgcctgcctgtagtccagctactcaggaggctaaagtgggaggatttcttgagccgaggagtttgaggctgcagttagctgtgatcatgccactgcactcctggccgacagagcaacaccctgtcttgaaatttaaaaaagaataaagattaataaagagaaactttcaaaggctaaataactgccagaggtaaatccactatgattaatttggagactctaaccaagattagaaagacctccccctacatttgattctaatctgtaatgcctggcagtatagtaggtacaaagaagtttaagatacagtttcggtttttgaggatctcagaatggaaagaagacaaaagcaacttaagtaaggcaatgtatgataagtaccaaatggagtggtacaaacaacaattatttggaaaattcagagaaggaagggaccactgggtcttgaagaatgactaagatttagataaatacaaaatagaagaaattttctcatctttataatgggtctttaaaacctacctcttggaatttgataactattactgagatacgtgactcatacacaggacttggccataactggaaccagaagctaaatactatcctaataataaagtcccaagaaatgcttgactcgcgcatattgggcatattagctgtttgatttggggacagcccagattctgaaagtatatgtggtttttgaagattttcttaatttaaaatttcttttgaaaatttcataatagggtatattttatgaagttggtttttccaatagttttgtgcttttaacactcatttacatgatggctctggtaatgccattttcatttttacggtttttctcagctaagacttgagatggggaaattttaagtataatctgttccttacatcacagaccttagcaatgacaaaattagagggctgttagatttatttaatgtggtgtaggcaggtttggtggtcaagcccacaactgctgaaactgagtatagacagaatttgaaatatatcttgagacaaataagcagttattacagttattacacagaatagaaacatgccaagctgcttcatttttcttatatataagtgcatggtttccccaaaacagaaatcttagaggaacacaaactaccctaggagagtatgagttctgagtgttttctcataatagcaatggtctaatatgctcttacctggtctcctgtgtgattaagtggtagaatttataaaataactgcattgagtttggaatgcagtctttgaccaagaaaatagaaggaaactactgaagatgtaatttttttctttttcttgctttctttttttttaaagcagctgtctacaaactaataactagagatgtaagccatgtattttttctcttttgcatctaataagcagtcttcttattctttacaacttcccaacccagtcacacagggtgttgcaaaggtacagaactgtatttatataccatacactatatatacatacatagatttatataatacatgcatacacacacacacacatcagagggaaaagccagtaaggaagtgaaaggatcaaattcaatattgttaatttgtgaatgaaataatatactaatgtttaatgttaaggaacattaatgttactgataaccatgataaactggaagttaaatgtttacattgataatcattaactgtcaattaggaaaattataaatctgggtcttttaaaaatccaattttggatttgcaataagaccgctactcatatggactttttaaagtgaaaccaatgaagcatagatgttattcctttaaagtaaaacttttggccaggcacggtggctcatgcctgtaatcccaacagtttgggaggctggaggctgaggtgggcggatcacctgaggtcaggagtttgagaccagcctggccaatatggtgaaaccctgtctctaccaaaaatacaaaaattagccaggcgtagtggcgcacgcttgtaatcccagctacttgggaggctgaggcaggagaatcacttaaacccggggaggcggaggttgcagtgaaccaagattgtgccactgcactccagcctgggaaagagtgaaactctgtctcaaaaaaaaaaaaaagtaaaacttttaaggaagtaaataatatgaaaaattagaaatactgttatcaggttaaatagttaaggacactattaattcactttctttaaaaggggaaaaacttgctttgagctgcttcttgttccagagactgagacattgctattttctacacactattttacaacagttctgtaaggcagatattatcatcccatgttatagatgaggaaactgagattcaacatgataatgggatttttccaagaccactaggctaataagtataataagagctggactctgattctcaccccctctgccatttcacactaccttaggaaaagaaaactcagcaaatatatcttaaatgcctattatgtggaaagcaccaaactgtgtttcttataaagataagaaatatgatcagcacagtggctcacacctgtaatcccagcattttgggcatctaaggtgggaggatcacttgaacccaggagtttaagagcagcctaagcaatatggtgagacccctgtctctacaaaaaatagaaacattagccgagtgtggtggcacttgcctgtagtcccagctacttgggaggctgaggcagaagactgattgagcctgggagttggaggctgcagtgagccatgatcacgccactgcactccagcctgggcaacagtgagactctgtctcaaaaaaagaggaaaggagaggaaaggagaggagaggagaggggagacggcggcggggggggggggggagggcaggggaggggaagggaggagaggagaggagggaaatcctgatcttgtaggaaatatacatacacacatacacattctgatctggattttatcttctagtataggcaggaccagttacataatttatgggacccagtacaaaatggaaattcaagcttcttatttaaaaaattatttaaaacatcaagatggccaggcgcggtggctcactcctgtactcccagcactttgggaggctgaggcgggcggatcacttgaggccaggagttcgagaccagactggccaacatggtaaaaccctgtctctactaaaaatacaaaacattagccaggcatggtggtgggcgcctgtaatcccagctactagggaggctgaggcaggagaatcgcttgaacccgggaggcagaggttgcagtgagccgagatcgcacctctgcactccagcctgggcaacagagcaagactccgtctcaaaaacaaacaaaaaatcaagatagtgacattagagcattaaaccaatcatggaacccttctaagtacagggctctgtacaactgcatgcatgagtcatatgcctgtgaagctggccctgagtacagggctcagcaaactatggcctactggccaaatccaggccgcccctgtttttgtgcacctataagctaagaacaattttgacatttcttttcttttctttttgagacagggtcttgctctgtcaccagagctggagtgtagtggcatgatcatagctcactgtaacttcaaactcgacttgggcttaagccatcctcccacctcagcctcccaagtagctgggacaacaggcatgtgccaccacacctggctaattttaaattatttttgtagaaacaaggtcttacttgttactatgttgcccaggctggtctccagctcttgaggttcaagtgatcctcccacctcagcctcccaaagcgctgggattacaggcgtgagccaccacacttagccgattttcacatttttaaatggctaaaagaaaaaaaaaaaaaaagaacatttcgtgacacgttaaaattacttgaaattcaaattttagtgtccataaataaagttttattagaatacagtcaggtctattctttatgtattatctatggctgcttttgtcccacaactgtagagttgagtggttgcaacagagaccatctgtctggcccacaaagtctaaaatatttactctctggcccttgacagaaaaagtttgcaaatccctattcacaggaaggtcaaacacaagtgacaaagaaaagcagcaataaaatgtttcagggattctaaagagaagagaatacataaggttagaagtatcagaaaagaagctctttttttttttttttttttttgagacggagtctcactctgtagcccaggctggggtgcagtggtgcgatctctgctcactgtaacctccgcctcccgggtcccagttcaagcagttcttctccctcaacctcccgagtagctgggattacaggcatgtgccaccatgcccagctaatttttgtatttttagtagagatggggtttcaccatgttggccagcctggtcttgaactcctggcctcaagtgatccgcccgcctctgccttccaaagtgctgggattataggctaccgcgcctggccaagaagctcattcttaagagaaagtagataaaccttgaataatgggcaaggtatttgcagaatgagatggaatgggaaggggcattccaggcagaggaaatcattcacctatgcacaacagagagatggggaagcaaattatgtgggccagatgaaaagtccactgtccattctgactataaatcagttttgagtgaaaggaaaaagtgagacacaggattttaattttattttggtagagtggggagtaattgaaggctctttgaggaagggagtgacttgcttggtatgctttaagataatcatctggcaacaatgtatagaatggatcacagcaggaacagactggaggccaccaggctgcaaaggtccaggggatgagttctgccaaactaaatttggcaactaaaaactaagtatggtcttagttgaaatggaaaagaggaaacacaatgaaagaccttgtcgaattactatctaatagatatgccaattgatggattattcaagaagagcagagagctaagtatcaggcttgaagattgggtaatttaaaagatggtgatacaattcacaaaggaagaggaaaagaaactggtttggttacaaagacgatgagttcagtttgcacacatgaccagtgcaaattgccagtggaatatcctggagaagaagtcaaggaaataaataggaaagaggctcaaactgaaaagtgagttcagtgttaagagatgcagattatggtattctctgcatagtgataacagtttaatacaaataacaatgatttccagtctaataagagaaactgtgtttttaattaaatagattattttacacgttctctcaaactctaaaaattctagcttcaattttctaaaaccaatttctttctggaaaaaaaaaatcaattgcccaaaggacaaagagtttttctaaaaaaagaaagaaagaaaaagcacagtgttcccaggtaacacttctgtgagctcaaagtttcagactttcagttatcaaatttttatgcaataactgaaaagttagtaaagtcaaatttatttgtaattcactcattcattgagaagttacagtaattccaacggactgctctgaaatttgcctttgaaacttttatttaaaaaggttttctaaagaatggatgttaagtgttctcataaaaaaatgctaactcaaggccaggcgcggtggctcacgcatgtaatcccagcacttcgggaggcccaggcgggcggatcacctgaggtcgggagttccagaccagcctgaccaacatggagaaaccccgtctctactaaaaatacaaaattagccgggcgtggtggcgcatgcctgtaatcccagctagtcgggaggctgaggcaggagaatcgcttgaacccgagggtgggaggtgggggcggaggttgcagtgagccgagatcacgccattgccttccagcctgggcaacaagagcgaaactctgtctcaaaaaagaaaaaaaaaatgctaactcagccggcgcggtgagtcacgcctgtaatcccagcactttggggggcccaggcgagcgcatcacctgaggtcaggaattcgagaccagcctggccaacatggcgaaatcccctttctactaaaaattagctgggcgtggtggcacgcgcccgtcatcccagctactcgggaggctgagacaggagaatctcttgaacctgagaagcagaaattccagtgagccgagatcatgccactgcactctagcctgggtgacagagcaagactctcaaaaaaaaaggtaactctgtgaggtaatgtaacaatgtatacattacttcaaacgatcatgttgtatacacaataaatgcagacaataaacaatttttaaaaagatatttttctaaggaaatagaaattatcgaaataggtaatctactcaattaacctaaattgtaaaacattataaaacacagagaactgttataattcattctcatctattcatttaacttaggttagcttagttttcaatcactacatattcttaaacggagtgaaattagtcacattccatttatcttccaaatttatcaacgtttattaagatttatttcaagaataatttgtacagggcctaattaaattatgaaccaagaaagttagtcttaaatgacccctcaatccccacttttccctgcactttgctctcttaatctcctcgcccatcaaaactgcttcaagaaaaagttctgataaatttcttgtactaagggtaagtaagaatggtaaattcccgtgttaagttcccgccctttttggaacgaggcattttggaacagaaagtgttttctggtgccctgaagtcacacgataaacctacttgcctatgggtaatcctgtgaagtgaataaagcgtccaggacatgcatttaaatacgcaatttattttagttatataaatggcgttggtttaggtgcagggtacaaacttatttagaaatcatcgatttgttaactgcgtttggcatgggaatttggaaagagttcgcccgggttaagacaccaatggataaaacacttgtcaatccaggagaaaaggcatctcaagaatggaaagacttgctggcccaggctccctcggggagctctaggtgtagaaaatgcgcgctctccgttacttctcggttactttgcccagcacaaaggacgacgcgaataccaacagactggacgagtcggtgactacagtttgcattaagaggcggcgccttttgggtttcggagggttccactggaacccacgagggtcaggaacaccgacgcgcggattccgcccaccagacagcctggggaagcgagcctgaaggcgcggcgcagctagagagaagaacctcggcagacatgccgcccagaggcagctaaggggcccgtgggcagggcctgcgctccggctgcgatgcaggccggctagaggccggcgccgaggacccggcgcgcggcggccccgccccctcggctcccctcgccccgccccctaggcccgccccttcccgggccgcgcacccgcgcgccccgcccgcgggcggaagctggagcgaggctgaacgcctgacgtcaaggcgacatcgccaaacctcgcccagattcaggcgtgtaaaccagccggagcggcgcggcagcggcaggaccgccgtggcgcctagagtagcgacccggggggagcgcggggcgacgctggctgcagggacccggtgacagcgtgagaggttcgcagagtgagtgcgtggccgctgagggaagccgcggcggcggccgcgcggggccgggcgccggctgaggggagcgggtggggtgcggcgaggcgcgggccgggcgcggcggtcaggggccccggcggcggcagcccctcggcgcgcggcaggtggcgcgagggccaggcgccgggcccgcgagcgcgctgccttgcgggccggcgaggaggagcagccgccgccgccgcgggagaacagcgcgctttgcggaaggggtcaaatgtctgaaatatggcggaggaagtgagagcccgaggacccccccacccgcccgctctcttcagcccgcgtccgccgcagcttctcccgccgccctcctttccccgccggctcccccgaagactcgctccccgccccgagccccctcgcttgtcgcctgggttccctccgtggtatgggtggaagttagaacggaaaccagaaagttgtcctttgcgaagacctagcttctcccagccccgagctagggcgaggagccttcgggggaaaccactcccaggcgccccgcgggcttgagcctgacagcgaaaaagtttgcctgaaacggggcttgcttgctccatttgttgcgggaagtggcaggaggaaggcagcggagagagccccacctagtctggcagcagccaccgtgtagagaaaaactgttaaaggggcctttcccttcgtcagcaagaggaaatctctttctcttagagggagagaaaatccaggaagtttgtcctcttctctttttcgccatctcgaggtgtctaatcctaaaactatcagcgccatgaattttatttaaaactacgcccagtgaaccgggctctccggatttttcttctgaaaaacactgatgtcttttggagaaaagatcatttttgcaagttaaagcagatggtttccttccccttcgctttcccccctctcccactctctttaatagtttagaaaaacattttggccctgtaacttctgattggtatgaatagaagcagttctgtgttgcagtaaggggaaatcacatttttacggggtagaaagttgacactaaatgaagattgtgattttagtattttaaaattaattccgtctaattggattttggttttgcaggcagcatctcatatatgtcgagtacttaacaatttaaagctctgacttgtaaatttatttttcagctctcttttttcgtaattagaatactgtttggacttgctcaacaagaccttatcttaacaaaaagtaacttatagaaaagggagacattcatttaacttcaagcccatattattcttaaaagctgactcttgaaatagtatttattgagtcatagtggagtcatgggactttttaagggccggaagggactatttagatcatccagtcccaccctgtcattttatggaggaggaaactgaggcctagataagataaccagttagtgggtccactgacctttaggacagtagtctatccgtaagagacaacatggagaaagaaatacaacgtttttatagtgaattatcatcttacaaagaatattcttcccatatcgcacttttaaaaagtgggtaccttagtcaaataggagaaaaaaccacttgagtagtttcatcctcaggttttaggtgaggaaactgatactcagattaaataactttaagcacacagagcctgaatgatagtcttatttgagctcatctgtgcttttaatgtgtactacgttaggtgttttcacttgcatttcctttagtcttatttgagctcatctgtgcttttaatgtgtactacgttaggtgttttcacttgcatttccttgtttgacgttgacaataaatcgtgaagctgccttatctaaggaagtcctaaagtaaatcattggaacacatgtagccagtttgttgtttttaatatgccaggtatcaaaatataactgaagaaccaatgctaaactgacttaattttaaaatgttgtatggggcatgaaaatgattgctctggctgggcgtggtggtttacgcctgtaatcccagcactttgggaggccgagccgaggaaggcggatcatttgaggtgaagagttcgagaacagcctgggcaacatggtgaaaccccgtctttactaaaaatacaaaacatagccgggtgtagtggcacgcgcctgcaatcccagctattcgggaggctgaggcacgagaatatgaacctgggaggttcacattgaatgaaccagcttgaacctgggaggcggagggtgcagtgagccgagactgcactactgtactgcagcctgggtgacagagctagacctgtcttaaaaaaaaaaaaaaaaaaaggagataagaaaatgattgctctgctctcttttacattctcccctcacccacgaccgcgtgaaagtcatctctcttaccttctatgacacgcattacttcctgcctcctgttaccattttatattatttattccattgaattgtgaactccaaccacaagatatatattgttttgtatgccttaacgcactggcatggtgccttgcaatagacattcaacaccagttaaatgtaagtaccatgagggtagggacttaatccatttcattcttcacagtaatcttcctagcgcgttgcctgggcacagtgtagcgcgttgcctgggcacagtgtaatggttagcgtttgaatttagggattaatggtaatgaacattcaaagagaggatatttgaagagaacagtgtaatcctttaaaaagaaacatttacatattggctttggaatcccttttacttgacaaattaattttcgttttatcctcaatccttttcagaattccaatattttctcttagctgtataaaggtaaagtgaccccctcccataataaagagctaccatgtaaggagggtatagcaaagaattaattattaaaataactagatccatttttgtaaggatcctttcaattgtatcttcctatctaattcaagattggtggaaggtctatgcaaagattgataacatggtaactgattagacatgttattttaaatgcagtccaagatttggatgaaaagctcacgttcaggttttttttgccttttgttgtaggtactcgataaatatttattgaggtagtgaaactaatctgaaattggatctgatacagagaatttgaccgattttacaaggtgtccatttactttttccccataagtattgtttaaataggctgttttattatcgactatcacacagatcttactgatttgcctcatttccttaaagatgtaaaataactgtgtttctctgtatgtttgtgttgctaaagaggaggttgggtattgatctgcagtttctagatttgactggcactaggagtaatttagcatttatgaattagctatttactgctgttttatagcagtgatgtcacgtgttcactctatagaaaagttaggtaaagattggtctgtcttaaactttctgagacataggttgtgactaaaaatatgccctgggttttcttccccctcctgtcattattgaggactccatggtctaagagattaggctgaagtttttgttagccttttcaaattgaattgaattttagaacaagttaagacattttggctgatgcagtgattcattgtaacattggacaaaatttttagttcagccatctgtaaacaggagtactgtaccatggctctggaagctagtgtttttctgtgttcatagattattttgcaatggtattgaaaggtactaattgccatttgaggtcttaagttctttgtaaatctcataagcacagtggaagcagtagctacaaagaatagatgaatttatccatttgcagtaaaaactgatttgtatgtaatctgttgtactttgaacccagttgagcactggattctaaaacaagtctctttggtcgtggagagtttctattttaaacaagaaaagttatcaggaacttttgtgctgccttaaaaacatcactttttaaaattcaccagcaacaaaaaatagtatcacttacattccgtatttcataacattggactatttattcctaatgttggtcaaatcaagggtacagtagcaactgattatttaagcagtaatttagaaagattttttttcctttgaatcagtagagggtcaaaatttttaaaactttccaaagaaccttaaaacaggaaaaaatgaaaatgtgggggaaatgtaccagttttttttaatttaaattccctaaaataaaaatatttacaacatgagttacagaatttccatctgatttttattgtacaggaggagtatattctgtgatatcagtatacaattcaaaatacaaaaaattacctgggcgtagtgggaggtgcctgtaatccgagctgcttgggagactgaggcaggagaatcgcttgaacctgggaggcggaggttgcagtgagccaagatcgctccactgcactccaacctgggcgacagagtgagactgtcaaaaaaaaaaaaattacttagattgtgtatgaggtgcctgcatactagaaatgttcttttgagttacaaatctgtctctctgaccatagagagtaattatttaatcttgtgagtttgagttttatatcaaaccatttcctaaagcttacttgtaattacttttactttatgtttttgtagttatacatgtgtatatatatacacatacatacacacacacatatacatatatcagtgagaccttttaaattttagctgaattctggtttcataacttgtgattttttttccggtactgggggattgaatgtttttaactgttgtgcagatagactgaataaaggaagtgagcatccattaaaaactctagtaaataatttggattttttttttttttgagatggagtcccactctgtcgcccaggctggagtgcagtggcacggtctccgctcactgcaagctccgcctccagggttcacgccattcacctgcctcagcctcccgagtagctgagactacaggcgcccgccaccacacctggctaattttttgtgttttagtagagacggggtttcactgtgttagccaggatggtctggatctcctgacctcgagatccacctgcctcggcctcccaaagtgctgggattacaggcgtgagccactgtgcccggcctttgtttttttgttgttgttgttttgttttttgttttttttgagacagagtctcgctctgtcagtcaggctggagtgcagtggcacgatctcagttcaccacagcctccgcctccaggggtcaagcagtcctccagtctaagcctcccgagtagctgggaatactgtgcctggctaattttttttttttttttttttttttttgagacggagtctctctctgtcccccaggctggagtgcagtggtgcaatctcagctcactgcaacctccgcctccaggttcaagcagatctcctgccttagctagtactacaggcgcacaccaccgcacccagctaagttttgtatttttagtagagaggggatttcaccatattggtcaggctggtctcgaattcctgacctcaggtgatccacctggcttggcctcccaaagtgctgggattacaggcatgagccaccgcgcccggccaggttttgtattttttgtagagacgtttcgccatgttgcccaagctcacctcaaactcgtgggctcaagggatctgcccatcttggcctcccaagtgctgggattataggcatgagccactgtgcctggcccagcatttcactaagtaactttattttaaaaatatacagtgaactgattgccgaagtggtggattgcctctacctgtttcctttttctttgccttgtaggaagggaaaaagatgaaaggaaacatgttttgtctatttagtagcaatttttggtgaaagcttctggaaaggaaatggaaaatgctgggtaaaatgaaattataattatctgtgtattctaaaatttatcctcacattagaatatatttttcaaagttactttatactaaattcagggactttctaagttctcagttaatagaactgaaagggtatcaataaaataaggactatatatataatctatttttacttagtttttatgcgccaaaaggtatgtatgttgcatccagctgtttgttaccttgtgttttaaagttgcagttagaatgtggaatcctattactacattgtgccaacatatttgtggctgatgcttctaagttatccacaagcttctcaatacaatagcaaaatgcaggaattcctctggaatcttgaattgagggataggatgagatatataacatatgttatctgttgttttctcctactgctcttgaaattaacaaacttgagatagtgtactgatttgtatttataagattggctgagttcaaatatgtctttttgacgttcttaccaatgtttaaaatatagaaaagtataaagaagaaaatgagtatcatccgtaatgccatcactacaatgacttttttaaagcaaaatgtgtactttccttctgaagctttccaacctccttgcctcctcagtgagaatgatgacatactgttgttagagttgttgaggatcaaatgcagtattactcatgaatgtttcataaaccataaaataatacagtaatgtactatttttttttttgacagcctcactctgtcacccaggctggagtgcagtggcacaaacttggctcactgcagcttcaacctcccagattcaagccattctccagcctcagctccccaagtagctgggcctacaggcgcatgccaccatgcccagctaatttttgtattttttgtagagacggggtctcaccatgttgcccatgctggtctgaactcctgagctcaagtaatctgcccgcctccacctcccaaactgctaggattacaggcatgagccaccatacccagctgtattagttcttgttctataaagctttttttttttttttttttttttttgaggtggagtctgtcgcccaggctagaatgcagtggcacaatcttcgctcagtgcaacctctgctcccaggttcaagcaattcacctgcctcagcctctcgagtagctgggattacaggcatgcgccaccacgcctggctaattttttttgtatttttcttagagacggggcttcaccatattggccaggctggtctcgaactcctcaccttgtgatctgcccgcctcggcctcccaaagtgctgggattgcaggcgtgagccaccttgcctggccctataaagcttttattctcctatggcattgcttaagaatcccattaaagtatgaataaggactaataaataattgtgagttttgattagtgtaacaaatgaattacctagatcagtattttcaaggtatggtccaaggaatcctggaggtcccctagacatttttggcgagtctacaagtgcaaaactatttttataatactgagacattctttgccgttttctttgtagtgacatttgtacctgtagtataaaaacagtggtggataaaacttctggcgctttagaataaaccaggttagagtacttcactgtcctagtaatcattgtattattcactgccatgcactcagatttttttttaagtttcacctaaatgctcttgatgaagaagtaaaaaaattttaaactaaatctctacctttgtacacatctttaatatactgtaacaaaatgggaagtatgcttaaaacactggcgaggccatggacagcaagcctcccagcactttgggaggctaagtccagcttgggcaatgtagtgagagcctgtctctcctattaaaaaaaaaaaagttagtgtggtcatgcacatctacagctactctggaggctgaggtggaaggatctcttgagcccaggagttggaggctgcagttagctgtgatcgtgccactgcgcttcaacctgggtgacagagcaagaccctgtctcgaaaaacaaaacaaaaacacttggcagcatactgaaatataatggttgtttctagggaaagtatttgtgtgattgagtcacacgctgaatcaatcttcatataatgccatttttgcttaaaagaatgccagacttgggcattaggctgacattttcttgaaaacagtgaggctttgctttagggaaaatagtggtagtatttatggtcgatgataaagttcctagattttaagcaaaaattttagaaagcttgtatcagctgctgtaagtatataatgaaatctgtcattatttgattatctgcataactgagtcagtatttccaaatgatcaatgcatagtattataaaaatcatacatgggtaagaaatctttacaaagtgtcagctagaccaatggattttaatgttatagagaacataaaagtttatcaataaggtatcctgttccatattgcaaccaattgctgagctttggtgtagtgtcaaagaccagtatccagatttatctgaaaatgctattaaaatattcccaactgtctaatgtattttgtattacttatttttccatgctttgctctcagtgtttaatgtcttctttgatttattttgtttatatttttgttggaaacaggaatgggagccatagataaatgtgaagcaatgttttcatgtgctttatcttaaaatctcctattaatatataatcagtttaacttctttgtagtcttctctgtgcattccattcaacttttggtcttggtaatggattagataatagttatttttaagcctatttttggttttaatatttgttttgtatacctgactgctcatctatagacagaattcccttgtgtccaaagtctaacataatccttaagtagatttttagtagttgactttctcagttttaaaatatttgataacttttccatagtaaagctgtaagtttcaagtttagtaatgtctttttgacctgagaatttggtgtgttgtcttaccttaagtagacacttttcaaaaacacacctgtagaatgatcctttttttacctttcaggagaatgctgtttcttggtggtggtggtttttttatttttttatttttttttatttttatttttattttttttaagactgagtctctctattgtcacccaggatggactgtggaatgcaatggtgcaatctcagctcattgtaacctcctcctcccaggttcaagcgattctcttgcctcagcctcccaagtagctgggattgcaggcaccaccaccatgcctggctaatttttgtagttttagtagagacagggtttcaccatattggccaggctggtcccgaactcctgacctcaggtgatccgcccacctcggcctcccaaagtgctgggtagagccactctgtggccttcttttttatgttaatttaaaaacatttgtagcaatccttgttaaactgtttttataaactcatgggataagtccaaattttattttccttttcttttttttttttttgagacaaggtctcactgtcatctaggcttgagtgcagtgtcacaaccacgactcactgaagtctcgacctcccgggctcagttgatgcatctcagcgtcccaagtagctgggactacaggcgcatgccaccacacccaactaacttttgtagagacagggttttgccatgttgcccaggctggtgtcaaactccttggcctaatcggttcttccacctcagtcctccaaagtgctgggattacaggagtgagccaccgcaccggtctggttccacattttaaaggatttttagactgtgtttggatcgagtaatcagtttcagattaggagagtgttaagaaagatagttaagttacagtttgtattgtgcacagtttcttggaaatttagtgccagttatttccctagagagattaaaatggagagaaaagataattcagtctgaacaccagtgttgcaaagaacaaagttgacaccagaggaagaaaaaggtttagggaaggaatacatgtgaaaatgctaacttcagggtagcttcagggattaagcattatagaactcctgcctgcatgtgctaatcccatagagagcaagggaatttaacaggaagctttagtgctccctatattaaataattaactggtctgctgttctagcaattctgaattagggaacatactgagatcgtattttatgtccaggacatccaaattagtcacaaggttgtcactgactattatttatagagttttagttgctagttgaaaatattgcattaaatccttctattttagcttgtttatacttgtgtttttttcttccaggagctctcaacttaatcatccttcagcaaaaaagaattaagactaggtttgcaagcttttaaggacagaaaaagcatttataacatttctctgtttagatgaaagtgatgatggttaatgatggtgataataggcaatgaagaggtgaaagggcaggaagtagagcagaaaagagagtgaggatggtgattaagaggttcttgttaagtgcaggactactgttaaaagcaattcacttcacagttctggtcaacaggaatgataaactcaacattgaaaaacacttgtgatgctttagtggttgatacatcttacccatcagaaggtcctatgtagaggataaactggcattatatttgagttagagattatagtcttaaaatttcatcactaagcagtttgactggagagcctttgactagttctgcttcccagcagtcccttgtgtacttttctctggaccttcaggtactcaaattagacctttatttcattgtcctcatatgtttttttagctcattccattgggtgtgaaatcaaatctgagaactcaggtatttgttttaagtagttagaccttttattgtactctgttgtcttaaaaagcatggtttagtggtggtaacattgacctaggtgacaggcttcagtttagtttctggcactggtcatgaaactttgaacaagttaactcctctcttaggaccttatctttatgtagagaaagttggactaaatggctgttaaggtcttttcgggctttcaaatgctgtgtttctgtaataccacccttgtttaagccacagtcatctcttgtctggactcacaggagcttcctaacttgttttcatttttgtccttccccacattattttctacccagaatacaaagtgacctttttaaaaatgtaaatcagatcatgtaataccctccggtcccaatttacccttaagaaccagttccttatcaaggcctagaaggtactgcataatccagttcttgcttacttcacaactttatccccattactcactaagctctagccagctgtacttctttctgtgacaatcttttgccagccctctgcaattctgcctcagtctcaacagtggatctcagttcagatgtcacatttacagagttttttcctgatcaccttatataaaggagcattcctcttcattacctctgtagttcttaatcataatcaataattatatttatccatttgtttgcctctcatcccctctaaactgtttcaggacaggaagatcatgttacttttccaccactatctcaaatggttagcccaataactgcctagtgctcaagagaattattttagttagaaaaatacataaagtatgtaacggtttgtccatatcaattcccataataagctactccttaaactggtttttttcttcactcttttggtagtggcctggtctcataatcttgcccaggctagtctggaactactgggctcaaggatcttcctgcctcagactcccaaagtgctgggatttacaggcgtgagccaccacacccagccttaaactaatttttaaagttttatatctatgtccaactataattcctcattttttatttaggtcatctgtctcttgaggactatttgatctgattgcatgttattgaaagctaattgttcttagttactatatgttaggattaaattgagtaattttgcacaaaaggtttttagcaaagacatgaaaagttaaccagtataaaactgttagcagttcagaatatccaaatgagtgatataaatgagtgcttattagagtcaaaggaagaagtgaaacccttaggatctagtagttagaaaagacagtaaaaataaggtagaatctgcatattaaaggagttttagattaacagtgaattacagtgagcagtactacagaactacagaaattgaagtaaattcaagagtgttttgccctggtagatgtttgtaaaattgattatagggccataatcccttatctatatataacctttggtgccaggtatttttggatttcagaattttgaggaaagatttgttttagattttggtaagagtaatcaaacacaatattaatgtggaacatggatagtcacattaagtgagagaaataaaagataaaaatagtctcccatcagtgctcaggtgaagttttgccattatatattaggattaagctttgccaccaacatagttatagaactttgagttttcagagattttaggatttcagaatttctataagaagtcggtttcaggctgggtgtagtggctcacgcctgtaatcccagcactttggaaggccaaggtgggtggatcacgaggtcaggagatcgagaccatcctggctaacacggtgaaacccatctctactaaaaatacaaaaacttagccgggcatggtggcgcacgccagtagtcccagctactcaggaggctgaggcgggagaatcgcttgaacccaggaggcggaggttgcagtgagccgagatcgcgccatggcattccagcctgggcgacagagtgagactctatctcagggaaaaaaaaaaaaaaagagagagagaagaaattggtttcaaatgagttaaaaaggctttattcattactgtttggagaagataccagggtctgaaaatgttactttgaagcaattagctttagaaaccctctttgccaaggaattgtttgaccctgactcaggatggaatgcagtgctgagggtgatgagtctttagggtatgggagaatcacctcattctataattgcagagtccagttaaatttggaaatagttaagattggtgcctaacaaacactaacatttttttaaatgtttaaatattgagagctcataactacagtttcatcttggtgatttttttagtcttataaggtattaggcagtttgtttcctaataatgtttttaagaattatttgatacatttaattgtaagaatacaatagattagaataggaatattataaataggactaatgtaatcctcatttaaaaatcctcagaccagacacggtggctcacgtctgtaatcccagcactttgggaggccaaggcaggcagagcactttgggaggccagggcgggcggatcacttgaggccagaagttcgagaccagtctggccaacatggtgaaaccccatctttactaaaaatatgaaaattagccaggcatggtggtgtgttcctgtagtcccagctactcgggaggctgagcaggagaatcgctggaacctggcaggcagaacttgcagtgagctgagatcgtgccactgcactccagcctaggcgacagagtgagactccgtctcaaacaacaacaacaacaaaagctcctcgatggaaccatttgatagtgacaaggattgaagtaagtatctgaagaggctacttagaaactcagaattggttacaggaagtgactgcccactttccatgtgttcttcagatgctctggttattctaacagcctagttaaccacccagactttggttctcattgcctttatccatttgtttggtgtatatactaatgttcaacgatgcacacataatgcatgtgatgttttttggataccgtcttatcacttgtagaattgccatgataggcattttttggagctactttaagtacttgctggcctagtaattatgcaagtaagtaattaagtgtttattcatatgtgaaagcccaatgtaagcattatttatgtctttcagtgaagtgtggtgtgcctttcatttttctgagtggtctttattttatggaatattaaatggatctttgaataaactcaagagggtagattataaaaggaagaactgttaaattagtcaaaaacaactttataacacaattagctgcataagccagtgcgtgcgtaagcaggtagtataaatgcttaggttgagatactaaaattattattagagaaaattacaggaagtacctatgctcccactatgttttgttacttggttaatttttctcctctgaacttctggcaggtttactggggaattttccattaggaatattctggtccttaagtttcattttgaatgtataatataatcatgcagattacgaacccacaatctaaaatcaaggcattcttttttaaagtttcagatgaggctgggtgtggggctcatgcctgtaatcccaacactttgggaggccgaggcgggtggatcatgaggtcgagagatcgataccatcctggccagcatggtgaaacctccccgtctctactaaaaatacaaaaattagccgagcgtggtggcgcgcacctgtagtcctagctactcgggaggctgaggcaagagaattgcttgaatccaggaggcagatgttgcagtgagccaagatcgtgccgctgcactccagtctggcgatagagcgagactctgtctcaaaaaaaaaaaaaaagtttcaggtgtattcaggagtggtcatattaagcttgtcacctgatcctggttatgaggttaacagcaaaatgaaataaaatatttttctgagccatttgtttctcctctcatggaagacactaattctgtttatttctatattcggccttgtgttgaaacagactgtaaaatcatgttttaaaaaagcttcacccatccttgtggagggtggtggtttgcaaaagcaccaccccacttaagcatttatattgagaagatatttatggcattcttccattcatgaaaatgggtatgctttgttctggagttcttaccttgatttatctactaacactaaagttcctcacttccaatttcttatacctctaacccaacagcttataaactgcatgtagtatagtatttgcttgaaatatgtgaaagtagttattttccctaactaatagggatatttctgtggtggttgtagttactttgcaacctgttcagcaaatattatagggcgtttttgatggtatctttaaattttggacatagagaaccatcttggataacctctttccccccagtctcagtcatccctttggaggtagtgtctcatttttaatctgtgacttgtggaagttaaggcatttgagtagcttatttaaagtattaataatctgatttctggagatctgaggaatagcagacacccttttctgtattaaattggggaaatttattttataggcaaaaagatgaataaaatggtcctagtagacagcccctaatatttctggtctcgggtaaaggtcttaaggaagagggaaggtagtatcagaattttccagggtgttttttttttgttgtttgtttgtttgtttgttttgggtggacaggaagtagaatttattggtgagtattaagagggggcagcacagtggaagccctcatgagtgcagggcccgccacttgtccacagggccacgattggaaatgtacttgacccgacagccatctgggatgagccgcttctcagtcaccatgtcttcaaactcattggcattgaacttggtgaagccccacttctttgagatgtggatcttctggcggccagaaaacttgaacttggccctgcgcagggcctcaatcacatgctccttgttctgcagcttggtgtgaatggagatgataacttggccagtgtgaaccctggccacagtgccctggggcttcccaaaggcacctcgcatgcctgtttggaacctacactggggtagtgcaaggtcagaaacatgaacatccatctgaaaggactgtctccagggtcccttagagcaacccatacaatacaacacacaggctgcatacactaccaaggaagctgctgtttgcagccattgcacactgggcccccccatgaggaaaggaactcagttggcttaataggctgcagcagggtgttttttaaaacacacaaatatacccaatccctactagaatgagagattttactaataatagtgttaggagtataaatggtttggtagccaaccactactttaaaattgattaggtctcccgggcttctgggccttcacatttaaatttgacctgaccttgaaacttcacctctcgttattcccagcgtgacttttgttttacccacttttcgaaataccccatgtgtagctccttacttcacgtcatgctggaatgtgacccataccagccaaactacatctaacagaaacataatacctaactaaaagcgtcttttatcatatagatagatgtacagggtatgttaatttatctttagagagactccccagtatactgaaaaaacagacctaagttttggtagatagccttgctttatagaaaatgaaaatgggccagacagtggtgactcattcctgaaatcccaacactttgggaggccaaggcaggaggatcacttttgaggccaggagtttgagaccagcctgggcaacatagcaagaccctgtatctgcaaaaaatttaaaaaaaaaaatttaatcaggcatgcagcacacgcctatagtccagttactcaggatgttgaggtgggtagatcgcttgagcccaggagttgaggctgtagtgagctatgattgcacctctgcactctagcctgggtaacagaatgagaccctgtctcttaaaaagaaggaaatgaagatgccagatactagcttttccagcctcccttgcagctagggcacaagtacttgacctaggccccacaaaattacatgtactttaacttgagatggaagagatgataaatttctgatagatttctcttctcctcttggttgatgtacaccacaaatcagttttctgctgcagaaacaactgatacaaactgaagcatctactgttagtgatgtgacagcagtttcctcacctggccagttttgtaatacggtttcgggtgtttgtggctatgttagcttccaacttcattctctagttttccacagtaattttgtaagttgcttggtattttttaatgacttatttttatatgtaaatgtgatttgtataacttccaacaggaaaccttgtccaatgcgtgattttagaaaatttagcaaaaacttttcaaagggatatttatgtgaagaaaatgagtggtatccttgtgagagaaaagtacaagaatgagactggggcaaactgcttttccagaaataaagaggccctgatggtgacacttttggtagatccaagcttttcatgaatattgaagctctggatgccttgttcagtagtttcataagcaaaaatccaaaagtgtagaaagagttttaattgaaattaaataaaatcaaaattttagttttacagttacactaaccacattttaagtccttgatagtcatctgtggctagtggctactatactggacagtccagatagaacactatcattacaggaagctctattggacagcactagtctggattctaatcctaaatctacagtcttgtggttctgcaacctcaggtaagtaatctgaatcacaaatcctttatctctttttatttatttatttatcttctatctgtctgtctgtctgtctctgtctattttgagacaagtctcactctgttgcccaggctggagtgcagtggtgcagtcacaactcacctcagcctcctgagtagctagggccacaggcatgcaccaccatgcccaggtaattttttgtagagacaaggtttcacaatgtttcccagtctggtatcgaactcctgagctcaagccatctacctaccccagcctctcaaagtgctaggattacaggcgtgagcccttgtgcccagccaaatcctttatctaaagacagtaccttattttcattgttgctctgaagattgaaatttaatatatggaaggacatggtaagagctttaaaagcaccatacagacatgtcagtgttcagattagaaatatatttattggttaacaaaggatttttctaaaataatctgaagagaaacttcagaacctcagtggcatgaatactttgatgttagaccgtgtgtattttaaccacttgaagaatctaaatgcacaaaattaacagattagattttcattttaaatgtgaaatatattttacccaagctgtccttttcaattttatctataaatcttaaagtttttatatgtactgggggcttaccttcttgctgtaggttccctttatatatactgttttatcatcctcatgaatgatcttaaacaactcaatctgttaactaagtgaataatgtacctgtcacatagaggtattgaatgaatgttataaatatgatagctatctatgccagaaatcgttggttttggtagacagacttcagcattcagcacgatcattctcagtaattctttataggtgttttgatttgttttgagggggttgtttggcatatattttgcaactaattaattcatttttgtaaaaccatcagacaacagtgctagatgtttaaaatattctacagcagaaattttcaaatgtttttggaatcattaatacaaccctgtctctccttcacttaaaccacagtagccattggtaattgagaactagattctttccctttgagtcctagttgatctcaaaaatcattctcaacactgcacttagctacaggtagctgttaatattttgagttgatgactaagctgaaacccatttgccacctgtgagttaatgggcaaggtctatccttgtctcttccaggctctagcctatagtgcaagtgttggcaaactttttctgtaaaggacctgataactattttaagccttgttaaccatacagtctcttatcacaaccattcacctctgctattgtagcctgaagccagctgtggacaagacacaacaaatgaactatgttccattaaaactttatgagtgtgactgtgttccaacaaaattttatttaccaaaaaaaacaaaaacaaaaaaacagggagcaaatgggatttggcctgggagttctagttggccaacctcccctctagggcaagaaactggttttgattcattcaacaaataattaggtgtcttccatattccaggcactgtgttaagttttgattatatagcaataatcattacacgtaggccccaggtcatgaggtatttaacccttaactgagtatggttttggggctttttgcttttttggttttggggtcttttttgtttttgtttttttgtttttttcaaggcaggttctcactctgtcacccaggctagagtgaagtggcgctgtcacagctcactgcaacctcaacctccccaggctcaggtgatcctttcacctcccatcctcccgggtaggtggaactacaggcgcaggccaccacgcctggctaattttgtgtatttttttgtaggggtggggtttcgccttgttgcccaaggattacaggtgtcaaccaccgcatccagcctgaatttgttttttttttcatgtactttggcagattcgaagtacttttttgagggaaaaatggagtctgccccatacatctgctttatttgttaatacatgtgaggttgtaggcaaataccctaagtgctatgttctgtgatagtggtataactaaatgtaacttcaatgtgccttagatattagatgccatggtatcaaaattaatatcctgttataaaaaatagggaagcaaaaatgtttgcatatgatacctaccctggctgcacatagcagatacttaatatccatataatattgaataaagctgaaattaccagtttcttaactatccttatgtcactttcttgcagtttcttccatttggtatgctatttctgacctcattttttgtttttcgccaaaaaattaccacatattactcatattttaatgaaatgcttaccatgcctagatgtattgttcagccttctactgttagaacttctttcgttaatttaaaagtatctttagttttctcagtattcatgtttatcttcaaaatgtctattgttgttgcttattaaatgagtcagagctcttcactgatactcagagatctccttaatcttaactgaagattactgctatttttattttcctattcctttgtgccctgtgagccagtcagactgctttttccgctatagtctaattaatgttcccatgttatgctgccttttgtgcctttgctctcacttttcttatccctggtatgttctttcctgttgaaatattgtaacttttttttttgccaccctcttcataaatctgatctctccttctgaactcccatagtattttgtacatctcatgatatttttcatatttttatgtctccatcttttcctacaaaattgtaagctttttgagagcaggtatgttttgtccatctttcagaatatgaaataagaagcaaattcctgtcagaacatattccacctaaaatggccaaccattcttgttttcccaggatggagagtttcctcagacatgagactttccgtgcttaaacctggaccgttggtcactctgattccacttcatgatgtagccatcttttttgcatatcagtgctttactgcaggttttttttttctttttctttttaaagaataaacacataaaatgaacatgaaggaaacagttttttgggttttggatttgttttttttttttttttgtttgttttttttttccagactgtttggctgtcacccaggctggaatgcagccacggtctcagctcactgcaacctccgcctcccaggttcaattcttgggcctcagtctcctgagtagctgggactacaggtgtgtgtgaacatacccggctaacttttgtatttttattagagacagggttttgccatgttggccaggctggtctcaaactcctggcctcaagtgatcctcctgcctcagcctcccaatgtgttaggattacaggcatgagccactatgcccagccaaacaaaaattttttttaattaacaaagcaaaattacttgtgccttttaagcaaatgtttggaagattatactcatatgtagaaatgtaaagatcagattcagatgataaaaaaggccaaaatgtgggaaaattttgactaaagttgaaaaagaatgatgtccttttcacaagcagagggactcttcagtaggtttggtttatggttagtagacacagtttttttttagagtagaccctgtaaaagaatgtggagtaaatggtggcagtggtttgaccacaacagtggtgtctattgctagagaaattaaaaataagatataagatacttaactctcctttttacaaaaggcttcagataaagaggaaatgggagcaaatccagagattataggcactgtatgggctaatgatttttttagagatgatgcctcactatgttgtctaggctggtctggaactcctggccccaagcagtcctcccactcaagcaagactgaagtaactgggactatagatgtgagctatcatgcccagttggcaggcgatttttatatgttatggtttattgtacaatacaagctattcactgcgtgttttattgtgagaagctcactaagttagaaaggttttcagttttgtgcagtatttttttctgttcctatttctatttctcataagctgggaaaaacatcatcagagttcattgggtgacatcttacatctaaaaccttaaaactaagttgagatttattatcacaaaataaattcccccatacctccactgaaccccccaccacccatgacttgatgacttcaatcatactcatcccgttccccagagcgccctcactttccaagtgaactcccctattccctaatgatttatatatccactggtctggtttaagtatccacttaggaagccttgcctggtagttctttatagatagacaattgttctcttctctgcatccacagcaagcactttattctgtagaccctgcttcattgtgagctaacacagcgcaaacactgtgaacattttaatttataaaacagagtgtcttctgggctttaatatgtagttgtcacatttgcttttcctcagatttctgggccacataacctctgtcacagttaaaactaatatctcggctgggtgcggtggctcaagcctgtaatcccagcactttgggaggccgaggcaggcggctcttgaggtcaagagtttgagaccagcctggccaatgtggtgaaaccccgtctctactaaaaaatacaaaaattagccaggcatggtggcgtgtgctcgtagtcccagctactcaggaggttgaggcaggagaatcacttgaacttgggaggtggaggttgcagtgagctgagatcgtgccactgcactccagcctgggcaatacagtaagactctgtctcaaaaaaacaaaaaaacttaacatctctaatctggtcattgaaattgaggtgtaaagcaaattaatgttttctcgttgcctcttgtatcctcctcttcccgtgtaagaaataataaggcccagtataaggtagtggagtagagagaatggaattgattccagaaataccaaggtagaatgaatcagacttgataatggagtgaagagagaagaatccatgacaactcccaggtatacagctacctattaaaataatatgctattgaagtcctttaggtgtcttaagcactataaacacctagatagatataattttaaaaaatagcaaattaacatttactggctacttcctatgtgttactcattgtgctacacattttgcatagggtaagttatttcatttgaatctttaagaactgtaagaagtagatacttttatttccattttcaaatgaggaaatgagacacagtttaaaataacgagaccaaagccactcaagtagaactgattccaacccagacaatgggatctaaagcctatactgagtcagtatgcatccctgtagattttactgctagttcagatgacagggaaaaaaggacatttttttaagtcacatctagagaattgggagcagggaggagttctacacaaatacagcctatttggaaagatctgatagaaactaataaggtgatcttgagcctatattattatttttttttttacctgtttttgaattgttggtctctccttttttaaaaaatcacttaactattttgcttatctcttgactcggctgagaaatctattaaactggttcttctgcatttgtcagattgttgataaattgttaccctctattctgtattctaccatacatgatcaaatactgaactgaaaaggtaactatagaaataaagctggaaaagctaaccttacgttgcatgtcaaattatatgttgttgaatatttcagggagaaagttggtgtgattaattgaaaaaacttgatttactagcagtattaatccatgaaaagggcaagggaatttttttctttcttgaggtattataaatatgatcagaatagagaaaatgctatacacagtttgataatctacaaattttgcactttctagatttagaaatcttgttcacaggagatctttcttggcagaatgagtaagattggaaacattttccatgtgtcctcattatgagagaggcagacaactcaaagtaaatatgataagcagtcttcattttagcagctttctatttattttatagttccttgttagaagttttatttttaaaagagggtaggagaggcagtgtttgggccccttattttttccttcaaaaagaatttttaaagtctgtcattgtgttaaacagattcataacaggtccttctgacagttgaattagttgattttatttgggaatgagaaaaggacacagttaccctctttagctgttaaagtattacttttggagttggagatggaaaggagaaatcaagtatcttctcttccagaaagtgcagtgggagaagtaatgttacctgacttcaggaaccagtatttaaggcctctttttttgagacagagtcactctgtcacccaggctggagtgcagtggtgcgatctcggctcactgcaacctccgcctcctgggtacaagcaattctcctgccttagcctccctaatagctgggattacaggcgcccgccacctcacccagccaatttttgtattttggtagagacggggtttcaccatattggccaggctggtctcgaactcctgacctcaagcaatccacccgcctcggcctcccaaagtgctgggattacaggcatgagccagcgtgcctggcctacttaggcctgtttttataatttagggtcacagaatttcaaactggggttagggggtgagtgtagtagttaaacaacttgagattggagaactgcttttgcaaaatttccattttggttatacccatgaagagattttttttttgttacgaagtcttgctctgtagcccaggcttgagtgcagtggcaaaatctctacttactgcaaattccgcctcctggattcaagcgattctcctgcctcagcttcctgagtatctgggactacaagcgcccgccaccacattcgagtattttttttttttgtatttttagtagagatggggcttcaccatattggccaggctggtcgcaaactcctgacctcaagtgatctgcccgccttggcctcccaaagtcctggtattacaggcatgagccatgacagtcagctattttttttggcatattttaagggacagaaattatgctttttaaatgttgcttattgcttttcaaggatttgattcttataagctacttcttcatttattaatgagatttaagaaagaaatcaggttacaaagttatgagcaattgtctctggaacccagaagttggttttaacactagagtttctgctgcagggcatttttactggactgtgattcctagaaggcaagtataagcactgtttttttgttgtttgtttgttttagaaacaagttcttgcgtcacccatgatagagtgcagtaatgcagtcatagctcactgtaacctccaattcgtgggcttaagtgatcctcctacctcattcttttgagcagctgggactctaggcatgtaccaccacacccagctactttataaattttttgtagaagtgtggttttgctgtgttgtccagaatagtcttgagcagtcttcccacctcagcctcccaaaatgctgggattgtacaggtaggtgtgagccaccatgcctatccctgctgtttttttttgagacggagtctctgttcaagcaattctcctgcctcagcctccggagtagctgggattacaggtgtgcaccatcatgcccagctaatttttgtatttttagtagcgatggggtttcaccatgttggccaggctcatctcgaactcctgacctcaggtgatccacccacctcagcctcccaatgtgctgagattccaggcatgagccaccacacccggcctgtccctactttttttaatgccaagatttgtgtatttcatcttcagttgggattcatggcatctgtcaataattgatgtgaacttaaatggcaatttacctataaaaagataacttactactcttcttttaaaagtctatatacttctgtcatttgctggaaatgaattattagtctttattcagcaaacatttatagaccaaatagtgggtaccaaaataagtactaccctgcagctgcttgatgatggtaataactaacatgtaaatctttaataaacagtgtacattcttaatctgtccatcaactcggtacagtcagtattgttgtccgtatttcacagattaagacaccagcctagaggccgagtgcagtggctcacgcctgtaatcccagcactttgggaggcccaggcgggtggatcaccttaggtcaggagtttaggataagcctggccatcatggtgaaaccccacctctactaaaaatataaaattagccaggtgtggtggcacgcacctgtaatcccagctgctcgggaggctgagagaggagaatcagttgaaccagggaggctgaggttgcagtgagctgagatcacacaccactgcactccagcctgggcgacaagagtaaaactccatctcaaaaaaaaaaaaaaaaaaaaaaaaaaaacaagatgccagcctagaaataaatgaccacccccctggtaaattacgtagctagttttggtctccttatttccagatttcatgttttatcaccctgagctccaaagatgatacagtatttacttttaagtgtataaggaaaaactgagtttgggcctcaaaccagccccaggatttctttatttaccaattatgaactagcctcactcagttcaggaagtctcttaaaatgtcagttatttggtttcatcttcttaaaatgtagaattgctttatgttatttaaatatgggtccttttttttaatgagttaatttgtttgcttttcaagataattttggattcaaagtttttaaggtaacctgggatgcaaattttgctaactggattaatacaaatttaagtttttaaaattccattgttcaactgtgttttatcctggataggattaaagcagtctttaaaggtaatctgttgttggctttaatgttttatagtacagtctggtgacacttggctcactagtccacattttttgtatatttggtatatagattttttccttggtagtcacttgtttttaacttctttttatattttacttcccagtcttaatctctgtaaccaatttgtataatcccttatacagttagtctctttatttgtggtattatttgaagagaagtgtgtttcctgagagaggatgtcatgtccgtgccctaatttttagttacatggcttttatttgcataaatagcatgcgagaaggtaaaggaaaatgtggttgcatcttgtcctggttgagtgcccactagtcttaatggattttcccagttgtgcatactttaggagtaaggatgttgtcttacgtttattttcactcctttttaaaatgtgtattgtttttgaaagataatgactccaaaatatctataatatcaaacaaccattatgaagttagagaaataatatttagattatattaaattttattaccagtgcaatttatttttttatagtaattaaggaatctaacttttttttgttttttgagacagagtctcactctgtatgcctaagctggagtgcagtggcgcaatcttggctcactgcagcctcggccttccaggttcaaatgattctcctgcctcagcctcctgagcacctgggattacaggcatgcaccaccaagcccgactgatttttgtattttttagtatagacggggtttcaccatgttggccagctagtgtcgaattcctcacttcaagtgatctgcctgcctcggccccgcaaagtgctgggattacagacatgagtcaccacgcccaacctaagatgcttttaaaattccatttatgtttaattcttcaaagtctggtacatgtaacattattataacaaaacattttataattgaaagggactttagggatctagtcgagaagtcaaaaactgctggaccagggttcagagctcttatctctcaaattgattttgttggtttatacaatattcataatttttagaattcaaatgactttacccgtaaagcattcactccctacttgaccacagtctatgttattacctaataagaccttaactgcttcaagcgtttacatggttacctggctgatgtaagtcatctgagtgttcagtatttcccctttccctcattccatctttttgtagacaaggaatctggaaaccaagaattaagtgatttatctcaaaatatacgactttttaaatagagcttcttaaattcaaagttaatgttactttctacagcttgttgtctccttagaaaatagtacaaggtaatacgtaatcaagtcctaaagtatttggtataacttgtcatgaaggagaatgatcactgtgggctgagttagtgcaagaatgcttcagagacatttccttgacactaacctcctaagaactgcatcttgagatatgctgccctgatctgtgttgtttttgctacacagctgaggaaaagaggtacatatcctcctctaaagagctggcacaggaactcaccaaagggcattttgtacatattgaaaaacagcacctcataagaccaactacatttagacttctccagaaatcccatttatgcccctttttgcagaggaaggggctggattgactcccaaatccaaatttaacttcagccacaaactaattagcatgtcaccccaccaaagatttttttttttttttgggagactgagtcctgctctgtgctaggctggagtgcagtggcacaatctcagctcactgtagcctctgcctcctgggttcaagcgattctcctgcctcagcctcctgagtagctgggattacaggcatgcaccaccacaaccggctaatttttgtatttttagtagagatggggtttcaccatgttggtcaggatggtctccatctcctgacctcgtgatccacccacctcagcctcccagagtgctgggattacaggcatgagccaccatgcccggcccaaagatgattttttaaatgctcaacaggacaaagcctaatggtagtcttttgttaaaaacaaaatttaatatcaatccattgacaggactctttgtgtactgagctatatagtaatttcaccttaatagaagttcttcataaccaccccatataaaaccatccattcttatctcttttttttttctccatactgcttatcacagctgacactttatactgactttgtttccccctctataccctttactccagattataaattctgaggacagggtctttctttcactgctttatattcccactgcctagaatagtgcctaacatatattaggtactcattatatatttattgatgtcaaatattgattgctgtattatagtagtgttaatggaaggtgtcatttcttagattttcttttctgaccagcacagttcttgggttgatggagtatgtcctcaataaatctcagcatcaaataaacaagaattttctttttaatacataaatttgtcattttgttacgctttttagtttcctcagtgattttttagaataattcttgttcataatttggatcagtaatatctacagttgaatcttaggaagaatgttataggcaatccagaatgttggataattaaatcagttatttgcattttgatgtgtaatatagtgaacacatttagacaaaaaaaaagctaccccataagaccagtttttattttctttgattcatgtcttcaggattttctgttaactcagaattattatagcattcattattgttttgtgaaaatactagttaataatctccggttaatgaaataattatcttagataaatttactgaacttaatgtagaatatgttttttgtttcgttttgtttttgagacagggtctcacttgtcacccaggctggagtgcagtggcacaaacatgggtcactgcagcctcgactcctgggctcgagtgatgctcccacctcagcctctcaagtagctgggactacaggtgtgtgccactacacttggctaattttcatattttttgtagagacggggtttcaccatgttgcccaggctggtcttgaactcctcctgagttaaagcagtctgcttgtctctgtctgccagagtgctggcattataggcatgagccaccacccccttcttccactttcatttcaaacagttatgaagcagccactgaaaccggactctcgacaatgccaaaggaggttttgttttcttgtctttccatgtctttgctgtggtttgctctgaaactagaattaaacagctttttaaattgataaaaaagaaccaatgcaaataaaactacggtctgtagagtaaatggaaaaagttgtagaagtaataataaactacttttaaacaaatgagtaaggtagtagatattttgcaagaagtaaatagccaagtgtaaaagctgtcagttactttcatcaatcaggttagttgcagtcacgcaaattttaggtgattatataaggaactcaaattaggaatctttaaatgtaaatgacctaatactaaaaactacccaaaaaatatattcaaagataaatagaagaaatacttatgcatttgaaaaaatcgatgcattccacagttcctctgaatcaaaggtaaaaaaaaaaaacagtgtagaaaatactttgaacagtagtggaatttttagtattttgatagctttctttagaaatttaattgattttcttcatctgtaatcttagattgtgttggagaggcagtgtgaatcatgcataaagtttataattgtgtatgtgcctacatgatgtagaaattgcaccttttggctgatgaagtatcgtatagttgcactgttgataacattaagttcatttcgcatatatgctacagtcttttctgtttaacgcgttgagtaaaatgaagatccaggagtccctcattagttggtataattggttaattcatagactaaagatgaatacaaatgtactacatttgcagattaactcatacataggcatattattgttaactagcaattcttaactgtacagatagtttcaaactgcatccagtttttacaaataaatgctcttgtttataaggaataccataaagagagcacatgtaaatgaagaaaatcttgtcacttatactggaaattcaagcgagaatgatattaaaaaaaaagttgttaaaggcaacacaagaagttaaatgaaactgagttagcaatgagagatattggctaatttactgtgcctaaaattatggtgctattggtctactgtataattattatttttaatgtccagaatgtgtaatacaagggccagaacttcctcctggactcaattttataaattctcgattagttggtgaggccaataaggatactttttctcgtctaatttggtttctgggaaagcttcgttcaagtcctcagtggtcatctgatcaaatggaattaagttcttcatcttctccatctgtttctcatattctacaatcctggcctttgagagagacacccactcagcacaagatttcacatctttttcttcggcatccacctgcgcagtatatttatcctctggcacgggaaccttcagggcattaaacttcttaaagtcatccaccaaaccggccttggccacgttggccttgtagtaagcccagtcgataaccggtggattctcaggtaaagcagccaacctggaggtgagggtctcattccaggatttcaggaaactagcaatggccttttggttctggggtatgatctctgcaaaagctactcagtcagtggtttttagagcaagttttcgcccagccatgttgggattcttcaccgaccctggctgcccacggtccactgcagccgcctttaacttcttgaaggttgttcatcttaaaatttctttcagagtttttctgttgattatagtttttgtttttcttccaaaatctcttcactttaaatggtagtacatggcagtaataccttctaatagtcagaactcttaataatttataatatcaggtattctagtattacttcctatcctctttttgacttaatccttattttctactgatgtacaagtagttaaaaatgagcaagcttctcagaatgtaatcatttacttgtggcacaccagttaaagtactaacttaagtcctttgctaccatatttatcttttcattctagataaattttttgcttgctaattgtaaatattgcattgatataagataggtatttaaaatgtcagtatttacattgagtatttctttttctataaagcacttaaaatatatttaatgttgtaattttcagtagttaagcatctcttagtcctttttgagaagtgttttctgagaagtaattaagacttaaagaatagaattaaactttaattgattcttttatgcttacctgtttgtttctttaaaaaggtaccctcaccattagtttattaatccagtacttttccaacatcaatattttatagttactctatgagttgagtggctaaacttggtatttttgagttttctaaagtctacttcttaaaaatgccagtaattatcagcattcttataataatattggggtagttatagaacaacttcacaattcctctgttaacttcagtttttgtttcatttgttttataattttttctatttattaacaatagaactgtcaggaaaaaaaataagcaaaaggaaaagaaaattccctatccccccaccttgtcatgtattttttttcttttttttattccagggaattgaaattcattttctattataatctcaagattttttccgtactcttgaggtaatgtaataatgagattcctcctaggctgtcaaaattacagtctgcataacttgaggtacaatagatttcattaagacttctgtgattaatattagcggtcagagacaatgccaatattacaggatttttgtttagtaatgtgttttttaaatacttaaaagagggctatttcccagtcattatctctgaacatttttaaatgattcaaaatactgatgtatgcacaggtttttgcttttttatattgacatggagggttcttacatgtttttgagctagtagattaaagagtggaacagtgggccgggcacggtggctcacgcctgtaatcccagcactttgggaggccaaggcgggcggatcaggagattgagaccaatctggctaacgcggtgaaaccccgtctctactaaaaaaatacaaaaaattagctgggcgtgatggtgggcacctgtagtcccagctactcaggaggctgaggcaggagaatggcatgaacctgggaggcggaggttgcagtgagtcgagatggcgccactgcactccagcctgggtgacagagcaagactccatctcaaaaaaaaaagtcgagcagtgattctcaactgaaggaatagcagtcctctttagtgtactgagtggcagctcaaaccattgttactcttattttaaaagttacttttttttttttttttttttgagatggagtcttgctgtgtcgcccaggctggagtgcagtggtgcgatctgggctcactgcaacctccacctcctgggttcaagcagttctcctgcctcagccttccgagtaagtaggattacaggcatgtgccaccacacccggctaattttgtatttttagtagaggctttgccatgttggccaggctggtcttgaacttctgaccagcctggtccagctggtccagtgatccaaccgcctcggcctcccaaagtgctgggattacaggcgtgagccaccacgcctggcctgaaatttatcttttgttgacgagtatgtgcaaggtgttgtgtcagtgactctgaagaattactacatttctttccttattctttctttaatttattgatcacatatttcaggcacagtttcaggttctgggaatatggcagtgagtaaaacaaaaaaaatccctatcctcatggagtttacattctttgtaatccatctcacaaccttatcatgtagctgttactatcttaattttacctggaaggaaagtgaggctctgaaaggtttcgtgacttgcccaagattatagaaaaccacaatttgaaacttaggtaccattagccactatgctgtgctgtcaaaattgtccccccatggggttctgtgaaagagaacaattagtctcaatgtctcaaatagtagttgtcacaaatgtctttgaaaatctgatgtaactattcccatttttaattgtgcatgaaattttagggaattgacatatttcaaagtgctcattcttaacctgagctaaggacttcaggaaaagaacacttgaacagaaaggttatgcctaaagatcacaaatacgctatacaaataacaggtgctacagctctttcccagtccctaccagcaccacaagccaattatgttgcttattgaacagagttgtcttttctgcaaaactagatgcaaccacaccatcctaaaaacaggataatggctgttgccagtcagtcagagttggcattcgcaataaaaatctgtttttcagtcttttcaaggctggtgtagtagaaagcacagatttgaaaaatactgattcaaatcttgactattgtactgttgggttttttttgttttgttttgctgtttaaggtaacagaaataccctgataatatccccaaactggaaatcagctggtgtgaatgggtaaagaaaatatcatgtattcatgtggtatattttaatcaacagtaataaataaaaggagcaagttactgatagatacaataatatggatgaacctgactcattctagcaacaaataataatgctcattcatggataaatgaagcagctgggaaaaagagtcccagtcacctcactaagaagtgtagctcccacagccaactcagccacctttgtgaaataagaaaggcatacgtctcttagaaaaatcacctctgataaatgtatagtttttatattcagtattttaaaattgtagtttttatgttgttgcggtcagttgtgttatgtttggaggttttagtgaatatatagttatgcaaccatcactacaaccagtttttggtgtgtttttttttttgagatggagtgttgcagtctcaccggggctggagtgcagtggcacgatctcagcttactgcaacctccacttctcgggttcactcgattctcctgccttagcctcccgagtagctgggattacatgtgcccaccaccatgcccagctaatttttgtacttttagtagaaacggggtttcaccatattggccaggctgaactcctgaccttgtgatccgcctgcctcagcctcccaaagtgctaggattacaggtgtgggccactgcgcccggcccactacaactagtttttagaacacttccatcacccccaaaaggtttcctgtgactatatgtagtcagtcccactctcactcccagtggaggaagggtggagaattggatgctcatatttcctttggagcagcaataatgaacagatttggggttattgtacttccatttgttagtgaacatgcaacatcagttcctcctgtggctctgtttgtacaagtagcctcatctgtgggcttgcatttcttcgaaaacaaagacctttttatttagttttttctagtttgtttgtaagactctgaaaatctcaaccattgtagattttttcggattaccaattttccattttaggtttcctatttcagacctgaacccatatacaaaaagaaaggccatctctttactttaactgttgggtctttgccagaatacttttgaaaatttccttaaatcaatttttattttgtatcctattgaatctttttgagacagaatctcactgtgttgcccaggctggactccagtggtgtgatctcagctcactgcaacctccacctcccaggttcaagcgattctcatgcctcggctttgcgagtagctgggattacagacatgagccaccacatctggccgagttcttgattacctaagctatcctggtcagatacactgctctttttttcccttttttttttttttaatttccccaaccttgctagactgctggtcttacaggattttggggaattaggaagttccatggttggcaaactttcaaagacaggagcaggttaatgttagctatagaagcactgtcactcaagtgaagacagttgttgattggttggctttgggatgtgtctgtttaacaggccatttttgattgcctgagtttcagaagtaaggaaccctcattagttggttagtttgtagaagcatatcctctgaggcaaattgttattagttgattaaaatcatttaaatcagttatagtagctttgttaaccatgacccaaaaaactgtcatttcttgatcagaagttttaaaatctgttctggttgctacctttgtaccactttactgactctttagtttttttctaggaatgtaggagccttttattctcatgtaatgcccccaccctggaatccttgaagaccttctgtctattgttcatatactgaaattttataatgataagccttggtatggattgtttctttctggatatattttgtttttatttctactatttcatcatactaaacattctaagtagacgttttcagtctgggaactcatattcttcagttctgcctctgattcaagaccattttcaggttgtctgtacgttccccactttaggaataaatatttggtcttctgcttcctctaccaacatattatatttaccatttatgtatgccagggcttggccagatacgtaaatatttaggctctgttgtaactactttgctgttacagcacagaagaaaccacagacaatacacaaatgagtggatatggctgtgtttgagtaaaacttgatgtaacaaaacaggtgataggttggatttcttttcagacctgtgctctatcctggatcgggctcaaagtcatgtctgtaattctgtagttttcttctacctctgagcatcttttaataagtctgcttatagggtgctccatactagggttgtatagtaatcattttaaataaatctattttcctgaatgttttatttctgtgaaaagcacaggaatacacaactttacttagaattctttttttttttttcctttaataaggtactaggttttgacaagcttgcatcatgcgtgagtataagctagtcgttcttggctcaggaggcgttggaaagtctgctttggtaagtcattcttactttacctaagcctttcactccaagacgttctttttctgttgagttttaggttttgatgatttgtctttgttaagataaaattccttaatgactttagaagcaatataatatttgtcttgtaattttattcaacttttaattatatctgggtggatcatattctctctggaacattgactccagaatgacacgagttatgctggaatacaatttgagctaagcacagagattgagagcgtacaaatacatgtctttttgcattcgcatttcagagccagataggaataaattttggtctttttatttatttatttttttgaaacagggtctcactctgttgcccaggctagggctcaagtgatctcagcctcctgaatgcttgggactacaggcacgtgccaccatgccaggctaatttttaaaattttttgtagagatggcgtcttgctatattgcttaggctggtcttaaactcctggcctcaagtaatccacctttgcctcccaaagtgctggaattacaggcataaatcaccatgcctggcttgctctttcttcttatgaatagtcttaccctgtacattttatgttagaaaatatcaaagcttataaaaagtcttcaaatattacctttgactgtccagctttacattttttaacggcacgttttctgcatcaaggaatggtatagcaagaatgaagacataactgggtaatgagggttgggaaagaggaaaaacgtagggaaaataatttgatgaatagttcagagcttagcaaagcctcacaagcaaatagattgaccttctgtctcactcataagataaaccatcttggccacttagaaaggccacctagctgagaagtgtcatgcttggaacaaactgagaagtacatacaatgtgaaatgaactgctttttcatttgtatccaaagtgatggggaggtcagttgatcctgcatgtatgtgtgtatacataacaattagtcaatttctaatttaaaaatcaaatttaagctcttaagactgaaacaatgccggcacagtggctcacgcctgtaatcccagcactttgggaggctgaggtgggcggatcacctgaggtcaggagttcgagagcagcctggccaatatagtgaaaccccgtctctactaaaaatataaaaattagccaggtgtggtggtgcatgcctgtaatcccagctactcgggaggctgatgtgggagaatggcctgaacccgggaggcagaggttgcagtgagccaaaattgcgtcactgcacttcagcctgggagacagagcaagactctgtctcaaagaaaaaaaacaaaggactgaaaccagagacatttaaaattttttaatatatgatctctaaatttagaattacccaataaggagcatagtgattatttatttaaaaataaacagcttcctgaggtaattttcttaccaaatgtacacattcgaatgtagtattggctgtggttttttttttcattgatggtgtaactccctgtgtgaactcagtttacaattacattaaagattgaatgtactcttttctttagaagtataatggtttcttaatttttttttcagactgtacaatttgttcaaggaatttttgtagaaaaatacgatcctacgatagaagattcttatagaaaggtatatattactttggaaggccttttgcttttgattttaatataaatacttattttagctttataattattgaatgttttatacaaaggatggaggcagagttaatttataaaattagtgggaaaagtttacactttctggcattgcatagttaccagtttaagaggatcataaacacccatactctcacatattcacagaattttttgtaatttgacacataaactttaaagcagaccatccatttcaagtagtagccccatgttactttcagtcccctacctagcaagactgattactctcaagctcccttctttttaacctagaaataggtggacacaggtcttcctaagctttctacttactaacctcttgagaaagtgccaccactcacaatactggttgaatatcccttatctgaaataactgggaccagaagtatttcagatttcagattattttctgattttagaatatttgtatatacataatgaaatagaatgggacccacatctaaacaattcatggtttcatatacacctcatacacataatcttacataatatttttaatattcttatgcatgatacaaagttttggctgcattttgactgtgactggtcacatgagctcatgtgtggaattttccacttgtagcgtgatgttccacacatggctcaaaaacttttggatttggaacattgcaagttttggatttttagattagggatgctcagcctatagaaaggtgaattcctgtgtccactaacagcatgtgacaataaaacaatgtgtagacatttttaacttagtagggaaagaggtatttcccaacctctatgaagcagccaacctggccccgctgttgcacaaatactgtgtttccattcctccctccatgtgcatagtctaccaaaaaaaaaactggaaacttttgcaccccagctgtgagacagtattactcttttctttctacatctaattctaaatacctatttttccctaggaaatattagatggaaaggggtaacagggatatatgtgtaatttatttaatagctgtgccactgcttccttaattccagaaatcttgttccagtatggtgagggcatatagttacctagagaaatgaggtatatctaaagtatcatgggagaatttagacagaattacttatgatactgttggaactgttgctggttttgtttgtttatttgagctatttcgaaactatttttttctctagaattaagtgctgagaatccatattgagactggttcgtgtaggtttccctgtgttgacttgagaacacatggcttttgaacttgattacaatttgggggtctttgaatcttgattacttagctatttttcctcctgctttgttgaagtattgctggatattagtttgtaaagttgttaaaatctgtgtgtcttatttttgatacattagcttttttgtgtatattaaggtagttttatgtacattgaaaaaatgaacatgtattttaatttttctaccagcaagttgaagtagatgcacaacagtgtatgcttgaaatcttggatactgcaggaacggtaggtaaaactaaataccaaagtatatacaccgtttgtacagtattgacttcataaatgctagtactctatagacaaatattagttaagcttatttaaaagtactgcttgcagccggttgtagtggctcacacctctattcccagcacttcgggaggtcaaggttgctggatcacttgaggtcaggagttcgagaccagcctggccaacatagtgaaaccccatctctactaaaaatacaaaaattagccaggtgtggtggtgggagcctgtaatcccagctactcaggaggctgaggcaggagaatctcttgaacccaggaggcagaggttgcagtgagccaagactgtggagattgtgccactgcattccagcctgggtgacagagcgagactctgtgtcaaaaaaaaacataagactactagttgctaaactttaaatctttttgttgttgttccgttgaatccttaattttatattggccgggcgcagtggctcacgcctgtaatcccagcactttgggaggccaaggtgggtggatcacttaaggtgaggagttcaaggccagcctgggcaacacagtgaaaccccgtatctactaaaaatataaaaaaaattagccgggcgtggtgttacacacctgtaatcccagttacttgggaggctgaggcaggagaatagcttgaacccgggaggcggaggaagtatattgcactttttgtaattgcagtgggtcagttattgaaaagtttagaaaatgtgttagaagaaaaattttcagtctcactagtacttttaaaacaatatattaccatatttcaaataatacaggcatacattcattcatcagcagctgtgtgaaatattttgattgagctgggtatgatggctcatgccttgtaatcccagcactttgggaggtcaaaggggggtggatcacctgaggtcaggagttcaagaccagcctggctaacatggtgaaacccgtctctattaaaatacaaaaattagccaggtgcagtggcaggcacctgtagtcccagctactcgggaggctgaggcaggagaatcgcttgaaccctggaggtagaggttgcagtgagctgataacacaccactgcactccagcttgggtgacagagtgagactccatttcaaaagaaaaagaaatattttgattggtatctgttctccttcaacgtatttatagacaaactaaatttgtaggtatgtgaagatgaagggaagatttgttctcggtgtatggtattcattcagctaatgtttgaatacctgatacatgtcaggcactgtgttgttaccttcaaatgctcacagtctagcaaagaaaaagtagtgtgggaaaatgggatggtctagatcatgctgatggagccctacagaactacagcatttgagtcatagctaatagattaacttggcagatacagttggggtgctttatacatgatgatgtattttaaaagctgcctttagtaacttttggggacaggatatttctgttccacttgagtatattttttgtatataaatcgactttggtgtattgtttttaaataggaaacctatttccagctgggcgtggtagttcacgcctgtaatcccagcactttgggaggccgagacgggcagatcacaaggtcaggagatggagatcatcctggctaacatggtgaaagcccgtctctaccgaaatacaagaaaaaaattagccgggcatggtggtgtgcgcctgttgtcccagctactcgggaggctgaggcaggggaatcacttgagcccgggaggcagaggttgcagtgagccgaggtcgcgccactgcactccagcgtggtgacagagcaagactccgtctcaaaaaaaaaaagaaactaaaatgccaattttttcaaatagtatcttgtcatagattataattttaacaaagttacataatactacagtattcttcattgagctataattatagactgtgaaaattgtaaaaataactgtcaaaacattattgttttttaacgttcctttctttctattgtaggagcaatttacagcaatgagggatttatacatgaaaaatggacaaggatttgcattagtttattccatcacagcacagtccacatttaacgatttacaagacctgagagaacagattcttcgagttaaagacactgatgatgtaagctgacttccaaataaatatattttatttcaaaaccctgattataattgtttaagtctaaatttaaattcattttaaagcttgtgtattttggttgggggggggggtgttggtttttttaaactttttccttgaaaggcaaaaatacccatacatgttttcaaatatatatcatgtggaaagtgagaaatttcctcctttgccattatcctgtgaaaattaaatgttacacccttccttttttttttttcctttgagatggagtcttgcactgttgcccaggctgaagtgctgtggtgcgatagctgtacctcccgggttcacgccattctcctgcctcagcctcccgggtagctgggactacaggcgcctgccaccatgcccagctagttttttgtatttttagtagagacagggtttcaccatgttagccaggatggtctcgatctcctgaccttgtgatccgcctgcctcagcctcccaaagtgctgggattttaaaggcaagaaatacattagattctaacattattaatttaggtgccccttcagagtctaccataatggagtttaattcctcatcacactaaatatagcagtggttctcaaaattgattttgcatcagaatcacctgtaggaccagttaaaacagattgctgggctgagatctcagagcttctgattcagtaggtcagcagtaggacccaggaatttgcatttctaacaagtttcgaagtggtgttggttttgctgatctgcatactgtaagaaccaggctgggcatggtggctcacacctctaatcccagcactttgggaggccaaggcgggtagatcccctgagctcaggagttcaagacctccctgggcaacatagcaaaaccctgcctttaccagaaatttaaaaaaaaaaaaattagccagcatggtggcgcgtgcctgtggtctcagctatttgggaggctgaggtgggaggatcacttaagcctgggaggtggaggttggcagtgagctgagatcacatcactgcactccatctagggtgacatagtgagaccctgtctcaaaataaatacataaataagactcattgtactgcagtttaattttagcaaatattgtgagagctgggagacacccatggtaaatgcttttattttctggacttctgaaacaagggaatttggggggaccctacataattacagcaacctcagggaacattttttaatttgtaaatccatttaataagtggcttgatttttagtaaattttgattggctttttttttttttttttttgagacggagtctcaccctgtcgcccaggctggagtgcaatggcacgatctcagctcactgcaacctctgcctcccaagttcaagcaattctcctgtgtcagcctcccaagtagctggaattacaggcgtgtgtcaccatacccagctaatttttgtgtttttagtagaaacagggtttcgccatgttggccaggctggtctccaactcctgacctcaggtgatccacccgcctcggcctcccaaagtgctgggattacaggcgtgagccactgtgcctggccttgattgacttttttaatacaagactatgagaaactaaaaattctattttgggagccttccgtccattatgataaaattttaaggttttttccccccatctctcataacaggatcatagcttgttttctcaaaagtttatgtaaaagtgtcttatttatgtctacattgactaggttgtgttcattttacttaacatatgagagttttctttctctcttttcttccctttggagttatcgtttgcatctccatgaaaagagaaggcagtggagataattgacatcaaagttaatacttatgtttatgttacagattaaattgttaaggctgtaaattttattatacattatttaatattttttgtggcatatgaaaagtaattcttagatttgactcttagaattcttttgatttgaattcatatagcatatttacttatttatttttactctcacaaatgtatttttaggttccaatgattcttgttggtaataagtgtgacttggaagatgaaagagttgtagggaaggaacaaggtcaaaatctagcaagacaatggaacaactgtgcattcttagaatcttctgcaaaatcaaaaataaatgttaatgaggtatggtcaaatatacttaaaatgggtcttcatttgaagtacaacattgaagatgaatggaaaatgtcttaaccccaagttaatatgtactcagggtaatatgttgatgttacaggcaaaaaaaaaaaaccctcatgttaaatgtatctatgtagtaaataaacaatactatttcagtctctattaaatacttgtacattgatatttaccatgaaaaaggaagactggacagaaaatacatggatagggaagacagattaagacttcaggtatatgaaggatgttatatgaaaaatagagtaaaattccgaaaagtatgcatggttcttgaaaggctccaagtcatgttgtagagcaaaaacttacagtttttaaaaggattttttctttgtgtgatggtaaatgttctaattgaactaagttaagatctctgcagctccttcaactaagtattttaaggagcacaatattaacactccccaaaaatttgagcttggcagttataacacctgattttattctcattccttagctgaacaattctgggcattaatttatatccatggaaatttctgttttttcaatttacttttttcattgggggggataggtgttcctcctgtaaattaaaacaaattattgtatttgcagatcttttatgacctagtgcggcaaattaacagaaaaactccagtgcctgggaaggctcgcaaaaagtcatcatgtcagctgctttaatatactaaatgcattgtagctctgagccaggtatgttcacttatctttcctctaacttttaatcactcaaccttattaagggcactctgtcatgaaagcaagtatagacttctttttgttggttctgaaaaataaatggtttatttttataagatatccatgagttagtatgctatcttattaattatttacttatcatcatgagtaaagtatttcacataagtattctttttttgagatggagtttcactctgtcacccaggctggagtgcagtggcgcaatatcagctccctgcaacctccgcctcccaggttcaagcaatgcttctgcctcagcctcccgagtagctgggattacaggcacgtgccaccacgcccggctagtttttttgtatttttagtagagatggtgtttcaccattgttggccaggatggtctcaatctcttgacctcgtgatctgcccacctcggcctcccaaagtgctgagattacaggcgtgagccaccactcccagccaaccccgtccctaatttaaaacacacacacacacacacacacacacacacacacacacacacacacacacgtgcgcgcgtgcgcgtgagccaccgctcccagccaaccgtccctaatttaaaacacacacacacacacacacccctgacatgttcatcatgtgccagtcacacacacacacacacccctgacatgttcatcatgtgccacttttttttttttccttcaacttttaagttccaggatacatgtgcaggatgtgcaggtttgttacataggtaaaggtgtaccatggggtttgctgcacagatcttgcatcggtacctggcacatagttaacactcaactattagctgctgttgtttgccaatgataatggtttcctcttcagctgtcattaaactgtttattgttaaactgttaatttattcttaagaacctttgacattcctgactcttatttcttcctatgttaattgactcagtgctgccatagcactttgattctgcatcttttcagagtttttattcctgccttccatctagggctttctgtttagtggtatatcctctcattctaatatcctataattcctgaccacatgcccattcttagcagcacacatgtgcttgagctcacacacttccatctgtcctttttaatttgcaacagtctgccaggatttagaaaacttgattgcaaacctcattcagactcagaatgaggacctaaagttctaggcatttgtgaaaattatttcaacagccacatatgtattaacaactcttctggagcttgtaacaagtctgatcaccagaaaaatataatagggaacatttttttagccgaggcatgtatgcagaaaactattcaaagtacatatttaacaattctaagtttactttttaaaatctttaattacatgtgattttagtgtaataccacctttttctgacatcagtcttaatagaatgtttaaatatggaattagaaattatataacgtgattgtaaatctgtaaaacaccatcatgaaataaattctatttgtctgctctgaacgagctttttagccactttcattgaaagagtgaggaagaacttgattatctgatactagaaaccttggttagatgtgcattctatacttatgatctaattctaggagtacattacgattgtgtaaacacaggatcacccagtttgttaatattgctatctgacttttcaatcctaattctaataaggttgacttgactaacaattttaatgtgatttttttcctttttaatccttggaaggtaatgcacaaaaatttgcacaaaggtactttccctttctgttcctaagattttcatttaactgactttcaagagggcagcagaatagacttcatctttttggaatgaaaaggtctgccgtgaattgtggtatgttgccactaatgtaatgcctagaacaagagcctagattatattcatttctaacacttttaagactgttttcttaactgtttgcttttgggtctttactttttctagcccatgtttttaattaatttttttccttttgacaggtctgaagaactgttgcccaattcaacagtgccagcattccaactttgttaaacctaccaacatcttaaatggactttcctgtggtggtaccctttaagaggcggatgaaagctactatatcagtttgcacattctaatcactttccagtatcacaagagagatttttacttatataatagtcctagagtttgcagctggtaaaaccagaggctacatccagtattactgctaagagacattcttcatccaccaatgttgtacatgtatgaaaatggtgtactgtatactttaacatgccccatactttgtattggagagtacaataatgtaaatcctaaaagcaccactattttagcataataaaagaaagtccaaagagctcctatatagactactccagataacttcgcttctttgatacttgtagcttattgtaattttttttaagaaattcaaggtcattattattgtacaaaataagcgctttgattaacacagctatatagtttttttaatttttaaaaaacctgtggagacggtgatcttgtctttaaaacatgatagtcctttcagtataatgtcttagattaaagacgttgcctttaatatctgttgggaaggaaatgtccagacttttcaaatctcttattatatgtttcctttttttgtttacatagggaacaatgtttatagtcgtgtgtacagtgggggtctacaacaagaagtgtatattttcaaacaattttttaatgatttaacaatttttgtaaatcattttcaggcttctgcagctgtagattctcactgtgaatcccttgcttgctcatgcataagtgtatttgcaataccaaatatacaggtttagtatttttgcctgttagtgattgtttcacatgtgtaacgttttggttgagatgttaaatggtggacgagtactgtggatgtgaatgtgggaagtaattttaatcatatgtaattggtcacaaggcctaatttgcagtaactattgctgttttatttaacaatgccttgttgctttgtatgcattaatgtttggatgtaaagattgtgtgtctatccaacagggagccacagtatttaaattgaccaacctaatgttacaactactttgaggtggccaaatgtaaactaaaagccttaattaaagtggtgcaattttgtataacttagcatcagtagttcaataaatttggattgccatgcaagggcttgcattataattacttgccacttgaatgtgttttgtgtaatgttttaacagtgctagtaaataaatacgggtttaccctggttttaattgtaataggtgcattttacacagcatggtttcataatttaacatctgggcaagccagactcattaattacaggaataaggaagtagcgagttttctggtattgtttgaatatccacataaccaccttttgaacttttccttgagaaataattttgtaaatcaagcagtattacttacgaataaatgcctttgggtaatgttcagtagctatttgatgaggtaggtaaaagaggaacgatttaacatactttcatggatgttacactatggattttttaaaatacaggattgaagttagaatattgtggttataaaaatctttgagtgatgtggattaagcacttagagaatcgatatttttcttaaatatgctataattgaattctgtaagaactgaattcttatagaattattttaaaactttttaaaaattgtaaagctcttaaaaaactttttgaaagtatttgccagctactggagcaattaatcagtgataatatctaatagaggggtatctgctaatcccctaaatacacgctgtttgaatgatacatttttaaaggctttcatgttaagaaaaagtctgattctttacaaaagggacttgttttggcagaactggttttatttataatcatttgggaaaaaaattaagcccaaaaaactgggactgtgaaacactaaaattacttcaatttactatgtcctgttacatccattgataccgccattattcaataattacttttaataaatgtttgctgcctaccagctatgtaccaggcccagttctaggctcaaacagctaaatattcattcattggacaaattaagtacttaagtataaaaattgttctaggcctaaggatgtagcagcaaccaagatcaactataaaatgctgccctcctagaatttatattctattgaagagtttctcagcctcagcactattgatgttttatgtttgataatgtattctggcgactctcctgtgcattataggaattttaatatctgcccactagatgccagtcacaccaccccagcccccaagttgtggcaaccaaaaatgtttccagacattgccagatgttccccagttggattgttgggggacaagggaggtgaacttggagggcaaaatcaccctggtgaagaactactgctctggtgggaaacaacacattagttacagatgagtgttagggttacaagatggatggtttactatatagtgaataagaatataaagtttggagccagacttcctgggtttttaatcccagctcttccagttcctactatatgcctttggttgggtgccttggtttcctcatctgtaaaatgagaatgataatacctacttcataggagagtgaaatgaatgccagtgctatcctctaggtctatatatatatatatatatatatattatatatagtacatatatagagagagtatatatatatatgtagtacagtggaggtctatataatactatatatataatttatttttttcaatgctgataggaataaggctgtggtttggcaaaaagcaccattttctcctatacaaaatagtaactgcagtttgggagcacaactcatgtagattgacttttctggtgcttaatgggaaaatactaaaataattgagtcagaaaaggcatgaattccttttcacgtccccaaggatacttgaagaaacttgagttttaggagaaaatcagagtggtctttcacttacatttttctaaaaagtgtaaaaaccctgtattgactttcttgttgattcagttgtttcttaaacgtaaatagctcatctttaccatatgtgggcattacaaatagaaatttttaaaattccatttataaaatgaagttttgccgtttttttttttaaatcattccgtctttagttgtgggacagcaaacttagaatcgaaactcatcactacaacttttctttgagttaaactcttatctgtgttttcattgaatttaatctccatctattctatctcttcttaaatcttggaaatgtaaaagggagttatagtgttttacaattaatactcttactattaccttagaagccttaaaagtgcttgcaggcttgtctcataatctgtcagtgagccttaacattgtgatttgtaagactaaaatttttttttcaaacaaaacaaatctgacagcctgggcaacatagaccccatctctacaaaaaaaaatttttttttaattagctgggcatggtggtgcacgtctgtacctgtagtcccagctattcagaaggattgcttgatcccaggagatcaaggatacagtgaactgtgttcgcgccactgcacccccacgatggcaatagagtgagaccctgtcttagaaaaaaaagataaataagtctgttctatttgttacagtgcatcaacacatttgaattttctttttttttctttttcttttttttttttgagactgagtttcgctcttgttgcccaggctggcgtacagtggtgcgatcttggctcaccccaacctctgcctcccaggttcaagcaattcttctgcctcagcctcctgaatagctgggattacaagcatgcaccaccacgcctggctaattttgtattttttggtagagatgaggtttctccatgttggttaggctggtttcgaactcccgacccaggtgatccgcctgcgtcagcctcccaaagtgctgggattacaggtgtgagccaccgcacccagcctaatcaatacatttgatatttcaagaatacatgagagaagagaggtagattgagaacagaactaaactttatatatgtttccttaactattgggaggaaaatggatgagtctgtgttgggatacctgttgaaacaagactactaaacagattaatcaactaattccataggcttgacattagtttatctttgaaaagtaaaagtaaagtgcttattgctaaataggtctgtattctaaatgctgccattttttaaaaaaagtattccatgttacacacattttaaacttgcttcttaaaacatccctgttggtggcctgtaggttactgaccttaggaattacaggctttatccaaaattaggcatatctacctgatttttgtatctgagaatcaataaatgcattcagtattctctaccgtgtttcaggcgctgtttacaatatcggaggtacagcagggattttctgcccacgtggggaaaacacacagcaaatgaacaaagctctattggtaacagtctgttaaactttctaagagctttccaactttctaagagaaaattgtaatgattttagaaaagtgagctgtcatttttcatatatataaatttttttattcataggtaatctaatttttctcatttctccaaaagggtacgaagacagtttttactatgttgttttactatgaacctagtttaacctgactttccttacagacccacataaatgagacaatccaaatttagtatttgggtcaaaatgcagggttttttcctgaaaacaaaacagcacacacatatattacaggatttttatgtaataatatattcacttcagtcaggtttcagtttttaaataggcagagatcaaaagcctctaatgtttttgtcatccgccattattacccattcaaatttctatttatgtctggtagttatgtcccctgtgagcactaatttcagaacaggaaattctattaactgtcaaactctttaatgtgcagtgcagtaggtttggagcagaggggagtaggaaggagtaaatgatataatccagtctggcctggcatggtggctcacacttgtaatcccaatgctttgggaggccgagatgggtggatcactggaagccaggagtttgagacaagcctggccaacatggtgaaaccccgtctctactaaaaataacaaaaattagacgggcacggtggtgtgtgcctgtaatcccagctactcaggaggctgaggcaggagaatcacttgaacctgggaggccgaggttgcagtgagctgagatcacaccactgcacttcagcatgggcaacagagtgagactgcaaaaaaaagaaaaagaaaaaaaaatccagtctctgctggcaaggtgtttaacaagtcaatgatgggaaagaccagtcaaataaactatcagatctaataacttttctaaccataggtgattcttcttccattatccatactaaagcaagtgactcataataaaaattgttattttgtaaaatatatggactgtttgctttatattcccaactattacatctggttgactattaacaggtcaatgtcagatttcctgagcaaatcaaccaataatgaaaaactatgtggctggcagaaaaaaataagtgcgtgtggtggtgcttgcctgtaatcccagctgcttgggaggctgaggtaggaggaactcttgagctccggtggtttgaggccagcatggataacatagggagaccctgtcacttgacaaaagtatctttccctactggaaatggaatagaatcggatgggtatggtacagcaggtagttatggggagacctctactgttctaaatgagactaatagtaaatgttacataactaaagcaacagatttgccagctgtgtgaaagataacccagagaggggtaatggtagagccagaattaacacagccagcttgtcagctacctttgaacatgtattttctgtgcagtcagatttgaagggttggaccttggagttactgacattggaggcaactgaaaccatgagtgtgaatgaaattattttcgtaagaattacttggggttaaaaatagtaataaaaaggaaagcctggcctaaacagtcttgggatggggagaagggttggagtacaaaggattgctattacaaagacatgggcagagaacaaggcaaatagctgagcagcaattgagaatacagcatcttttatggcaaagagcaaaatactattgttcctcttctagtatgctatagaccagcagtaattttgtgctctaaaatgcttatttttatctctctgtatatacttggtggtgaatttgctacaaatgtaaggagatgatgggatagtttttggaaataccatcctctaattagtaccaggtctatgtatatctgcagcaactataaagtctgtttcagagtcagtattggcaaacttatatttaaattcagctgtaacaagacatctttttttttttttttgagagagtctggctctgtcacccaggctggtgtgcagtggcgcgatctcggctcactgcaacctccgcctcccaggttcaagcagttctctgcctcagcctcccgagcagctgggattacaggcatctgccaccaagccctgctaatttttctatttttagtagagacggggtttcgccatcttggccaggctggtcttgaactcctgacctcgtgatccatctgcttcagcctcccaaagtgctgggattactggcatgagccactgcgcccggcaagttgtctttcaaatatatgcctttgcagtatttctctacttccccagtaatgtaaactttattttctctcaattttcgtaagtggtattttggtgctttacccaaaatattagggagaaaattcttctttttaattggattctcgtatgttgatctatttctattgttttctaaaaaaaagttagtgtcctagtttaaaagtatatattagtttcctagggctgctgtaacaaattatcacaaatttggtggcttaaagcaacagaaatgtactctttcacagttctgaaggtcgaagtccaaaatcaaagtgttaggatgtactcctagaggctctcggagagaacctgttcccatggcattatgccacatcacatgtgcctctatctttgtatctcctcctctctataatctttcttttaaaaggacaattgttttgacatttagggcttacccacatacttcaggataatctcatctcaaaatgcttaatcacatctgcaaagacacttttttcaaataaagttaacagacagaagtttgggggttgggatgtggacatgcctttgggagccattaacaacctaccaaaacattttaacaatttttcagtaccaaagactagtatgggtctgctccaagataactcaaaacattctgaactgaatcagcagaccctcaggtctccctagagagatcctgagcacctaggaaagccccagaattaagctactctacaaggattctgagggaagtctgggattaggtgagactttaatgagtccatcagaggtttagtatggactagttctacagttccagaagcaacatactgggtatggaatattgttaaccattgtcatcccacagaattaccttctacttgtgtcagtatatatcctgcctaccctacatattttatatttatcaatgatgacagaaacttccccccttttacttagatctaatagtaatataacaaacttttctttttcattttcagacatatccagagggttttctcttcatctcacgcatcccacctttaatcagacatatgtgattcatatgagagaaaattagtgtttctgagaccaaatggtggtgtttataagattttgcttctgcactgaattcaatgttttatttactgcttggttattttgtttttgttttttaagaaatgggaggagtgtaatatctagaggtacatgaaaaaaagaaatggaaggaatggacaggcccagaattaaatgataaaaactcatctggttggaatgaagtacactgaacatttgaggaagttagagattaattcaacccagtgggttttggggtttttatatgtgttagtacattcagcgttagggttgggtttcttgtctctgtaatcacttctcaaaaatgaatttgggcttctccagatagcctttttatccatttattatttcaagtaatggtataaggaaattgtaaccatttgtgtgctttacatgtttaagatacaaacttacagttcccagaagtcaattcagtcattctctataagagctgttgtggaaaaagttctcacttcacttactcattcctttgcattttccaactttagtaaagcatgacttcatgccttggatcatacaggatttcaacgggagatttataagtctattttgttagaataaaaagcaataatacttcctgaaatacatcttgggctctttgcagaagctgaactatctggtaattactatttagcaaacagctaacagctagctcttaatttttcagaaataagaggacatcattggccactatcataccactaattttattccaccaatgctttcacagaggatgtcaccaaagaaagaagtggcatccactacccctcccccatccttccactctgaaccagtacaggatattctcatggtcagggcattctctccttggcaggatgtagttaatgacatatgcagaattaatgacttggttgccctaggccccccgtcaaggcttttgttcaagggagagtaaagaggataggtctcagtatgtcatccaaacaggatggatacagaatgccaaccaggttagccctggcaagttaagacattttacagtgccactacctacctccatactgtatcagaggagccagttgcacagtgttgatctccctaagactattataataaggaaggggtttttttcttagcccagttactactaaaactcactcagaggagcaagtgaaatttgtcacaattggctcgactgctttatctcactttgaaaaagaaaagttacaaattctagtaagcaaaagattttttgtgaccaggtctccctgacctgcacaaaataaactcttcatgagttaaaccaaaacagatttaatgtctaaacttaaatctagtttgacattaacttcttttccaaagagaaataacgttaacaatctgaaatcatccctgcacagactttcttggctcttcttttctgccgtcctatgaatcacaaatagaagtttaagaaagctgtcaggtaggcgcctcaaattcatttaaaatgaggaatgatgaaagaataagaaaaaccagcaaatgatagcttacttattcagttatttggcttgatactgcttgaaagtgacatttctagattaaagatctgataagctctgatagttgggaaataatactagttatttcttggacaccctaagatgtgccaccattgctctaagcactttacatgtgttgttcaaccctcagcaatgctatgaaataggggctgagtctcctaatagagctaatgaatgcattatatcaaaagaatgaaatgttaaatatagacactggaaaataaaattacttttgcttgtattataagtgaataccttgaaagctcaaaaaaatctattagaagtattcgggaacttggctggatataagataagcatgccaaaaatcaatagcttttctttatatttataaaaaatacctacaagttgatatagtaaacacgacagataaaaactaaatgccttaaggtataaggctaagaaagaactattataaactcttattgaaggacataaatcaagatctgaacaaatacactgggaagataatatcataaaaatatcaattcccccaaattagcatgttaatgtataatgattacaatttaaatttcaactggctgaggctttgtttttgtttttgattttttaatagactggatgttggtcttgaactcctgggctcaagcaagtgtcacaccttggcctcccaaagtggattataggcatgagccaccgtgccagacttgggtgaggttttgaaattgaaattaagcaaaatgggccgggcacggtggctcacacctgtaatctcagcactttcggaggccgaggggggcggatcacgaggtcaggagatggagaccatcctggctaacatggtgaaaccccgtctctactaaaaatacaaaaattagccaggcatggtggcaggtgcctgtaatcccagctactctggaggctgaggcaggagaatcgcttgaacccaggaggcagagggtgcagtagctgagattgtaccactgcactccagcctgggtgacagagcaaatctctatctcaagaaaaagaaaaaagaaaagaaattaagcaaaatgatcttaaagttcaagtgaaagagtagagtagaactgagtccagaactagattccagtatatgacgtttatacgtgacaaaaatatatttctttttctttcttttttttttttttttttttttgagacagtttccctcttgttgcccagactggagtataatggcacgatcttggttcaccacaacctccgcctcccaggttcaagtgattctcctgcctcagcctcccgagtagctgggattacaggcatgtgccaccacgcctgggctaattttgtattttagtagagatggggtttctccatgttggtcaggctagttgcgaactcccaacctcaggtcatctgcccgcctcagcctcccaaagtactgggattacaggtgtgagccactgtgcccggccgacaaaaatatatttcaatagaaaatagtatcagtaaaatgctagcacaactaactatctgtctaaagacaataaaagttcaacccctatatcatgcaaaaagcactttccagatatattaaaatgttttcaagctataaagtaaaacagtagaagtcttagaagaaaatctaagagactagaaatctagagatagggtagaccttcttagctaatttttaaaaatgaagctatatttaagatatatatttcaagtaaataataagtgtgtgtgtgtgtacacacagatgcttctcagcttacaatggggttatgtcccaataagcccatcagaagtcaaaaatgtaagtcgaaaatgcatttaataccctgataaatccatcacaaagctgaaaaattataagtaaaactgtaagtcacagactgtatatataaatttaaaatttggcaaaatatattgcaaagtcaaatttgggaaagtatagcacagataaaagattaaactattcacggccaggcacggtggatcatgcctgtaatcccaacactttgggaggccgaggc

SEQ ID NO: 73 - DNA, 757 bp, Homo sapiens
cccgcgggcggaagctggagcgaggctgaacgcctgacgtcaaggcgacatcgccaaacctcgcccagattcaggcgtgtaaaccagccggagcggcgcggcagcggcaggaccgccgtggcgcctagagtagcgacccggggggagcgcggggcgacgctggctgcagggacccggtgacagcgtgagaggtactaggttttgacaagcttgcatcatgcgtgagtataagctagtcgttcttggctcaggaggcgttggaaagtctgctttgactgtacaatttgttcaaggaatttttgtagaaaaatacgatcctacgatagaagattcttatagaaaggtatatattactttggaaggccttttgcttttgattttaatataaatacttattttagctttataattattgaatgttttatacaaaggatggaggcagagttaatttataaaattagtgggaaaagtttacactttctggcattgcatagttaccagtttaagaggatcataaacacccatactctcacatattcacagaattttttgtaatttgacacataaactttaaagcagaccatccatttcaagtagtagccccatgttactttcagtcccctacctagcaagactgattactctcaagctcccttctttttaacctagaaataggtggacacaggtcttcctaagctttctacttactaacctcttgagaaagtgccaccactcacaatactggttgaatatccct

SEQ ID NO: 74 - protein, 56 aa, Homo sapiens
MREYKLVVLGSGGVGKSALTVQFVQGIFVEKYDPTIEDSYRKVYITLEGLLLLILI

SEQ ID NO: 75 - DNA, 2231 bp, Homo sapiens
gcgaggctgaacgcctgacgtcaaggcgacatcgccaaacctcgcccagattcaggcgtgtaaaccagccggagcggcgcggcagcggcaggaccgccgtggcgcctagagtagcgacccggggggagcgcggggcgacgctggctgcagggacccggtgacagcgtgagaggttcgcagaactgtacaatttgttcaaggaatttttgtagaaaaatacgatcctacgatagaagattcttatagaaagcaagttgaagtagatgcacaacagtgtatgcttgaaatcttggatactgcaggaacggagcaatttacagcaatgagggatttatacatgaaaaatggacaaggatttgcattagtttattccatcacagcacagtccacatttaacgatttacaagacctgagagaacagattcttcgagttaaagacactgatgatgttccaatgattcttgttggtaataagtgtgacttggaagatgaaagagttgtagggaaggaacaaggtcaaaatctagcaagacaatggaacaactgtgcattcttagaatcttctgcaaaatcaaaaataaatgttaatgagatcttttatgacctagtgcggcaaattaacagaaaaactccagtgcctgggaaggctcgcaaaaagtcatcatgtcagctgctttaatatactaaatgcattgtagctctgagccaggtctgaagaactgttgcccaattcaacagtgccagcattccaactttgttaaacctaccaacatcttaaatggactttcctgtggtggtaccctttaagaggcggatgaaagctactatatcagtttgcacattctaatcactttccagtatcacaagagagatttttacttatataatagtcctagagtttgcagctggtaaaaccagaggctacatccagtattactgctaagagacattcttcatccaccaatgttgtacatgtatgaaaatggtgtactgtatactttaacatgccccatactttgtattggagagtacaataatgtaaatcctaaaagcaccactattttagcataataaaagaaagtccaaagagctcctatatagactactccagataacttcgcttctttgatacttgtagcttattgtaattttttttaagaaattcaaggtcattattattgtacaaaataagcgctttgattaacacagctatatagtttttttaatttttaaaaaacctgtggagacggtgatcttgtctttaaaacatgatagtcctttcagtataatgtcttagattaaagacgttgcctttaatatctgttgggaaggaaatgtccagacttttcaaatctcttattatatgtttcctttttttgtttacatagggaacaatgtttatagtcgtgtgtacagtgggggtctacaacaagaagtgtatattttcaaacaattttttaatgatttaacaatttttgtaaatcattttcaggcttctgcagctgtagattctcactgtgaatcccttgcttgctcatgcataagtgtatttgcaataccaaatatacaggtttagtatttttgcctgttagtgattgtttcacatgtgtaacgttttggttgagatgttaaatggtggacgagtactgtggatgtgaatgtgggaagtaattttaatcatatgtaattggtcacaaggcctaatttgcagtaactattgctgttttatttaacaatgccttgttgctttgtatgcattaatgtttggatgtaaagattgtgtgtctatccaacagggagccacagtatttaaattgaccaacctaatgttacaactactttgaggtggccaaatgtaaactaaaagccttaattaaagtggtgcaattttgtataacttagcatcagtagttcaataaatttggattgccatgcaagggcttgcattataattacttgccacttgaatgtgttttgtgtaatgttttaacagtgctagtaaataaatacgggtttaccctggttttaattgtaataggtgcattttacacagcatggtttcataatttaacatctgggcaagccagactcattaattacaggaataaggaagtagcgagttttctggtattgtttgaatatccacataaccaccttttgaacttttccttgagaaataattttgtaaatcaagcagtattacttacgaataaatgcctttgggtaatgtt

SEQ ID NO: 76 - protein, 133 aa, Homo sapiens
MLEILDTAGTEQFTAMRDLYMKNGQGFALVYSITAQSTFNDLQDLREQILRVKDTDDVPMILVGNKCDLEDERVVGKEQGQNLARQWNNCAFLESSAKSKINVNEIFYDLVRQINRKTPVPGKARKKSSCQLL

SEQ ID NO: 77 - DNA, 2314 bp, Homo sapiens
gcgaggctgaacgcctgacgtcaaggcgacatcgccaaacctcgcccagattcaggcgtgtaaaccagccggagcggcgcggcagcggcaggaccgccgtggcgcctagagtagcgacccggggggagcgcggggcgacgctggctgcagggacccggtgacagcgtgagaggttcgcagagtactaggttttgacaagcttgcatcatgcgtgagtataagctagtcgttcttggctcaggaggcgttggaaagtctgctttgactgtacaatttgttcaaggaatttttgtagaaaaatacgatcctacgatagaagattcttatagaaagcaagttgaagtagatgcacaacagtgtatgcttgaaatcttggatactgcaggaacggagcaatttacagcaatgagggatttatacatgaaaaatggacaaggatttgcattagtttattccatcacagcacagtccacatttaacgatttacaagacctgagagaacagattcttcgagttaaagacactgatgatgttccaatgattcttgttggtaataagtgtgacttggaagatgaaagagttgtagggaaggaacaaggtcaaaatctagcaagacaatggaacaactgtgcattcttagaatcttctgcaaaatcaaaaataaatgttaatgagatcttttatgacctagtgcggcaaattaacagaaaaactccagtgcctgggaaggctcgcaaaaagtcatcatgtcagctgctttaatatactaaatgcattgtagctctgagccaggtctgaagaactgttgcccaattcaacagtgccagcattccaactttgttaaacctaccaacatcttaaatggactttcctgtggtggtaccctttaagaggcggatgaaagctactatatcagtttgcacattctaatcactttccagtatcacaagagagatttttacttatataatagtcctagagtttgcagctggtaaaaccagaggctacatccagtattactgctaagagacattcttcatccaccaatgttgtacatgtatgaaaatggtgtactgtatactttaacatgccccatactttgtattggagagtacaataatgtaaatcctaaaagcaccactattttagcataataaaagaaagtccaaagagctcctatatagactactccagataacttcgcttctttgatacttgtagcttattgtaattttttttaagaaattcaaggtcattattattgtacaaaataagcgctttgattaacacagctatatagtttttttaatttttaaaaaacctgtggagacggtgatcttgtctttaaaacatgatagtcctttcagtataatgtcttagattaaagacgttgcctttaatatctgttgggaaggaaatgtccagacttttcaaatctcttattatatgtttcctttttttgtttacatagggaacaatgtttatagtcgtgtgtacagtgggggtctacaacaagaagtgtatattttcaaacaattttttaatgatttaacaatttttgtaaatcattttcaggcttctgcagctgtagattctcactgtgaatcccttgcttgctcatgcataagtgtatttgcaataccaaatatacaggtttagtatttttgcctgttagtgattgtttcacatgtgtaacgttttggttgagatgttaaatggtggacgagtactgtggatgtgaatgtgggaagtaattttaatcatatgtaattggtcacaaggcctaatttgcagtaactattgctgttttatttaacaatgccttgttgctttgtatgcattaatgtttggatgtaaagattgtgtgtctatccaacagggagccacagtatttaaattgaccaacctaatgttacaactactttgaggtggccaaatgtaaactaaaagccttaattaaagtggtgcaattttgtataacttagcatcagtagttcaataaatttggattgccatgcaagggcttgcattataattacttgccacttgaatgtgttttgtgtaatgttttaacagtgctagtaaataaatacgggtttaccctggttttaattgtaataggtgcattttacacagcatggtttcataatttaacatctgggcaagccagactcattaattacaggaataaggaagtagcgagttttctggtattgtttgaatatccacataaccaccttttgaacttttccttgagaaataattttgtaaatcaagcagtattacttacgaataaatgcctttgggtaatgtt

SEQ ID NO: 78 - protein, 184 aa, Homo sapiens
MREYKLVVLGSGGVGKSALTVQFVQGIFVEKYDPTIEDSYRKQVEVDAQQCMLEILDTAGTEQFTAMRDLYMKNGQGFALVYSITAQSTFNDLQDLREQILRVKDTDDVPMILVGNKCDLEDERVVGKEQGQNLARQWNNCAFLESSAKSKINVNEIFYDLVRQINRKTPVPGKARKKSSCQLL

SEQ ID NO: 79 - DNA, 89856 bp, Mus musculus
  misc_feature (1)...(89856): n = A,T,C or G
nnnnnnnnnnnnnnnnnnnnnnnnnnnnnnnnnnnnnnnnnnnnnnnnnnnnnnnnnnnnnnnnnnnnnnnnnnnnnnnnnnnnnnnnnnnnnnnnnnnnnnnnnnnnnnnnnnnnnnnnnnnnnnnnnnnnnnnnnnnnnnnnnnnnnnnnnnnnnnnnnnnnnnnnnnnnnnnnnnnnnnnnnnnnnnnnnnnnnnnnnnnnnnnnnnnnnnnnnnnnnnnnnnnnnnnnnnnnnnnnnnnnnnnnnnnnnnnnnnnnnnnnnnnnnnnnnnnnnnnnnnnnnnnnnnnnnnnnnnnnnnnnnnnnnnnnnnnnnnnnnnnnnnnnnnnnnnnnnnnnnnnnnnnnnnnnnnnnnnnnnnnnnnnnnnnnnnnnnnnnnnnnnnnnnnnnnnnnnnnnnnnnnnnnnnnnnnnnnnnnnnnnnnnnnnnnnnnnnnnnnnnnnnnnnnnnnnnnnnnnnnnnnnnnnnnnnnnnnnnnnnnnnnnnnnnnnnnnnnnnnnnnnnnnnnnnnnnnnnnnnnnnnnnnnnnnnnnnnnnnnnnnnnnnnnnnnnnnnnnnnnnnnnnnnnnnnnnnnnnnnnnnnnnnnnnnnnnnnnnnnnnnnnnnnnnnnnnnnnnnnnnnnnnnnnnnnnnnnnnnnnnnnnnnnnnnnnnnnnnnnnnnnnnnnnnnnnnnnnnnnnnnnnnnnnnnnnnnnnnnnnnnnnnnnnnnnnnnnnnnnnnnnnnnnnnnnnnnnnnnnnnnnnnnnnnnnnnnnnnnnnnnnnnnnnnnnnnnnnnnnnnnnnnnnnnnnnnnnnnnnnnnnnnnnnnnnnnnnnnnnnnnnnnnnnnnnnnnnnnnnnnnnnnnnnnnnnnnnnnnnnnnnnnnnnnnnnnnnnnnnnnnnnnnnnnnnnnnnnnnnnnnnnnnnnnnnnnnnnnnnnnnnnnnnnnnnnnnnnnnnnnnnnnnnnnnnnnnnnnnnnnnnnnnnnnnnnnnnnnnnnnnnnnnnnnnnnnnnnnnnnnnnnnnnnnnnnnnnnnnnnnnnnnnnnnnnnnnnnnnnnnnnnnnnnnnnnnnnnnnnnnnnnnnnnnnnnnnnnnnnnnnnnnnnnnnnnnnnnnnnnnnnnnnnnnnnnnnnnnnnnnnnnnnnnnnnnnnnnnnnnnnnnnnnnnnnnnnnnnnnnnnnnnnnnnnnnnnnnnnnnnnnnnnnnnnnnnnnnnnnnnnnnnnnnnnnnnnnnnnnnnnnnnnnnnnnnnnnnnnnnnnnnnnnnnnnnnnnnnnnnnnnnnnnnnnnnnnnnnnnnnnnnnnnnnnnnnnnnnnnnnnnnnnnnnnnnnnnnnnnnnnnnnnnnnnnnnnnnnnnnnnnnnnnnnnnnnnnnnnnnnnnnnnnnnnnnnnnnnnnnnnnnnnnnnnnnnnnnnnnnnnnnnnnnnnnnnnnnnnnnnnnnnnnnnnnnnnnnnnnnnnnnnnnnnnnnnnnnnnnnnnnnnnnnnnnnnnnnnnnnnnnnnnnnnnnnnnnnnnnnnnnnnnnnnnnnnnnnnnnnnnnnnnnnnnnnnnnnnnnnnnnnnnnnnnnnnnnnnnnnnnnnnnnnnnnnnnnnnnnnnnnnnnnnnnnnnnnnnnnnnnnnnnnnnncacgtgtatatgtgtgcatgtgtgtgtatgagtatgtgtgtatatgtgtgtgtatgtgtgtatgcatgtgtatgtgtgtatatgtgtgtgtacgtgtgtgtacatatgtgtatatgtgtgtgtgtgtgcgtgtgtgttatatacaagtgcattgcacatgagcattcaggtgtatgtatgcatggagcccattagtcagtatcaggtatgtttcatgtttaccttattactgtgattattatttttaatatcattattattattttggagcagggtcttactataaagcactgactgtgctgtaactcattatgtagaccaggctgtcctcaaactcatagagatccacctgcttctgggtcctcactgcgggggttaaaggtgtgtgccaccatgaccaataagaacagcctattggggcgagggactgatctcttgataagcctggagctcactgatttgactagactgactggccagcaagccctcaggacttcctgtctcagccccccatcctgggattgtggatgccatctgtcccacttggctttttacgtgggtctgggagctgaactcagagcctcatgcttacacagcaagcacttagcctgcagagtcatctcctcagcccaaaggctttaaagatactatactatgtttgtgtgtgcctgcctgtatgtatgtgcaccacatggctacagtgcctgaggaggtcaggaaaagggctcagttccctaagctggagttacaggcagttgtgagccactcagtgtgcttgctggggaccaaacccaggtccgtggctggagcggcaagggctcctaactgctgagccatctctctagttccctcacattcacttctattctggaataattttgctctatttctgtttatatttctttggtgaaatgaactgttagacatagaagtgctgattccttccttccttttttcttttcctttttcttccttttttttttttaaagatttacttattttatgtatacgagtacattgtagctgtcttcagaaacataagaagagggcatccagtctccttacagatggttgtgagccaccatgtggttgctgagaattgaactcaggacctctggaagagcagtcagtgctcttaaccactgagtcatctcttcagccctccttctttttttatatgttggaacccacagtgtccacatcaagatcatatctgaattgtacccttctggaccttcttgagtcatcctcatagttacagacattcgtatttgtatttatttcacatagttgtgggaatcctcttaactgccatgacctaagcttgaaacctgtggtggtttgaacaggaatggtccccataggctcatctgtcattagggaggggcactacttgacagggattaggaggtatggccttgttggaggaagtgtgtcactaggggtttcaaatgctcaaactgggttcagtgtctctctcctcctgtggcctgccaatccagatatagacctcttggttccctctccagcaccatgtctgcctctctgccaccctgtatcctgtcatgaagataatggactgaacctctgaattgtaagccagctccaattaaatgctttcttttataagagtttctgtggtcgtggtgtctggtacagcaacagaaccctgtgtatatatatgtatgcattatgtatataatgcaatttaaatcttctcattccaattctgctctctccctcctattattcctcctattattatatttctattactgtgacaaaataccacgaccaaagcaacttataaagaaagcatttaactgggctatggtttaagagggttgctccatacggtggagcgaaggcaggatggcaggcacagctgagaatttacaccttccttcatccacaggcaagaggcagagaaggaggctgtaggggannnnnnnnnnnnnnnnnnnnnnnnnnnnnnnnnnnnnnnnnnnnnnnnnnnnnnnnnnnnnnnnnnnnnnnnnnnnnnnnnnnnnnnnnnnnnnnnnnnnnnnnnnnnnnnnnnnnnnnnnnnnnnnnnnnnnnnnnnnnnnnnnnnnnnnnnnnnnnnnnnnnnnnnnnnnnnnnnnnnnnnnnnnnnnnnnnnnnnnnnnnnnnnnnnnnnnnnnnnnnnnnnnnnnnnnnnnnnnnnnnnnnnnnnnnnnnnnnnnnnnnnnnnnnnnnnnnnnnnnnnnnnnnnnnnnnnnnnnnnnnnnnnnnnnnnnnnnnnnnnnnnnnnnnnnnnnnnnnnnnnnnnnnnnnnnnnnnnnnnnnnnnnnnnnnnnnnnnnnnnnnnnnnnnnnnnnnnnnnnnnnnnnnnnnnnnnnnnnnnnnnnnnnnnnnnnnnnnnnnnnnnnnnnnnnnnnnnnnnnnnnnnnnnnnnnnnnnnnnnnnnnnnnnnnnnnnnnnnnnnnnnnnnnnnnnnnnnnnnnnnnnnnnnnnnnnnnnnnnnnnnnnnnnnnnnnnnnnnnnnnnnnnnnnnnnnnnnnnnnnnnnnnnnnnnnnnnnnnnnnnnnnnnnnnnnnnnnnnnnnnnnnnnnnnnnnnnnnnnnnnnnnnnnnnnnnnnnnnnnnnnnnnnnnnnnnnnnnnnnnnnnnnnnnnnnnnnnnnnnnnnnnnnnnnnnnnnnttctatttttatatatatatatatatatatatatatatatatatatatatatatatatatatatacacacgtgcatgcattgtagaggtgtgtgcatgtaagtgtaggtgcctacgaaggccaggagagagtccaatggcctggagctgcacttgcagttagttgtgatctgcctgataggggtgctggcaagtcctgtgcaagaatactatgtgtagccgggcgtggtggtgcacgcctttaatcccagcactcaagaggcagaggcaggcagatttctgagttcgaggccagcctggtctacaaagtgagttctaggacagccagggctacacagagaaaccgtgtcttgaaaagaatactatgtgttcctagccataactttctctaagtttggctgtgctaggcattgttgttattgtttgttgtttgtgacaaaatcatgatgcagtccttattggcctggaacccagtctatagatgacacttgccgcaaacttgtgtgaccttctggtctctgtgtcagaatgctagtgtaacagggacatgctaccacactcagctctctcctagaattaaaaaaaaaaaagatttaaaattatttttatttatgtatatgtgtgtgttgacataggtgctaggtttagaaattgtgtctttgtaacagcaaattcttgactaccgaagcatctctgaatccccttttagagttattaagagaaaattttggttcaacagtttttctttattttgagatgggattctcattatattggccaatctgactttaaacacccgagtttaagcaatcctcctgcctcaaggccttttcagtagctgggactacaggtgtgtgtgtgttactatgccaggctaagaacacatattgtctcacataacaagccctaagtagggcagtttcagagcttgttaattaaaaggttcaagaagtnnnnnnnnnnnnnnnnnnnnaatgagtaaaagatgctgagcagccatcaaggtctgatatttttagggtaaaaagactcacattcgcttgtctccattctgccaagggttttatgagatttctctcacttaatccttatgaactaaagcgaataaagtgggcacattgttattcccattactgaaaacaaacctgtgtcacagcgtagctacttaacattaaaaggcacacaagagccggacatggtagcgcaactttaattccagtactcaggaggcagaggcaggtagacctccgtgagttcgaggcaagcctgatctatatagctatactgagttccagggctatgtggtgagaccctgtcccaagagggggaaaggtcatataagaatgagtatagggactggagagaggcttagcaattaagaactctggctacagagaacctgagttcaaatcccaggacctacatgttggctcactgttgcctataactctgtttctaggggacctgacatcctcttctggcctcgggggtaccaggcacacacaaagtgcacacacatagatgcaggcaaaatgtctatacacataatataataaagaaaataaccaataagcaagtgagtgcggtctttccagcgctggcctgtccgtcccacaggccatcctccttcatgtcacacggcaccaatgaaatagtgatcagttggtgtgacctttaggataaatctgtgtcatcatttatcttctgtcttagcacagagtcagaacctcacctgcagttgcaggtatgtgattgtgtcacacatgccttacaatcatgctggctgatttcaggagtgaaaaaaaatggacctccttgttttatttgtttgagtgttcatatcattctaaaaaatgtttgtttttatctcatgtgtataggtgtcttgcctgcatgtatgtctatatgagggtattagttacagagaggtttaagctgccatgtgcgtgctgggaatcgaacctgggtcctctggaagaacagccagcactcttagccactgagccatccctctaaaccccaagttcctgtatcatttaactctactctctgctcagtactgagtgctttataaaggcaagtcaaatattattatccctttgctcaaaatctctggttaaaaacaaaacaaagcaaaaacctttacagaacagtgacttttctgtggttgttacatttttaccttttttttttttttttttcagtgctggggattgaacccagggtctcttgtacatgctaagaaagtactctgcccaccaagctacatctgttagggattttctgttactctctgacaaaagttcccaacactcaccttccactcacacagttagaaaacattgatgtgctggctgttgtttggatctgccgagcaccctcctgccacaggacctttacacacgctcttcattctgccagaaaagcatttcccagacactgtacaggactaagcccttagtctccctcaccttctctacagaggatgcatgtattactttcctcctctctctgacaaagctactttgtatacatttactttaagtatgttccccaattaacatggaaagaaaagctatgcaggcatttgatgagaatctaagccaataggctcctctatcagtgggacatgtgtggtgattcactccactcacaaattcacgtctgtgtttgacaataaggcctttcaaacctgagcctgcctgagtctcttttatttactctacccttccctttccttggattttaaatgataagactgtttaactgtttagcaaggcatgttgagttttttacaatctctaagtcccgttagtcaaatcttttttttttttttttttttttcgagacagggtttctctgtgtagccctggctgtcctggaactcactttgtagaccaggctggcctcgaactcagaaatctgcctgcctctgcctcccaagtgctgggattaaaggcgcgtgccaccacggcctggctctgtgagtcaaatcttaaaactcagcttttatttaaaatgatgctatgtgaaaaatatagaaatatggcttttactttttgttcctagaagcagagactttccttagtcatactttgtgtgtgtgtgtgtgtgtgtgtttgagatggagtctctatgtgaccctggatgttctagaactcagagatctgcctgcctctgcttctctgctgggattaaaggcgtgtgccaccccgtggcagaaccagactttcttagcttcaggcctgttcagtaaaaccccaggaccccgttaataaaggtgatccaccctggactacccctcttccgaattatgattatttttttaaacaagtggttctcacgaggccaatgagatgggtcagtcagtaaagttgcctgtggttcaggaccagccacccgggttcaggggccagggcccgtgtaactacgtcaggagaactgacagcacaaagctgccctcttccttccacaggcaagccacggcaggggcacctgcccacagacactaatttctaaaagttaaaaggcagcaagcctaagtgattctgatggggtgctgacagctataaaatgtagtgtagactcttccccttaaaaataacattaaagggcagggcagtggtggcccacgcctttaatgccagcacttgggaggcagaggcaggcggatttctgagttcgaggccagcctggtctacaaagtgagttccaggacagccaggactatacagagannnnnnnnnnnnnnnnnnnncatgaaagatcttttctgtttctgtgtctgtgtctactctaggtgaagcatggataatataatataataatataataaaacactttgttaaatcgtttaacccaggctggagagatggctcaggtcacaaggtcctgagttcaattcccagcaaccacatggtggctcacaaccatctacaatgagatctggtgccctcctctggaggcatacatgcagggagaacattatatacataataaatcaataaatctttaacccacccactactcaaactggagtatttaactgaagcccctgttatttcaatatggcattatctgaatgatgtcacagtaggagtcaaagaagacaaatcttgcatggagtgattgtcctcttctcttacatttggctcctaagtacacaaggaacctgtaaagtaaggctttccggctaaaggaagagtaaagccagactctcctttctagtcatccatagtggtggctgggaagaagtctttcaagtaagggctttaaaataggccgtgactctaaggcccctctgggggtgagttccctggagtgaaaggccagtttgcatgctgaacacgtgaataaatctgcaggaaggcagataagtcagccttctttctgcccgagggcggaaggaactacacaggagccatttctttcccttgtcccagacttctctctggtctggctttccttcctcctcgctctcaagtgacgattaggcactcagtccttattccagaaagggttacacaaaaaccgagacgccacagaagcagcggtctcagcctgagggcgactgctacctttatgttttagtcccagcactgggggattagaggagaaaagggtttagccataagcagggacgagtttctcttttaaaaaacttaaaaaacaaaacaaaaactctgctacagcctgcataccatagcagccttaaggcttcaaaccctctttcccatcaaggtctcttgcaagcaagttagtaggactcaagtcaactccatcacgccaaggggaaaacgaccccccaggtcaccttaagcaaaaaagaaaaaaggtcgcatttaaaaaatttagcagattcccgaagggaaaccttgttttttgttgtgtgggtgagaacggagtggtctaatctacttgctcccccatggggtgaccgtgtaaggttgcttgtgggaggcgacatttccaaagtgcattaaattaaaagtactggattgttcggtgattatgaaatttgtcccccaaattctcaactgctttagccatccacatttgggacgcgccttcgccacagggaggcgggaaagctttaccaccgaagttcaaaagaaccagagaggatgttttctttcaaataagcacaacccagtcgctcttaccccacccacctctgctaacttataacggtttgggaggggccagccgcacgcgtggctcgaccccctcgacccagaccgtttccaccaaggccgagcccgaaggagagtgggaaaagttctccattatattgccgccctctctaaaacttcggctccagtgacgggaaatcactgaggaatttgcagattccgggaggttggggaagccctcgggagaactgttccagcaggggcggtgctcgaacccaccttcctccaacagtccaccggtgctaggacggaggggcgtggctgagggccgcgggcggggccccacctgcgcgcgcggagctgggcaggacgcagcagcggaggcccgtggggcggggcctgggcggggccttggtagcaggggcgtggcgtgtgctgggtccttgacgggctgggggcggggtcttggctgggcggggtctggtttgaggtgggtggggccttgccaggcgtggggggctgggtccaggagggggcggggtcgtggcgcaccagagccgggaggcgcccggagagggcggctgagcctgcgggaggggaccagacggcggtttgagcggcggctgcagctgcagcaggacggcttgccggcggctcggggccgcgcgccgggaacctcacggggcgggcgggcgccgcaccccggcctggccgcctgcgccccggggaggccccctgcgcgcaaccggaccagcagcatgagcagcggctacagcagcctcgaggaggacgaggactttttcttcaccgccaggacctccttcttcaggagagcgcctccgggcaagtcccgttcgggtcagccggtgagtggcgtgctcgggggtcttggctccacgtgtctgcgcccgcgctgggcgatgctcgcccgagggctgcggggctctgagagtggcctttgccctttcggcgcctgaaaggtgctgggagcctgtgcagtgggcgtgggccgcccgaggcgaaggaaggaggtggaagggcgcggagccagatggcctgggcctctctgcttgggggacgccggctgcgggagcagctccaaagagccgggaggtccccgggccactcgggatggctcccccgacagcccttcggggcgacggccgggtcaccgcgccgtcctggctgcagtttgcttctagctgcagtttgctcgatggccctgagtggcttgagggcacgcaatagcccaaagtgaccgagcagccccggtgcgggcaagctgcagggtaaagggaccgggcgatcgtcggtgctcactaaagtctgggtctcatcaggtccggtttgcgggtcctgcggacgtcctgggtagacttagctccagagggctgagccttacgccgatttcttccttttttggaggaagggtgccgtgggaagcgtggcttgggaaaagacagtacgggaagttgtgccagtttcacagatcgggacagggattattattatttttttttaggggcgtcttccaaatggggcactttggccggacttgtaaggtcggcgcttaaccggtggccttctggccctggaagccgcaccagggagcctggccagctcggccacgctctcgtcagatataggagctttaacggaacaaacttgttgctcctaaaaacaccacagacgcacaccagaggtttctgtcaactctggagatgaaaaacaagagaaactaatcgttcagaggcccagtgatggggattttggtggagagaaatctctgcccagactgcccttgccaacccttttaagtttaacaggccgttgttttctaaagtaaaactcctttatcagatttggaagttctaggctttttggtctattaaatttccaaactaagaggaggaggagggtgaaaggctaggatgaggtcattattgctaacaactagtcccctagtgaagggctagctagggtgggtggtagcatgcctttatcctcagacttcaggttgctccgtttactagggtgaccttttattttcagtagaatgtgctaatgggggaatttggaagtcagagattacccacgactcccactcccacactgcctggcctacctcctgtggggcagacaagaaatggccttttccccctttctcatctagtttttccctcattggggttcttcaccactttacatattcccctcccgtttgccttgtaaagagcttgagccagtttgacttgtattccagaagtgcctggtaatttccagaaaaccagggggttcttgaattctaccggtgtgagagtcccctccacgggggtccagccagaatgctgtggttggaagtcaagaatcttgttcctgctttttagtagttgaagcggcagctggggatgtagctagtagcttgcctagtacttactgcataatatggggttgtagttcacagtagtgtgtctgtctgtctgtctgcctgtctgtgtgcaggcaggaagatcagcaattcaaggtcattatccagacccccccccccttcacacacacactttaagcagcatttctgtgaggtttatgtacattaagagagtctaggttatacgtaaccactttggtaaccgtcctctaactgtgtctgtatatatcatgcaatattgtccattgagcactgacatgactgtatgacgtgttgaaaatcagggcagtaacatccacttcctgggtggagccattcactgtctatttgaagctctgtggcctgtttaccctttctggcatcacacgcgtgtgttaaagaaagggctcttggttagaagggtttctgaagcctgagtttgtttgtttatttttgagacatggtctgtacatagccttgcctgtccaggaactcatcgtgtgagccaggctggcctcagtgcatggagatccacctgccttacctcctctgcccctgcagccacgcctgtctgcaccttggattgcagcaagcgacttgtgttttatttaaagaagtgagtgtatcttaagttcctgattacatatttgtgaacgaggaagtaacgctcgcaaagccatgcacgccaacggtagagtgtgtcttttgggtcgggtcagataacacttcttcactttgatatgattataggggcaaaagaaacacttcttacacgggtacttctacctcttccctagaaggtggggagagccataaggatccattcttgctcgcacagattcccccccccccgcccccccgcccgcctcccgtaggctgtaccacctgctgggaaagctaggaaggatggtttctggaacccttgcgaatattcaaagaaagcaagagggnnnnnnnnnnnnnnnnnnnnnnnnnnnnnnnnnnnnnnnnnnnnnnnnnnnnnnnnnnnnnnnnnnnnnnnnnnnnnnnnnnnnnnnnnnnnnnnnnnnnnnnnnnnnnnnnnnnnnnnnnnnnnnnnnnnnnnnnnnnnnnnnnnnnnnnnnnnnnnnnnnnnnnnnnnnnnnnnnnnnnnnnnnnnnnnnnnnnnnnnnnnnnnnnnnnnnnnnnnnnnnnnnnnnnnnnnnnnnnnnnnnnnnnnnnnnnnnnnnnnnnnnnnnnnnnnnnnnnnnnnnnnnnnnnnnnnnnnnnnnnnnnnnnnnnnnnnnnnnnnnnnnnnnnnnnnnnnnnnnnnnnnnnnnnnnnnnnnnnnnnnnnnnnnnnnnnnnntagcttaagatgctgtgttcccttgtaaatatggacatgtgtatactaaggctttcttaggattctgactctgctgcacagtaatatcttggcagtgctcagttctggtgtgtggattcgccaggcttcagaggagccgcctattcttagttttataagcagaaccaaaaatgttctgtagttactaaaatcaaactgcctagaacatacgcgcagcctaaaactagtaatacaatctgctaatcttctatgtggcctttttttttttttttttttttttttttgagacagtcccatgtagcccaggctgggctacacagctctctatgtaagaccttgaacctcttgatcctcccacctccccctaagttcagggagtcatgcccagtttcctgggatgctggggatcaaaccccagggcttggtgctcatgggacaagcattccactgcttgcactgagtttcctcccggctcatgccttccctcccagctgaggggatagataacctttgtgtatggtgctttgcctgctacatgtatgtctgcacgatgtatatatagtaccttggaggtcagaaccttgggttccctgggactggagttccagatggctatgagctgctgtgtgggtgctaggaaccacacttttgtcttctgcaagagcagccagtggccctaaccagtgagccatctctccagcacttgctctccctttattagtgtttcttctggaagttttggaggtcgttcacttgggcaaaaagtggctcccaatatcagcagtattttagctatatcaattttaatcctatataactgagtacaagtatttccaccagcagtactttttttttttaatattattttattttatgtgtatggtgttttgtttgcaagtgtctgtatacgccatccttgcctgatgcctgcagagaccaggagttgccagagcagcctggaactggagttaagaggtagttgtgaactgccatgtgggtgttggggattgaaccctggtcctctggaagagcagctggtgctgttaacagctgagacagcccccaccagcatttttgcctggcagaagccgtttacagtgcacatctccccgacatgactgttcttacagtcttaatccactgagcatttgtgattgtgtcagcaagatgcacaaaggcatatttctctcactgaatctcaaagggaaatcagtccccagccttctgcaacctcgaatgaggggtatgcgcggctgtgtttcctctcctggcaaacatgcaagatttacaattatttgagtgcagtgacaaaaaaaaaaaaaaaaaggactaaaaatatccaatgatgtagttcttctctttagccttccttgggcagccagtgcctgtcatcctgtgaccattatttgtctagtcacacacgaggtcagtcccattcttctcagtggggtctgatccccagctcttagccctgaatgtcagccccttgctttctcttccctccctggcataagtaactgccatttcaaaaggtcacaataggaggctcaaaggacattagtcatccttgggcctattttcggaaccatagcagaaaactagagtagtgtgtatgtccaggtgcatcttgtgtgatgtgtgtgccctggaaagcacagcttaaagttttatatctatctatctatctatctatctatctatctatctatctatctatctatctatcctagcttcctttttttttttttggtttttcgagacatggtttctctgtgtagctctggctgtcctggaactcactctgtggactaggctggcctcgaactcagaaatccacctgcctctgccacccaagtgctgggattaaaggtgttcgacaccactgcccggctttttttttttttttttttaaagatttatgtatatgagtacactgtagctgtcttcagacacacaagaagagggcatttgattccattacagatggttgtgagcctccatgcggttgctgggatttgaactcaggacctctggaagagcagtcggtactcttaaccgctgagccatctttccagcccccaacacatcctagcgtcttaaaatcgtggggtccttcagttgaatatgtacagagaaaaatctgactacagtgagaagtttctgaaccaaaaacaaattcacaaccaaacacacaattaatctccttacctggtgtgttggttgtgacagacttcactacaccctggttgtgtgcatacaccctgggcagtttgcacagtgcatgttgacacaccacgcaaggttaattaatggctgttgcctgaaacgcctcatgtggacgtgagactgttctgtgttttgagctacactgttctggctaaataaataaataaataaataaataaataaatggttttctgctcttatagagcatcatgcttaaatgatgggaaacaaacatgagctgtttccctgttattgttcttcaatgtgtaatatcagtttagtgtatctttgaattgtgctatgtctgagtatttagttttgtttttgagacaggctgtttctatgtagccctggttgctctggtcctctgtatgtacgcagaccaggctagacttgaattctctgcctccagagcactggggttaaaggcttctttctggcactacctttggcaaaccatctggtttttaaaaaacaaacaagcaaaagtgaattttggtttgggattaggacacaagttcctcttttctctgagatgaccctaaacatacaatcaaaatggcaatttcctaccattgtatgtgtgtgaattggcattcagaccactgccagcattcatgaatataaaatcaaatatcagccaactcagacccagcatctttgacgtttttcagttgtgaggtagttccttgtgtacaaatagacaaacataactatcatcagtatgcagacttgcttttgtctttacttttgaaattttacacacacatgcacacacaaagagtcgttacacaataagttctcttaaaacaatttttgcacatatttattttgtgtgtgtctgtgtgcacacttatatgtacgtttgtatcttggtgcttttgtgatggccaaaggacaacttgtgggagttgggttttcctcccaccctgtgggccctggaggcaaacttcacaccactgattggcttggaggcaagtgcctttgcctgctgagtaatctcacatacagccttttttgagactgggtccttcagacctcaggctggcctcaaactcgtgaatcaaccaatggatctgataacttccagcttctgattgggcgctatcgacaagtcacagctgcatgcatggtaggcaagcactttacccacagagctgtctccagcccctaaaatacattttttttcatgatttcttaccaatgatgtttggtttgtgtgcctattttacatacccataatcctgtaagtcaaattaaaaaattcctctggagaaaagggaacttgagtagaaacagtttaagcagccgtgataataataaataataatagagcagagagttttattccctgggctatgcaggcataacctgtgagaaccaggtgtcttccggcccatgtgttagcctcttgtttatttttgaggctggagatcaccgtactgcccaggctgcctaggcagtggtctcccctgccccaacccccttcatgcctggaatcataggcacagacctcaactccttgcttgcagcttcttgttttaagaaatcaaatcactgctttgtatattcatttcgtgaaaaatgtattcagtcacctttgaggatagagaactgtaagcagagccggtcagattgctggttaaccaaaatataaaccaaagtaaacaattccgctccattttccctgccctccccctcccctccctcccttcctgtgttttttagagtctcaccaagcacttgctgatcagcaacttgctctgtagctgaggcgcatctttaacttctgaccccccctagcttttatttttagttactgttccccccgcagtaggtagacattctaccagtgagttacaccctaaatccttctttcctggctgccctggtacttgctcggtagaccaggctggactcccacctcacagataatctgcctgcttttgcctctccagtgctggaatcaatggtgggcaccaccatgcccagctaattttttttttttttaaataaaaagtcaactgtgctcctgatcagagggtgttggagcatgactggaattagaaatgtatgtgaaaaacggtcagaactggctgttagggtcacgtgactcttccaaaactgtgctgtccagcactttggggtcttgtggttactaagaccatgaaatgtggctggcttggattgaaatggaccgtagttattaaaaaaacaaaaaacagaaagcaaactcactaggttccaaggatgtaactctaaaggaaagaatgcaagacacacatcacagtagtttaaaaagatatgttgaaatgttaaaatctgaatatgaactatatgacacgcccccctgaatgactgatttgaactcctgaatgaaaccatacggtaccgtgtttgaatagcatgccgtgtgcgtggaatgtgaaatatgttacacacagaaatgttttagggacattggcctacattactttaacccattcttaaaaactttatttaaaaacactctacatgtatttgcttttaaaagttgttttaattgtctttggagacagtcttctcactgtgtagaccaggctggccttgaagtcacagagatctgcctgctgcgtgtggctctagggttctgcgatttaaagatgtgtgctgctatgtctggcctacgtgtgtgtgtgtgtgtgtgtgtgtgtgtgtgtgtgtgtgtgtgtgtgtgtgtgtgtctgtgaacacaaacgccactgtgcaagtatggaggtcaaggacagcttgtctgagtccgttctttctacagggtgagtttaggggatcagagtcggcttcccatgcttggctgcaagtgcctttatctgctaagccatctccaccctcacctgtttacttttagacacctggaaagtataagagcaagcatatggctcggattatatcctagttggatagggttgcatattaaagcagacttcaaatcttcatcgtctgggtggctgtgcctggggtctggagtacccgccaggaatcctgggaagagtgttgtctgtgacgggggcttgctcactgctggggggagtagttccgtgggtcatgcataccaacattttaaggatattatgaaatgtgtgtgtgtgtaaacccctcacctctcatgtgagcctaatgggataacacagcctgatggcatgcttgctacacagagacaatgggacttgtgattttagagtattagaacaacgagcttagtacgcattttaagcactgtgattgctaactgctgctccatgattcagtcagctaagaataatttactaattacactctgccgccctcaagttctttctccagttactaaacatggggagataatgagaggaggggaaagggataaatttggaaattggagaccagaagaatggatggatgtcctaggagatactggctttaacagacttgttatagatttcacttgaaataatggcggtgggggaggggacttcccagtgagggagaaaagagacggaggggtggggaggggacttttctaaatccatttcccgtgttgactgcgtgctgggctgggtgttagggaacctgggtgagcaaagcccgttgagttcttgggctcagttctagtctctgtagaccaccctgagcttgaccatctgggctcagtcgtagggcactgcgttggtctttttgtgacgtgttagtcttctggatccgcctgtgctgtagcatgtgtatcacagtatctgcgtgtacatccttgtgcctccataaccattcactgatgggcaccgggttattacagcctttgagtggctgagcggtgccgatgttgtcgagaggccctgctggcagctccttggcgcgcctactcagaaataccatcattgggtatcatttggtaattaattccaatttttgattttgattttttttttaaagaatgtcatgttgacatttgagtcctgctccttaaacctaaaatgctgagatattgccgatgacgttaggctttaattgatatctgtatcatggtttattaaatagaaagtaggctccgcttattagaaaaacacatctatgaccaaatgtatacgacgataatttctatgaaattacctgaccttttgtctgtgaggctggttaaatctggatggctccaattcagagcctgttgatctgatagttcccttttcctgtggttgggtgaactttgggttgttattattataactttaaaaaaaaacttgccctgtagtagagggacattcccataggacaggcattgccaggaaggcagagccatggatgaaaagagtgaggagccagccgatggtgtccctcactaaccctgagaaaggagactgtagttgctgtatgtcaggagatccagagtcctcccaaaacagacattagagaaaggatggcagggcaaaggcctgaaacccacccagcagagagaattacagcgcttgcttctaggtttacagtgttactgaaggatcaggaaacaggagtccagcatccacaaagttggtgcctctgtagaaaatcgctgtcgagtccttacatcctgactaacccctttctacgcggatggaactttttcttctttcagctttcaaaaaaaaaaaaagatttatttattttatgtatatgagcacactgtagttgtcttcagacacaccgaaagagggcatcagatcccattacagatggttgtgagccaccatgtggttgctgggaattgaactcaggacctctggaagaacagtcagtgctcttaaccactgagccatctctccagtccttagctttctttctttctatcttttttttttaaccaagagaacatttcaaaaagaattatagttgggtggtggcagtgctcacttttaatcccagtactctggaggcagtgacagatctctgtgaattcgagggcagcgtgatcgatagagtgagttccaggacagtacagagaaaccctgtctccaaaaagaaacaaaaaaatttaaaaagaattactgtttggaactaaccagtaccccggagctcttgtctctagctgcatatgtatcaaaagatggcctagtcagccatcaatggaaagagaggcccattggacttgcaaactttatatgccccagtacaggggaacgccagggccaaaaagtgggagtgggtgggtaggagagtgggggggggggagggtatgggggacttttgggatagcattggaaatgtaaatgaggaagatacctaataaaaaatattaaaaaaaaggaattactgtttggttttagggtagatgggaagtgggtctggtattcgtgggcatggtcataggagtttaagtgcacacgatttagttttcaaactgcaaaacaaaattagttaaaaaaatgtatgaaattacataggggaggtactcatgctaaatgaagtctagtttgctgttgggacttgtaatcagtgaagcattctgggaaaattaggatgggcttgattctattgttcatgggatttctatggagctgagacgaggagaagtaaccatggggttttactgccctctgatgtagcagatgcaggttttatggcctgagtcgtgaattcagggaaactcgaccacagtgagtaatttcccagctatgggaaaatgtaaatattatgtacatagctaaagaaacaataacatcactttcgtccgctccaggtctgtccctgtttgtttacacaggcttgctgatggctggtcttcagagccaggcttcctttaggggaaggtgctgccctttcagagccttctgaagtttgaaggttgctttcttgtgtttcctctgactgaccgtcgttgatcgcattatacagtcgtctagcacgaaactgccatgctcagtttgatccttgctctccgctagagggaatttgctctatactttttaaaaaatactttattttattattttgtgtgtatgggccttttgtctgtctgtatgtctgtccaccacatgagtgcacctcagagggcatcatatcctctgggactgggggtacatctggttgtgaggcatcacgtggatgctgggcatagaacccaggccctctggaagagcagcctttgctccagaccagtggttctcaaccttcctaacactgtgaccctttaatacagttcctcatgttgtggtgaccccccaactgtaacattattttgttactacttcataactgttatgatttgatatgcagtcccaaaggggtcatgaccacctctccagccccttccttaattattctaataatcattcttgccagttggtggggagaatttggaggaagactcgttagggtgagaactgcatttcaaaaggtaaatcaacttcattctgttttgtttgtttcttctctgtacacacgcacacacacacacacacacacacacacgcacgcacgcacacacacacatgcacgcacacacacaccacacacacacacgcgcgcacacacacacaccacacacgcgcgcacacgcacacacacgtgcacacacgcacacacgcacgcacgcacacacacaccacacacgcgcacacacacgcacgcgcacgcacacgcacacacacaccacacacgtgcacacacgcgccacacacacacacacgcgcgcacacaccacacacacacaatgcacaccattctgtttgtatgaaggtcagagaacaattaatggaaagtatttctttccttccaccatctagatactagctcaggtcatcgaccttttaaaagctgggtatgcagacggacagaaggacagtcatggtgcctgcctttgatcccagcactcagaagcagaggcaggccatctcttgagtttgaggctaacctggtgtatattataactttaatttttttcaaacagctatttttaatgatggttcttaaaccgctttaacttcccttttagcccaccacccaccagaggtagtgggaaaggaaggatacgggaagtggacctgtttagaaaggttctttggaacaactcccgtctgtgttgtctggaaattggcagttcagtttataggctagcagttccatccattcgaaaacctccagggatgcatcagcagttcccgtccagtagagttggagtagcaagcacgaatcagcaatggtggcacctaggagagacagccaggcctcagcctctgcttgagtcagcaggaaggaccaggaggaactctcatggaagtgaaggtcacaaagacactagacccacaggctggacccacgggtgtagcacagctagctctataagtaagcaagcctaactcagcctccatcactgtccactgagttttttttttttttttttagatttatttatttatttatttattttacataagtacactgtagctgtcctcagacacaccagaagagggcgtcagatctcattatgggtggttgtgagtcaccatgtggttactgggatttgaactcgtgaccttcggaagagcagtcagtgctcctaccctctgagccatctcaccagccccttttttttgtttgtttgttttggtttttttcttttttttttaaagatttatttatttactatatgtaagtaccctgtagctgtcctcagaacttccagaagaaggcatcagatttcgttacggatggttgtgagccaccatgtggttgctgggatttgaactcaggaccttcggaagagcaatcggtgctcttaaccactgagccatctcgccagccccgagtcttttttatataccctccaaatatcatgtgtcttcatgtgcctcagcatgggtcttgcctcaacacatgcatctgtctcagctgacgtcactctgccgatcagccggagtccacggaagaggcaagaaactacagcacaccagacgtcgtttggtgcctttctctctatgtcgtcctgacaaaggcagctcaactacacagtgtaaggcggaccaatacatacgtgtcgtcacgtgtgctttcacatgtttgctttagcagaacatcctctctcctgtgctctcatcctctgcttcagcaaaccgttccttcacgagtctgcctgagcctttcacctgtgtccacttcagtaaatgttccttcacctgtttgccccagccaaacgtcatccaaaagactttccaaagaacccttaagtttccacggcaagtactaggcatggccccaggctgcggagggagacacaggaggacctctagagcttgctgctcagccaggctactcacgacggtgagctccagcttagtgagaaaaggtttttcttatcacagctaggccgaaaaatggtgaggaacgcacctgatgtcaaaatctttatcttaacatgtatatgcacacacgtgggcaagcaggcgagtggtctaacgtcgctctcccatcggatctatgtttgtgaatggtgagctgactggagcagttactacaatagtttggggttaaatcaggctagctgtgggccccgtgggcgggcaagccatcacaagcctttaagccccatctgtgaaccagcagcctgcgtagcagcgttaataaatgttagcagttgctctctctaagagatcccaccacctgtgatagctacccctttaactggccagaccggatggagagcccgctgcagttgagatttaaagtgaaccatactgtcagctgaagggtgaaaaactacaaaagcttagtgtctcgttggctgtcctgacttaatggacagggtatctgcggttgatgaggatcaccagtcggtcctggaggttattattatcttttaactgcttgccatatcaccgcggtgttcttgtttcctgggaatggggctgttgcctccctgtgagcccgaggccacctaatatcaagatgttaccagctttttcctttcaagcaggccgccccggctggagagaaggtattcaatcatatataaagctttgttttgaagtgtgaactccctgccttctctgcacttgcctggctgcaggatcctcgctgccagttgtgttctcttgggtgacactgcgcttcctcctggaggcctttcctttttcctgcatcgccctgtgcgcattgtttggggacttagtcactgtgctccttctggtgatcatgacatcagatgagatgagataatggtcaccaactgcgaagggagcgggagccatggccgctgtccccggagcggagcgctgtccgctgtccgaggctgtggctggctgctcagccttctcccacccacagcgtcggtctcagcgggcagggattgcagacagctatgggggttgcagcccctctggaggcttgcacactctgaatgaacttgcttatgcttgaatgcaggagttgaggaagtgcagcccgtcatgggatctgtttggccaaccctgctgagttcttttctactctgggggtgggggtggggggagctttctgggttctgatgttcactctctactcctaccctggcctccctttccttttgaatttgtgtttttcaccaaaaaaaaaaaagtagtctgaaactggccttatgttagttctgaatgctatttattagcatgctttatacataatctcattttttcccaaagatttattcatttattatatgagtacactgtagctgtcttcagcagacactccagaagagggcatcagacgccattatggatggttgtgagccaccatgtggttggtgggatttgaacccaggaccttcagaagagcagtcggtgctcttaaccgctgagccatctctccagcctgcataatctcattcttgctgtagtgtctctgatgaatcctaaaggactcactgttgcgtgattgtaaaattacacacaactcacaggtacatattcttcctttttaaggaatatgtctttcctttgtatgggtattttgcctgtgcctgtctgtcttttgagacagggtttctcctgtagttctagctgacctggaactcacagagatctacctatctctgccccctgattaaaggcatgcaaggattaaataaataaaggattaaaggcatgcagcacaactgcaaggatgatttgctgttttgagtgttagcattgttaattagtgacagcttggtaggggattttttttattaaggcagtgttactcagtagggtggatgggaaagagaaactaggggttttttttctcccgaggaggggagagcagtagggggatgggaagggttattttttgagggtttctctctgtagttctggttgtcatgaactcactctgtagatcagactggccttgaactcagagatctgcctgcctctgcctcctgagtgctgggacccgacaagacacctagttttgaatttgttgttaccatttctgggaacttcaggagtctcctttatcaagtcccttgagtattggttttctagcctttaaaacagatattcaaagaggaatgattgatagactatctatgaaaagtctctctgagctgtcaatcaggcagttgacagtctggcctggcagacctgtttagaagcttacaaaacagtttttgcctgcattttctaatgaagttgattgcaaggactagtgaatagcttttgaaaaaagaatctcttttgtttattttcatgtgtaaagtgattgaaaatcagagcactttatatctgagtctaatgtcatttggagttgattgtgtttatggagaaatcttgggagagagaagaccttctggtgcattgttgggcgtatcgggggcttgcgggcttagtttatgtcttctagattatctagactcggaacttggcaaagacagagagatctctggtctatataatgctgtagttacgagctggtttctggggccccactctgggaaatgatccttgggcttccaaatgatcatgagctttagaatgcacacagccaaacctagatggtatctctcagccagccactccgtatggccagtcacttatgccataggagactgacggaatcaaagaacacggatgtgggggtctgtggtcctgttgctacggtgacacagaatcccgtttcacagtagtttcaccttgtattttctttttgtcagtggaaggcagaacttgctaaaatcgagatgaaaatatatttaatgaatataccagccagccacatagtcgttattatcaagtgctccgtctccggtgtgttcactttgtttccatgccaatggcagcagttcacacccgccacactactcatggaagcaaagtgttgtctcacggtgttaggaagaccgttgttttattagattatgtactatattttcagtgtgcgtgtgaacttgtgtgtgtgtgtggtgcctggcacagggacagagagagccctattgatttttgttttattgttactggcattgtcgggatggggcctttgtgcagctgacggagggtgttagtgaattatatccctggtacagtcacatttgctagtttaccatctggttttaatatggtcagacttgtgtcagaactgtaattaagaaggagaagttggattaaggcagaaaacaagtgacttgttttgtttttgctttcgattgagtgataataagagagtggtaataataagttctgcattcgtgtggaagcgagacacttagttgaaatgaaaaggactttgggctcggggtggggagacccggttcctagatcactgctttcttaaaggtcctaatgaattctgtgacaagtggttacgttttgtctggagtgaaggaagcagcgattatggtaggaaggatttttttttccccatgaacgtgttgaagctgcatgaagggaactgaagccagtcgattagttgctagtgctgcagaaatgagcaaaatatgcagaattatttctcttgtgaaggagatgttttgagagagatcaagggggcgcatggcatggtttattgtattcatccatttttggtgccaaaacaaaaaagaacactaacttgatgtgagattctgtgttgcaggggttacatgtacagtactgagaaagagcccaccagcaatgtcatgttgtgtttaagaatctagtgggcttgaagtgtggctcagttggtaaagggcttgccatggaagcatggggacctaagttcaatccccagagcccatgccaaaaagatgggggtggtagcttgtgcctgtaatcacagctcttgggaagtggaggcaggtctgaagatcgctgggactcatccagtggcctcccacgtgggcgagttccaggccagcgagagaccctgtctcagaaaacaaggcggccctctcctgaggaacaacacttgagataggtctctggtctccacatgcgtgtgcatgtgtactctcaacacacataatgcccctacacaaacacacacgcacttgcacacacgaatagaattctatgtctagcacgcatgaaggatagaagaggtgtgggctggccaccgtgctggtgggagaacgggacttgggttggtgcagcaggaagtggggagaagtttgctgagagagagtttgatttgccatttgcttctagtgtctcccctttcccaaccggtttacgctcatactgccaggaaatgctcttcaggatcctccttagctagtgaaatcctgtgaagaaatgatgcaccttgtctacacccgaggctcctcaagactcccttgcccactctgtcgtttttttacccagcctattttctgcctctttcacattgtcttttcctcttcattgtcactactgttgtctttaaggattactgaacaatggaaactatcagtctggaggactctgcctatggaagggatgtgggatgagtcaggattgtggtggttagcttgattcactcatcttctccctccccagtgctccctattgaacccaggggtttaagcatgggaggcaagtgctctgccactgagctacattcccagccccacttgattgattcttctactttaaaaaaaagggaacaaaactacttttatgtactgtgtgtatgtgtgtgtatatatttatgtatatctacacacacatatttatgtaggtttgggtttttgtttgttttgttttgctttgcttttttgagacagggtctcactatgttgccctggctggctaggaactcactctgtggaccagattagcttcaaattccccttgcctctgcctcctgcttctgggttaaaggtgtgccttgccgtgcttggctgactgccttcatctgagccatttattgttgctgtggagacactgtgtatcccagggcggttttgaactctgcatggacaggagagaagagatccctacaagttgtcctctgacctctacaggtgtcctatggcactcttgtgctgtgccccctccccgcagagatacatatgcagatgcacattcatgcacacacatataaatagaaatgtaacaataagaaaatactcatagagacctagagtttaaaaagatgcttggaaataaaataccaagtcttcctttgcagagtcaaacgtgacaactggtcacacagtgtctatgtgagggcaaagttctagccctcttggtggctgtttattggttattcaatggcagggagataacccagcactttacggagttcccagctaggtgaaactgttgataccggtgcccctcccgcccacccacccctcaaccacagtgtcatggcttcttcagcaatagggtcttacaatcgcgttccgatagacagatcttggaatggcaatagcctattgtttcggtcactcctgaccaacaacttacttttcttttttctattagagactgagttttcctctttatagccctgattgtcctggagttcactctgtagaccaggatgacttcaaattctcagaaaccctcctgcctctttctcctaagttctagaattaaaggtgtatgccactatgaactatacctggcctctgtcttttattttcttagttttaagtattatgactagggtaaggtgaaatatcaaagtggctttaattttgcatttccctggggtctcaagatggtgaacacttcaaaaaaacccaaaaacaaaacaaaaacaaaaaaacaaacaaaaaaaaagccccaaaccattccttagccatttgtattttctttgaggactctgtttagttccatagccagctttaactgggttatttgtttgcttggtgttttgctttttgaggtcttcgtatatttgtatatagtagtcttcatgggatgcttagctggcagagatggttccatgctgtaggtgcctcttcaggcgatcggcgggtggctttgtagcatagaagctcttcaattttgtgaacttggttgttggtcctgtttcttgctgtggccagaatcctattcagaaagtctaccagggactatatgctgaagtgtctaacagtgagatctctggttggtttggggttgggtttgtgtgcagttcagagaaatggtcaagtttcatttggctgcacgcagatgctcctgtttccccaacaccacttgttaaagatgtcatcttttttcctgtttgtatttttggtctctttgtcaaaaatcaggtggttgtaggtgtgtggacttatacctgggtcctctgttctatgatatcagtgtgtctgctcttgcttgtgtgccctgctgtctttactactgggacttggtagcttacgctgatagcagcaacggaggagctgataacagcaacatttttgttattcagatttacgttgactagaaaactgggggggaaccagagagaaccagtgtgtttgggccatgacacagtacgggtgaactcatagtacatatggttgcctgcacaaaacctacaagattaagccttggccactcaatattttagtgtggatggaagaggagatcaggagagacctcctcctcccccagtggggtaactattgacagttgatggcttctgagggaagtcttgaaacaggaccaccacacagcaccccccctcccatgagttctaggaatcaaattcaggtcttggtaactacgctatctcccatgcaaggccttatctctctctggtatctttgacacagtgttacgtgtctgtcttagggttttactgctgtgaacagaaaccatgactaaggcaactcttatgaggatgacatttagttggggctggcttacaggttcagaggttcagtccattatcattaaggtgagagcatggcagcatccaggcaggcatggtgcgggaggagctgagagttctacatcttcatctgcaggctgctagcagaagactggcttccaggcagcaaggactaaggtattaaagcccacacccacagggacacacctactccaacaagaccacatctcctaagagtgccacgcccatcccagtgtctggggctgccctccagctctgctatgtagctcaggaatgactttaacttcctggtcctcctgacaccactgaccacaccctccaaattctgggactaccaccatgaggtcacctcgtccttctgcaggtggcttatctctgctgggaggagaatggactgattgcatagtttaactgcccctttgacctttcggttgaatgggccataaaacctgcattttttctgcttcccttttccaaacgtgttgttgcaggtgtgaagtgaaaatgtttactaaacagtaaattctctaagtcctctgcatttccagcattgttgggctgctctgagtctgtgtgggatgaaggtctctaagctcccctgctgattctgtggccagcatcctttcctccttgacttagcattcctgccctcttgactgtttgcttcatccacagggccgtcaccctgcaggcttctcagaggagtgtagtatctttgcctcctgagcacacagcctagtgggaggtcacggggaggtgtacagtgaaggcacccaggccactggccacagcacacacacagggcccttcacctgtgctgagacatttggtgtagataaggtcttggacaagggcattgctaagaagatgcactgagagatggtggggtagaaaagccaggctggctgggcagccggggtgactgtcacattcgcagggatcagagaaaaggggctgagtgccatggagcttgggcgatgtgaggaaccaggtaggtacaagccgtaggttatagtgaagttaggcctgaacttagtggagatgtactgtctctaaagcaacagttcaaccttcctaactctgcgaccctttcataagcttcctcgtgttgtgaacctcctccaaccataaagttgttttcattgcgtcttcatagctgtgatttttgctactgttgtgaatagtaatctgatagacaggatatctgatatgggctgagaacccgtcttctttagcaaaggtcactgagatttctgaagctgtactcatagcttaactcttggagacattaggaggaaacccctgcatgttgagtttccagggttcctatttccattcgggtcacactcattgtcatctgaacgttatgcacgtacggcaaaagtggaagctataatgactatgatgaatgtcgcctcagctacaaagaagttggggatttccaaacattttgttgtcattaagagctgtctctagccaggtgtggtggctcatacctttaattccagcactcggaggcagaggcagtcaaatttctttgagttcgaggacagcctggtctacaaatcagtccaggacagccaggtctctgctacacagagaaacatcttctttttttcttttcatttttctttcttttttttttttttttgccaaaggattttttttttttttttaattgagcaaggcatgacaggtactgcaagaagagtggagccaggggacagctgttaagacgtgcggaacctgcctgcagcagctcctttactgtctcctggcgcaaacacactggcggtgccctccagagctggagcacccttctgcgagatgaaacactacagggaaggagaacgagtaaggaacaatctgcatgatcctgttttcttaacaaaacaaaaattagtaggtctttgaaatttgcttcaaggaatagtgagtgaagttctgaaggctggctatgtttcttttccttttagagtgataagaaaatttaatagcctgggtgcattccaagagtaaagtaagtcacacacccccttattgacacactgagattccccaggcactcatggagattctgaccacgggcactgctcagagctctcactgtcctacagacagctgggcgagaaaaaccaactctctctatgtaagggagctcaccagcctatgtagggaggccagcacactgttgtgcagctcgcaagcagtagcggctgtacgggtgcgcacagagccactcacctcgttatggagaccggtaacttaaatcctgcgtctatggtatcctgatgccttcctcaagctggatttgcagccagtgcaggcacaggaagctagaacaaagaacttcttttgtgtggtatctatcatatctatctatctatctatctatctatctatctatctatctatctatctatctatctatctatcacctgtctgtctgtctatctatcagcagtctatgtgtcccaggctaggtatggatttgctttatagctgaggttgaccctgaacttctggtccccctgtctctgcatcctaagtactgagattttagcatgcttcatcgtgcttggttttatgctgtgctgggaattgaaatcagagtttcacatatgctaggcgagttcactgccaactgagctgtatgcccaacaaaatcgttacaattaaaacatcttcttgtattcttttttttttttttttaaggttcacttattatatgcgtgtgagtacactgtcgctgacattggttcccattacggatggttgtgagccaccatgtggttgctggcaatggaactcaggacctctggaagagccgtctctgcagccctgctttgttggtttaaatcttattttgggggagcgatttctggttatcttggactttgctgggtggaggaggattacatgaacttttctacctcctggtgctggcattacaggcattttgtggccaccctcattttatgcagtgctggggtctggtgttgggtatccagctcagggctttgtgaatgctaggtaggcactctaccaactgtgccttctagtttactaaaccttctcaaaagagctcaagtagcaggcaaaaggggcctgaaatgtccagaacagcaaaaaagcatgaaagggtctttttgaggtgacctggcacagtccctccagctgaaaagaggctgtgtttccttatcatgtccttcctgctccagttgcccaggtgtgctttgtggtttccaaacacccactggaccggctttagtctgacggcaccagcttcttcataatcctcaacttccttttcttagaacctttatgaaactctcttcttcaacacggccctcaaaacaactttgctgtgcaacgtagtcgctattcgaagtttttcacccactggcagaagtcagtgggagagcccttactggtggccctggttctatggtggatacttattggcagaggcatctctcatattgtcgctgtcgccattctgtggtgaaataatgaggaggttaaaatggctttgcagctacctgtccagcaccctgtctgcctgcatgccatcatgcttcctgccatgacgctaatggactaaacccctgaaactgtaagccagccccagtgacatgtttcccttcataagagttgccatagctgggcgtggtggtgcatgcctttaatcccagcacttgggaggcaaaggcaggcagattctgggttcgaggccagcctggtctacaaagtgagttccaggacaaccagggctacacagagaaaccctgtctcgaaaaacaaaacaaaaaaaaagagttgccatgatcatgatgtctcttctttgataatgtcatacacatgtgcaatgtatctctacatatccacccaactcccccagataatgctagcatacccccaccttcatgcgaccccccttctttgtacaaagtccaattagtccaactaggatgtcgattgaacagcccaactgtcttggtcttgtacaggtgaccacagctctagtgagtttaatggatacagtggccgcatccatctagacagccttccccatcctttggcattttacattcttcctgctgcttacgagatgttccctgagccctgggaccggtgggtgttgatttagatgtcccattagggtgagcactcaatgggcacttatccttggtattttgccagttatgagtgtctgtgtcaactgttctctgctgctctgggtaagatcgagtgcagacacacatagactaggacagtttaacagtgtcttagctgaggttctactgctgtgagcagacatcgtgaccaaggcaagtcttataaaggacaccatttaattggggctggtttacaggttcagaggttcagtccattctcatcaaggtgggagcatggcagcatccaggcagacatgatgcaggaggagctgagagttctccatcttcatctggaagctgctagcaaaatactggcttccaggcagctaggatgagggtcttaaagtccacacccacagtgacacacctactccaacaggcccacaccttctaattgtgtcactctctgggctgagaaaatatacacattgtcacaattagcatgtccatttgagtaaaaccacagttggaggttggtctttagagtttatgacctacagagccatgggcttctaaccaagttcatagtatcagacatgaattcccttctgtgaagcaggcctcacatccagtcagaaagcagttagttattgcataacggtcacactactccaccagtgcacatcttgcctgagccgtcaatctgtagctcttggggttggctgttatagctgatggcttctcttgcagctttctagcactgtggaagatatttagcagggcgagagttttaaggtcagttccagcttgatttctgtgtgtcctgtaaccaaagtgtgttgtaccttcaacaataggacattaccatccagttatgggaagcagcccacagcaatggcagtaacctgtgttgtatgtaggggtgagggtaggggaccttcctcatagcaattcatagggaggtatcaatacctagctctgagattttcacttaatgacccctgtcttctgagggaaccatctatgcagggtacctgtgttcaaactaccttttaaaaaattatattttgaattagcatacaaaatagtggtttctgtagagtttttgtacattcgtagttttgggtaatctactcccacacactcctgctttgtcccctcatctcactcctgctttgacctttgtacagtcaggtcatggagtgagatcattgacctgcaggattcatctcaagcttccaaggatcttcatttacacccgcaggttggcaagttcaacttacatattttttctttctttctttctttctttctttctttctttctttctttctttctttctttctttctctctttctctctctctctctctctctctctctctctctctctctttctttctttctttctttctttctacatattttttttcttaacggaccatatcacttttctttggacacataaatccatataaatgtgtgtgtgtgtgttttatacacctatgtgtagtaacagctttattgagataaagtagctatgcagacaaccctgttagtatttaacgggcatgacttggtgtgttggacacatgtaccgtatttgcaatactgaagccatcatcaagatgataaacttcatcccctctgaaagttggagtcactcctgtgtgtggtgagaacgtttagcagggcaactgtcctcctgtcagatggtcatcatccagtgtcccattgctcaatgtaggcatgatgtgtgagggtctccaggcttgttcatcttgcacacccgtaactcacactcaccaaacattctctctcactctccctcctccctgctcttggccaccacccttcctagtggctacttcttcaagtctgactattgtattttgtttttaaattgacttgatgacagtgacctcacagataagaacatggcatggctagattaaggtactcagacacttgctcaggtccaaaccctgtatatctgtctcagtgactttctgcacccttagaacggccatgctggaggcttggagcttagcttcactgagggtcttacgttttccatatcaattgcctacttatgtactatgacagttgaaagcttcatctcctcttggacaactcgtcctttggcctgacttcatccatccctgtcagctgatattacctctctgggtctcctgtgagttgaccgtgctgtttgtcttccatgactgagtggcatcactggtatcgtacctcaggttttgctcacacttttgtgaggctttctttttttttttttttggtttttcgagacagggtttctctgtatagccctggctgtcctggacctcactttgtagaccaggctggcctcgaactcagaaatccgcctgcctctgcctcccaagtgctgggactaaaggcgtgcgccaccacgcccggcttgtgaggctttctttcttcatgaggctaaacagtagcctgctgtatggatgaccccattcctctatcattcttatttaatgtccttagaggagatatctttccttaatgccagtgactttgagcgttaaagcaggtgatgtcagaactggaaagcagtgggaacctcagtgcatgtgggaacaagaggatccgaggagtgtctgactcaagggatgttgtacttggtctgttcctgagccataaaccacagggaatgacccaactttaagacactaggctttgacatcacagctaacacacacattcagaactcccaactcagtggttgcctgaccctggtttccaggttccatacctggtttcgataggatttgacagatcgtaaatcagtgctccatctggatggaggccctgctcaccagcagccatgtcctagtcataagacagcatttcatggcccttcttcccatagtctggctcatacattctttttgtccccttttctcagtgttctttgagccatggagggggtgatgttggtgtcctgtttaacccgagcaccatggacattcttgtatatattttggtggacatacactcatttcctttggacagttgcttaagagcagagttgctgtatgttagagaaggtagatgtctgactttggtacatgtcattgatttacatatcatgaggtatacgcccaccagggatatatatatgagattccattcactccacatacttgctaatggttgtatgccctatgaccctcaaccttgtttcatgctggagagcaaatcaggactttgcacatgctagcttaaatgctccaccatgtagcacatccatgtagcatgtgtgtgtatgtgtgatttttttttaaagacttattttaaatcatgtttctctgcatgggtatgagtacagactgatgtgcaggtggctaaggagggccagaggcattaggtctgtacagaggctttgagtctcccagtttgcacactgggaaacaaactggtttctgcagagtgctagccacgctctctcgactgccaagctatctgtccagcctcacctgtgtgatttttttaatcctgccttcaagtatgagcctgagaggaggttgccaattggtatgtatacctgtggaatgaaaatcaattgccaatatgtaagcacggctccctactcattaggtcatctgtctcacggacagacggacagacagacagacagacacccaaacccagcaggaggctccagtaagcaccaggagaacaaatcgggactttgcctgcttttcctttgaaacaacctgggctaataaactctggtctcagttttcttgcattcttccacgatgagaatcatgctgaaatttaaacaaaaggtccccctcctgcaggttcctggagggaagtgtgacttgaagcattccagggttttgctcctttctgtttctttgttgaaagacccagggaaacccctggagcaggagagatcacacagcagcagtgtttgtcaagctgctgggggtggggtggggtgggggcagttctgttttattttattctgcatttctggtgcccacactaatttgttgctaccggtgtgtccagttgttaccattcccacccccctcccctctccccatccctgccagtgtttgttattttcttctgatagccagcctgaccagaccaagacaggatcatgaatagtaattgtgtgcttgtttgcttggttttgagatggtgtgggggccgggggttagggttgtttgtagcccagaccaggggtatttgtagcccagactggcttaaacctgtagatagctgaggaggaccttgacattttgaccctcttacctgagtgcttcagttgtgtaccccgccatatatgatcctgtgctggggatcgaacctaggactttcgtgcatgctgggcaggcactttaccggctgctgcatcaccaacaccccatggtacggctttaatttgcatttctgtgttggctgaaaatgttgggtgttttcccatcattttactcagtcccttgagatctgtctcttcgttgggcaagctcattgattggttggatccttttccttctgtcttaaaaaaaatgtagttcttaactatttgtcccctgtcagatgtatagcaggtgaagatttttctccccaagttctaggcagcaggtgtgagttccctctcttcgccgttggactctgcgaatacatttggaagtattttacaggttttcctctgacaacctcacagtttcaggtcttgcattaaagtctttcatccattctgaaatcagtttttaagaatttgatttattaattttgtgttgtgtatgtgtgttctgcctgcgcgtgtggctatcagtaccgcgttcgtgcttggtggcccgtggatgtcagaaagggctccagataccttgggactgaacttacaggtggttgtgagccaccaaatggagtggaagctaggtcctgtgcaagagccaacagtgctttgagccagtgagctgtacctctctccagtctgagaatcatttttctaaatatagaagaaaaaaaaagtcccctgtaccctagggtagccttgaactcatgacagtttggaagcaggacttggtggcatagaagaaaggaatctaggacaccatggtggcttgtggggcacttactcccatcctgcaggtgcccaggatttggtcattttgaccagtactaaatagaacaggattatctagctttcctttgatctataggtaacacagtctacatttggggcacttaggaagcatcccaaatagagacttaaatgaagccttaattcattctcacagatgaagctctgtgagattcatctgctcaccctatcagccattcttgctaatttggtaagcaaatctgcccatctccaggcagaagagaaatcaatatctcaaaggcagtccttccacgactgttaatgctgcttgaaaaccttcgactcctcgcctgtccccaggacactgatgtacgaagtcctttctcacggggggaaacaccggcctcaggagtctcatagatgtcgctctcatgggatggtttcactgcagtggtcagcagtcgagaagttttatattgactctttggtttttgcttaacatacatggaaccactccatggaaagtccccacattggtcttgcttttggttgcacagccctgaaacttcctacttgtccacgtgacctcacttgtttggccagatctttgtctgttgccagaactgccaataacataggcttctcgtattgtttgtttttgatgctgggcgctaagcccaggcccttgcacacatacacactctatctctaagctagccccagccaaggtagtgtattgtcttagggtttctgttgctgccacaaaacgccatgaccaaaaagcaaggggagacaaaggtttattcagcttatannnnnnnnnnnnnnnnnnnnnnnnnnnnnnnnnnnnnnnnnnnnnnnnnnnnnnnnnnnnnnnnnnnnnnnnnnnnnnnnnnnnnnnnnnnnnnnnnnnnnnnnnnatcactaactgagaaaatgccccaggactgcatctcacggaggcatttcctcaactgaggctccttcctctctggtttcttgcttgtgttaagttggcacacaataccagtcagtacatatagtttttagattttctttgtatgatgttttaccttcatgtgtgtatgtacactgtgtgcctagagcccacagaggccagaagagggcatcggatcctctggaaatggcattctaggtagttgggagccatttgggtgttgagaatggagccaggtcctctccaagaacagcaagtgctctaaaccaccgacctagccagccctctagcactcttcctcctcctcctcctgtccctcctcttcccttcttcctcctccctcttctcttcctcttcttcttcctcctcctccctcttctcttcctcttcctcctcctcctcctcttttttgagataggattccattgtgactatgtagccctgtttggcctggaataccctatgtagaccaggctggccttgaactcacagaagtccagttgcttctgcttcccaagtgtaagatagtgttaaacttcagtttcaccccatgtctccaacacacatatcagggttttcttctggcaagttcttggggtttacataaaacacacacacacacacacacacacacacacacacacacacatgcccaaggactaatgtcccattcacagcacatcatttgtttattgttttgttcttgcagggcacacatgggtttagtttgctaagctggtattcaggcagctcccagacccagggagcgtctgatacagagtgatggaggatttgttctcaatccccaccacccacttctgacttcacctctgaaagagctccctcagtgcggaataacttaatgccatggtgactacagaaaccgtactcttacaagttcttaaatatgtagaactcagaaaacttgatcccacttcagtgtgtaatttgtattaatattgtatttatacttgaagtcttggaatttgggttggtctgccaacaaaggaacagatcacagatggagagaggcttaaacaatggaagtgtgtcaccttcgggtctggaggttggaagccagagatggagctgcttcctgagggcagaagcaggatctgaggtaggcctcgcccttggcttgtagaagagcatcctctctccctgtgtgccatgccagaatttctcctggggagggcaccagtcatggtgagcagaggccaccctaacgctcatgcggacatagcggcttctgtaaagaccagcgataccgaggtactagagactagacttgacatgtggggacacaaactgatccatagaaggagctctaacaaccagcctgtggcatttctaccaagcatcgtgcacagggtgcagagcatgggtcccagttcaggttggtccccaggaatctccaggctggtggagagctgcagggttgagtcccttcttgcatggaggccatggagcaagcctgtctcgggaggaggtgcggccccttgctgcttgccagctcttcgcttactcagatctgcctagagtcagtacggaaacacatacgtgagtcacctcacccgggcaccagaaccttgccattctcctaacgtttaatcaaaactccctgcttaaagctgaatggatgactgctctctcatctccaagtatgtgactgtagtcattttcttatttgctctttgcagtgactcctgagtactgtccaaacacatatgtgctgtggcgtcctggccatcagaaaaccacaccaacatctgacgctgtggggcggcggttctcaacctgtgggctatgacccctttggccaacccctatggccagaaatatttacagtgcggttcaaaacagtagcaaaatgacaattatgaagtagcaacaaaattaattttatggttggcagtcaccacagcgtgaggaactgtgttaaagggtcgcagcgtaagggaggttgggaccccctgcagtggagtggtagccaggggtgtctttattcagagttggtttatagttgaagctcaactgtttctctgacaggctgcattggtagagatctgtacatagagctctttaaagttattgttcagctctttatgagtaatttgccgttttaaaagcttgtgatggcccatgatattctttgataataatgctttatatgagaggcaggagcatcatagtttaaaagtttttacatcactgggctggtaaagagcgctcagcaggtaaaggggtctgctgccaaacctggcaaacaatttaaatcccagggtccatatggtgggaagaagagaacagacctcctgcaggttgtcctcaaaccacatgtatgccataatagtaaataaatagatgcattatttttgttacattgctagatagattggtaatagcccaccacctgttacttgcagtgagtgggagagcaacgggacacatctctctgcccatcatcaacagagagccagcctatagcgtgagaggagccctctcctgaaattcactgttgcttcttgtgaattttatttgtagaaaacaaaaaccaagctgggggtggtagggcccaaggccttgagaggcatagttaagaagagcttcaaaagattgaagccaaccaagtctaactagtgaattccaggccagtcaatgctaccttgagagaaagaccctgcttcaacaaacaaacaaacaaacaaacaaaagtaaaacaaaaccccaacccccaaggcttactgcttttatccaattaaaaaagaaaaaataattttttcttactggaaaattgaagttaccggaatatgcctgtagagaaaattgtctttgaggttattgctggcgtgtgtagacttgaaaggaagtacatgctaggaactactagatcgtaaagtcgaaggctatactaataggacagagtgggctgtgaccgtcacgagtttagggattttttttttaaagaagattgtttttagaaagattattattattatttatttatttattttatttatattaatacactgttgctgttttcagactcatcagaagagggcatcaaatctcattacaggtggtcgtgagccaccatgtggctgctgggatttgaactcaggaccttcggaagagcagtcagtgctcttaaccgctgagccgtctctccagccctagggtttctttcttgattaaaaatgtaaacagatcatggtgcatatacttaaactgttgaattgtattcttaagtaggtagtcttcactgtcaggagacacccttaactactcctctgggtgtgttaaaccaaatagggaagacgtgctctgactgtgggcgcggggctcccaaaccaaaggtgagcagaactgcctgatgcaggttgatctctctgcttccggctcctggcgcagcgaaccagctacttccggccgtgatggaccgttcttagaaataatctttctaagaacaatcttcttctcagactgacaaacccgccattccttacgttgctttttctgggtccgtttctccttctggtcttttcatctcctaaagcagtcgcagtgaaagacagatcaggcaaacactcgttctcccgcgtgcagaaatgcagtggtcccagatgtgtgcagtggaagttgtttacacagaccgagtctgcaagcccagagatgaaggcccgctcaggaagactctgattagagaaaaatagtccacctcactcacttgatggaaaatccaggatttcctgatgtgggtccctcgattgtttaagggccgtcaaccaaatagttgtccgaagtaaaatagaagtttgacaaatgcagcaactgtgtgaaagaaatcagtctcgaagggataagctcacatccaagcaactggagaagccaggctcatagagtcagaaaatcagggtcgggggacggggagttagagtctaatggggcagagttgtgatgggggagacagttatgaggacggatggtagtggcggcccagagtgccctggggtatgcactgcaggagggcgctgtccttcagagaacaacccccaacttagtgtgtatatgtggcagtaatataaggtctccacaattagaatacagtaaaatttaaaaaggaatttacaaagatcaaaagctacaaattatgagcctgatattactggaaacaaatattaatgttttgggtttttgttgttgttgttttcaacacagggtttctctgcctaaccctggtagtcctggaactcaccgtgtgctcaaaaatgggttaagagaaagccatctctctaattaagacaagtcgccccaaggtgctggatccctatgccaccacacccagttactgtcctgctggatgcaccctgagctacatccccaggcctagataggtgacttaatgtcacctccgtggccttgaactcacagagatctgcctgcctctgcctcccaagtgctaggattaataaaggcactaatatgttttcttccaatgactgaaatatatactctatnnnnnnnnnnnnnnnnnnnntttctttctttctttctttctacatatttttttcttaacggagccatatcactttcctttggacacataaatccatataaatgtgtgtgtgtgttttatacacctatgtgtagtaacagctttattgagataaagtagttatgcagataaccctgttagtatttaacgggcatgacttggtgtgttggacacatgtaatgtatttgcaatactgaagccatcatcaagatgataaacttcatcctctctgaaagttggagtcactcctgtgtgcggtgagaacgtttagcagggcaactgtcctcctgtcagatggtcagcatccagtgtcccattgctcaatgtaggcatgatgtgtgatggtctccaggcttgttcatcttgcacacccttaactcacactcaccaaacactctctctcgctctccttcctccctgctcttggccaccacccttcctagtggctacttcttcaagtctgactattgtattttgtttttaaattgatttgatgacagtgacctcacagataagagcatggcatggctagattaagggaaccactcagacacttgctcaggtccgaaccctgtatatctgtctcagtgactttctgcaccgttagaacggccatgcttgaggcttggagcttagcttcactgagggtcttacgttttccatatcaattgtctacttatgtactgtgacagttgaaagcttcatctcctcttggacaactcgtcctttggcctgacttcatccatccctgtcagctgatattacctctctgggtctcctgtgagttgaccgtgctgtttgtcttccatgactgagtggcgtcactggtatcctacctcaggttttgctcacacttttgtgaggctttctttcttcatgaggctaaacagtagcctgctgtatggatgaccccattcctctatcattcttatttaatgtccttagaggagatatccttccttaatgccagtgactttgagcgttaaagcaggtgatgtcagaactggaaagcagtgggaacctcagtgcatgtgggaacaagaggatccgaggagtgtctgactcaagggacattgcacttggtctgttcctgagccataaaccacagggcaatgacccaactttaagacactaggctttgacatcacagctaacacacacatccagaactcccannnnnnnnnnnnnnnnnnnnaaaggataacacacggttagctcggggagcccggctcactgctcttgcgtcagcttttgtgccatgtcctgaggtggctctgagggagaggagggatcagttcttgtgggccacgttgttttgaggggtttgtttgcagctttgaccagcgagtcactaggcccgggatgtagttcagtcaacagggtgcttgccagacgtgcatgaagccctggcctctggtctagctctacgttaactgggcacggtagcccctggatccagcaccttaaggccatcccttgccttcaggttgtcttactttctcctcagcaatgcttttgcttaacccttgtgcctgagcctgcattaaaaggtaattaattaaagcaaaaagtcttctcatggcttctggttttttttttttttttgacccccaacttagtgtgtatatgtggcagtaatataaggtctccacaattagaatacagtaaaatttaaaaaggaatttacaaagatcaaaagctacaaattatgagcctgatattactggaaacaaatattaatgttttgggttgttgttgttgttgttgttgttttcaacacagggtttctctgcctaaccctggtagtcctggaactcaccgtgtgctcaaaaatgggttaagagaaagccgtctctctaattaagacaagtcgccccaaggtgctggatccctatgccaccacacccagttactgtcctgctggatgcaccctgagctacatccccaggcctagataggtgacttaatgtcacctccgtggccttgaactcacagagatctgcctgcctctgcctcccaagtgctaggattaataaaggcactaatatgttttcttccaatgactgaaatatatactctatatagaaaacatggaaattagcgggagggtggggcttgtatttgaggtgagagcagtctctgcacctctgggcccttgtcgttctctcccatccacagctgaggtctgctgcctgcccctgcccccgcccccgccccccccccccttcgtgcaggcagctttgctttgtgcctgccaaccatccatccagttttgttgttctctgaaggacagcgccctcctgcagtgcataccccagggcactctgggcggttgaacctgagacttgactggcagaggcctcttgtggagggagtgactccttgcttacagaccttgagttcagaccctggtctccatcagaccttagcagtggacagactgagtcccccttgcccccgtattagtgataacaatgatttcttagataagattactgtgcacaggggactgtcacagttctctccacggtgagtgatgtccctcaccaccgacacacctgctgtccctttattcagaggtgtttattgagtccaagtgctcctagctttgttctaggtgccaggatccaactcctaaaaatccctgctaagggaagttgctaattcctaggaagaaaacaggcaattaagaagatgagtaggccgggtgtggtggcacacgcctttagtcccagcactccggaggcagaggcaggcagatttctgagttcgaggccagcctggtctacaaagtgagttccaggacagccagggctatatagaaaaaccctgtctcgaaaaaacaaaaacaaaaaaaaagatgaatagaaatccagggtgcttgtccaacactgggtgtaagcctctctcctctccatgcacaaacaagcactaagcaagtgaaagccaggttgcaactcggttgatagagcatttctccagcatgtggaaagtcctgggttctgttcctggcacttgtttggagttatggatcatctcttaaaatgcatttgtgtaagcctgagcttgaattccccagcacccatataaaaagcagggtgtgctgactggcacagacttgtaaccccagcattgaagaaggggtggagactggagggtcttggctggtccgccagtctagctgtattgctgaattaattccagattggttgagaagcctggtctcaaaaacaacctagagaagcagttgaggcaggcaataaatatcgannnnnnnnnnnnnnnnnnnnagcagataaaagcgtgacttcaacccttggaacccatgttaaaaaaaaaaaaagggccaggtgtggtgtgcatctgcggttctggagcaattacggtgagatgggaggtggagacaggatggcctgacctctggagggccagctcacctgcagtattaccaccacctgatgaggtctcacgggtgctcccctgccagtcactcccatggtctctcgagtcccaggaagatgcaccgtgtcactggagcaggttaacattgtgtacagaggtgttgggaatccagagggagtttatgagcggtgcatcgactttaaaacgtgtcgtgttccgttgcttctctgtggtgggaagtgtgggtggccttagaagtcgagagagaccctgaggtactctgggaagtcagtatgtgggtgaaacctgatgccaaccagaccgatcctttcaaaataaagacaaaatgtctctcagagagttagtcatgtctgcatcctaaacatccttagagcagagcccctcctgggtaccagaggactgcatatctaggaccagccccaacactacttgagttatataatggcatctgacacagccaggttcttaagaaactgctgtgctgtttaaggaggagaccaaaatacagacggggctttatgtaaactaaggagagttgagttcatctttaaaatattacttgtatgtgtgtgtttctgtgtgcacgtgagtacgggtgcctatggaggccagagtcaccgttgtcccctggagctggagtcatggcaactgggtgctaagaactgaactcctgcataagagtggtatgttctaactacggagccgtctccccagcccgatttcttttttaaatttgtatttatttattttatgtatatgattgctctgctgcacgtacacccctccgacccccccttgccagaagagagcgtcagattcctttatagatggtcgtgagccaccgtgtgggtgctgggatttgaactcgagacctctgaaagagcagccagtgttccttacagctgagccatctctccagccctccaacccaatttcttaagaagagaaaacggatgggaaatgtgagagccactgggaccgtgaccctagtttcaaggacattccgtggccccattagagcgtccggaggcctggctcctcatctgctaagtaaattctttgagggaggagagaggtgaagtgaggtaagagtgagggtgaggatgtggtattttttggaatagtnnnnnnnnnnnnnnnnnnnnnnnnnnnnnnnnnnnnnnnnnnnnnnnnnnnnnnnnnnnnnnnnnnnnnnnnnnnnnnnnnnnnnnnnnnnnnnnnnnnnnnnnnnnnnnnnnnnnnnnnnnnnnnnnnnnnnnnnnnnnnnnnnnnnnnnnnnnnnnnnnnnnnnnnnnnnnnnnnnnnnnnnnnnnnnnnnnnnnnnnnnnnnnnnnnnnnnnnnnnnnnnnnnnnnnnnnnnnnnnnnnnnnnnnnnnnnnnnnnnnnnnnnnnnnnnnnnnnnnnnnnnnnnnnnnnnnnnnnnnnnnnnnnnnnnnnnnnnnnnnnnnnnnnnnnnnnnnnnnnnnnnnnnnnnnnnnnnnnnnnnnnnnnnnnnnnnnnnnnnnnnnnnnnnnnnnnnnnnnnnnnnnnnnnnnnnnnnnnnnnnnnnnnnnnnnnnnnnnnnnnnnnnnnnnnnnnnnnnnnnnnnnnnnnnnnnnnnnnnnnnnnnnnnnnnnnnnnnnnnnnnnnnnnnnnnnnnnnnnnnnnnnnnnnnnnnnnnnnnnnnnnnnnnnnnnnnnnnnnnnnnnnnnnnnnnnnnnnnnnnnnnnnnnnnnnnnnnnnnnnnnnnnnnnnnnnnnnnnnnnnnnnnnnnnnnnnnnnnnnnnnnnnnnnnnnnnnnnnnnnnnnnnnnnnnnnnnnnnnnnnnnnnnnnnnnnnnnnnnnnnnnnnnnnnnnnnnnnnnnnnnnnnnnnnnnnnnnnnnnnnnnnnnnnnnnnnnnnnnnnnnnnnnnnnnnnnnnnnnnnnnnnnnnnnnnnnnnnnnnnnnnnnnnnnnnnnnnnnnnnnnnnnnnnnnnnnnnnnnnnnnnnnnnnnnnnnnnnnnnnnnnnnnnnnnnnnnnnnnnnnnnnnnnnnnnnnnnnnnnnnnnnnnnnnnnnnnnnnnnnnnnnnnnnnnnnnnnnnnnnnnnnnnnnnnnnnnnnnnnnnnnnnnnnnnnnnnnnnnnnnnnnnnnnnnnnnnnnnnnnnnnnnnnnnnnnnnnnnnnnnnnnnnnnnnnnnnnnnnnnnnnnnnnnnnnnnnnnnnnnnnnnnnnnnnnnnnnnnnnnnnnnnnnnnnnnnnnnnnnnnnnnnnnnnnnnnnnnnnnnnnnnnnnnnnnnnnnnnnnnnnnnnnnnnnnnnnnnnnnnnnnnnnnnnnnnnnnnnnnnnnnnnnnnnnnnnnnnnnnnnnnnnnnnnnnnnnnnnnnnnnnnnnnnnnnnnnnnnnnnnnnnnnnnnnnnnnnnnnnnnnnnnnnnnnnnnnnnnnnnnnnnnnnnnnnnnnnnnnnnnnnnnnnnnnnnnnnnnnnnnnnnnnnnnnnnnnnnnnnnnnnnnnnnnnnnnnnnnnnnnnnnnnnnnnnnnnnnnnnnnnnnnnnnnnnnnnnnnnnnnnnnnnnnnnnnnnnnnnnnnnnnnnnnnnnnnnnnnnnnnnnnnnnnnnnnnnnnnnnnnnnnnnnnnnnnnnnnnnnnnnnnnnnnnnnnnnnnnnnnnnnnnnnnnnnnnnnnnnnnnnnnnnnnnnnnnnnnnnnnnnnnnnnnnnnnnnnnnnnnnnnnnnnnnnnnnnnnnnnnnnnnnnnnnnnnnnnnnnnnnnnnnnnnnnnnnnnnnnnnnnnnnnnnnnnnnnnnnnnnnnnnnnnnnnnnnnnnnnnnnnnnnnnnnnnnnnnnnnnnnnnnnnnnnnnnnnnnnnnnnnnnnnnnnnnnnnnnnnnnnnnnnnnnnnnnnnnnnnnnnnnnnnnnnnnnnnnnnnnnnnnnnnnnnnnnnnnnnnnnnnnnnnnnnnnnnnnnnnnnnnnnnnnnnnnnnnnnnnnnnnnnnnnnnnnnnnnnnnnnnnnnnnnnnnnnnnnnnnnnnnnnnnnnnnnnnnnnnnnnnnnnnnnnnnnnnnnnnnnnnnnnnnnnnnnnnnnnnnnnnnnnnnnnnaccagaagagggcgtcagatctcgttacagatggttgtgagccaccatgtggttgctgggatttgaactctggaccttcggaagagcagtcgggtgcttttacccactgagccatctcaccagcccatggatcatctcttaaaatgcatttgtgtaagcctgagcttgaattccccagcacccatataaaaagcagggtgtgctgactggcacagacttgtaaccccagcattgaagaaggggtggagactggagggtcttgctggtccgccagtctagctgtattgctgaattaattccagattggttgagaagcctggtctcaaaaacaacctagagaagcagttgaggcaggcaataaatatcgacctctggcttccacatgcctgagcacccgtgtgcatgcacacccacacacaagcacttacacatatacgtggacaccccctctcaacacacatacatatacacaccaaacagaaaagaatatattagtgttagcatagaaaaaaaacttccatgaagtgattttatgcatgtgtgcctgtgtgcgtttgagggaaagaatgctgagtgactagctgcatgcttctcatgtggaatgtgtctctaagtcccagatgagggccagaccttacccttgtgtaaaataaaacttcctggctgttcctgccctggtgggtcctagatcttgcctgactggggacgaggaccccaacgagaaagcacagggcttgagggagaatcgagtgggtggtcttcagatggagactgctgagaagatatcaaacattcattaaattttagccattgtaggtgtcaaccctgttacatcctgttataaaattcagagctttaactggaagccagagccactgtctgggggaaagtgcccagccctggaagtggttcttatacaagtaccatacgtggagtctatgcagtcgttgattgatcccctccttcctggcacactggacctcttcaaattccctgtcttccctctccatcttcccttgaccccgcagccagttaagaagactgagtttaaagcaggaagcacagacctttgacagagctcttgtcctggctaactgaggaatgggcagagggaagacagagagcctcagagtcattaggtctccgaatgtgtacatagaggaggtcaggccgcggagaaatgcagtgcagatgtggcgcatgctcactggggggaggaaaaagatcagactgtaatgtagccgttctcagccttcctaatactgccaccctgtaatacaggtcttcattctgtggtgaccccgcaccataacattatttttactgctactttgtatctgtaatcttactactgttatgagtcaggatgtaaacatctgttttccaggtgacccccgtgaaaggtcatttgacctcccccaaagggtcatgacccacaggttgagaaccactgcttttgtgcctctccactctgcctgtatcttgtttatggactgagtttgcggtttggagagtacagaagccatctcggggacgtgcgggacgtgcgttcactctgagcccgtgtttgcttaacctgcttctcagtgggctgcctgggaacacggactctgcagtatgtgggaaatcacactttgagaagttccctcaatgccacgacccactgtctcagttctctgagatagagcaggtgccctttaagaaacaatactctatcccacaccacttgaccaggcgcttcagaattaataggtacgaagcgcaccaccgggcatgcgtggtacgtggtcacccaatcatatcagatcagcggcgcgccgaggagctgaaaccagacacgtggtgagcagacgtctccatccctgtgttttcgaaaaacatttgaagtgattcgcttcagctcgggaggtttgggaggattaaaccgggctcataaaagcatctaacccaagatgcctgccagggctgaatccgaccagtttaacctctgctagaaatagttcacttttacttttgttttgtttctttccttccaaagacaaagtttttaccatgtagcttcttcagctggccttgaactctccttgaccgcgtctcccctgccgactccggtgccagcctttgccaagtgtttgccaccacacccagcagcctcttaatattttgagagcttctggggagagagtgcccaattcattttattttattttactttttaaaaaagatttatttacttattatatgtgagtacactgtagctgtctagagacacaccagaagaaggcatcagatcccattacagatggttgtgagccaccatgtggttgctgggaattgaactcgggacctctggaagaggagccggtgccgttcaccgctgagccatctctccagccccattgcccaatttgtaaacatttttctttttactgtttattattattataaaatgccaactgtaataatctcgacacatgatgatgtcacctgattgtggattatctctcccttttaacaaggccctctgagagcatatggttttttggtgttcatttttccagcaagaagccaaacttagaaccgagtacagtggtgcatgccttagtcccagcactccaggggcagaaggcaggtgagtggatctccgtgaagcagagtccagcccggtgtacattagtgagtcccagggcagccagccaggactatgtagagagaccaagaggtgtagaatgcgcagttaggttgctttcccgtaggacagcctgagtcggagggtcctgtgcagcagtttgtgccttacttactgccctgggaactttgctttctgcgaggcttggcctttgggggcagaaggtcaagcctcagctgcctgtggctgtaccacctaagggcccggagccccgccaggcaggagtgtttgcactctcagcctctaagatgtccagaggtttccagctctgctttcctctcagcggctctgtttacctgggaaaatgatcgagttactgttgattgttagcgctcacaggtcgcagggttgggtttataatctctgctttactgggagggaggtagaaacccagagcgcacagtctggtcactagataccctgcacgctcactcaggcaggcctatgggggagatggtttgtgtcagtgtctctttttggggatttctgatgctattgtcattgtctccctgggagctggaaccatcggggaaccacctggcaatagattggaatccccagtacttggaaatgattaaattgaattatagaatgcaagattacttcttcacattgtatctatgctcaattcatcctttgaatgataagggaagttaagctcacctcacaatgtttaaaagttaaaggtgagatgggagggtcagagttcaagctcagtttatgatacattgtgtgtgtgagggggctggagagatggctcagcgggtaagagcactgactgctcttccgaaggtcctgagttcaaatcccagcaaccacatggtggctcacaaccacctgtaatgagatctgacgccctcttctggtgcgcccgaagacagctgcagtgtacctatttataataataaataaatctttgggccagagcgaacagggccaactggagcaagcagagttcctaaaaattcaactcccaacaaccacaggaaggctcacaaccatctgtacagctacagtgtactcatacacataaaataaataaatagataaataaatagataaataaattaataaaggccaacctaagctacatgaggtattgtcagaaagaaagacaacaaaaggaaggaaggaaggagaaagggagggagggacagacagacagacagacagagactgattgagactctcatcctgggtaatgttagggaattatcatggagtttcttgggtcttgtaatgttgttgttttgttgctgtttgtcttgtgattgtggccatgctagacaagtgcttcacgccaacctactgtaccccagctccagacctcaagctgaaggacttgggtcttcaaagacaaaacccagctctcacataggtaggggatcaaacccccacatctgtcttcatgaagcttttgttggaagggtgggctgcaagctgtccctcagtcctctcacagccacctgtgtagctcggggcactcacgtacctctgtggtatcaatgggagaggattgtggccagcagggtaacagaacagcagtggccatttgaaaactgtggtccccttctcagactcacagactagcagaggagttgagggtgacggcaggctcggcaggctcgctgaaaaataacgctgagtctgtgctgagctgggctcggaagggccggcaggactccagcccgaaacctcaaggctggtgcctttttcagagagcagcaggtgccgtcaagccctctggaggctgagctaatgcatcatctcgttccaaactccccgaatttgctttggctccagctttggcctggagggccggttttagaggattatggaggcccaggcctgcctggctagggaacctttaagccattgttaggtggtgctgttctgtttaacagactgcaggagctcatctctgctttacatctttcagggtttctctaagacacacacgagaaaggcaggtgcagcaaactttgccccagcccagagtaaatacttcagcatgggactgacggaactcgttatgcagcatagattgtttattctgttttaggatgagggaaacaagccacaacaaggaagatcggatttggctttctggaagcctttccccctttatccttccttccatctttgcttcccccttccctccctcccttcgaatggtgctgcactctaaagatatgaaaccactttctcagactcttctctttgctttttttcccttgaactattgaggtcggcgatggctaactgaaacagactctaaaaataccccctaacagcatgctaagtattttttctttgtctaaaattagcccattccagccgtgtgttctggttttccaaaaccctccattagctgccctggctactctctgtgggtttctgtgtgccgggcgacaagttgataagaagccaaccaacgactgactgactccacagagcatttattgaggtgcctcctccccaggacccttccctggcccttgctacattcattctgtgcccaccgtctgctcggtggcagctgcccccatcctctttgtggcacttctgtgtcccacatgagccctttagggctgagctcatgttcctttgcggtccctctgcctagtgcaactatttgctaaagtatttaagtgcagagtaaacatttgttggaggccaaggccggtccattaactaagcagcaggaagcaaaatattatttgttggtggtgtctgcaaagagatttgtcttttcacatgaaaatcaagaagttggggggcggggctgaagagatggctcggagtttaagagcactgactgctctgccagaggtcctgagttcaattcccagcaacctcatggtggttcacagccatctgtgatgggatcagatgccctcttctggggtgtctgaagacagtgacagtgtactcatacaaaattaatcacaagggaaaaatagaaaattaaggaggaaggaaaattagccaagaacccatggcccatggggctacaggtacaagacccgtcactggttagaaatgtcgggattggttgccccctgcctcctaggcactggctacttctaagacatatttttgtctctaaagtagtgtctttgcaagaattcactctgtcctgagcaatctccaggtgaatgcgggcacacctggttagcagttttcactggtcagtttctggaatcttgcttccgttgttttcccacgcccagtattttcttcctgctttgatttggaggcggggtcctaacctgtactttgacaggatttctgtcttatatattccatttttcaaatgtcggctgttctgagaggatcccattttatcccacttcccttgcctgcgcccatactcggttgagaagacagaagtaagctacagggagaccaagttctttccatctctgctaacagatgaagccgatggggaggggcatggtttgtctctgtcttccccaggctccgtttggctcatccaagtggggctggccatagctcagtggtggagttgcctgccaagcatgtaaaggtcccaggttcagtcccactcagcaaagtggggcgtggacatgaccccgggacggttctgtgtcttcccccattcacatagccatcctcatcagcagcaggaattttgctggttccctaggcttcaccggccacttggtagaaggggcacagttctgggtttggctgggcttcatggtcacagtcactgtgtgtgacattagcttttatttgtgcatctgtacagtgtcctgccttgggggttcgtggtgggtgggcttcagtgtgccatgtgtggcctggacctctgcttggtccccttgctgccaaggcatgtgtagggcagagtccagagtcacccggccaacctagcgtcctttcctccactcagcactgattcagctccggttgaggctgtctactgtagagtggtacttggctgcttattgctttgttaatttggaatggaaagaaaaacgttcctaagcaagtgaagtttaaaataggaaagaagttcctatatcacagggaccctaggccgactcggtctcacctggagttgatttgcagtcaggggttggttggacagcatcccctgtgtgaccctgaggaacgagtgtccttcatcctgatactctgacttttagaacatccctaagtgcctgtttgaaacatttagttttgtttgcttgttagaggactccgccaaggagttcccagggcaggaaatcgacagtttaggtgaaaaggtagaaaagacgaaatcctttacatcctcatggaaggagtctggcctgaacgagtgacattctttgcagtccctggtccactgtttccttagcttccacagtgcagcatcctgtgtccttgggaccgtttgctcaggcgatgccacacgagctgaccctcccttactgtcttcacctacttgctgtctgctctttagcgtggagagaagggcagcttccaaggtgcacaccagagctctgacttagactctccccggtgcacactgtccttcagttaaagccacctttccccccttcccttcaacaccggatcagcccagccctcccctgtctttgctggctgaccctctggacagtgggggaggggcagctgctgacacccccaccccccaccctgagtggaggaaaggtggagccggcttcctccgggctttcagcttcctgtgcacaccgctgtaggaggaaaaggagagggagggtgggtgagagagacctctgcctagaagagcctccccctgcaaagagacagtgaaaattacagacaaacactaataaaaacaaaaatacagacagccacccttcccggggcagctgcagggcagcctgtgtttataaattggccaattgtgtgacgttaggaaccaactattaattttggcagtgtgtgtgtgtgcgtgcatgtatgacaatatttctgtctatgaatatgtgtgcctgttgtgtgcatatgtatttgtgtgtgtccatgcgtgcgtacttgtgagtgtgagtgtgtgtgcgtgttttcacagacctcagagctgtggtttgctgtctctggcagctcatttctgctctctgtacgagcagctggctattagccttgcctagctggtgcctctgtttattttggggggcagtcggcacatgaaagtggaactcagttttactggtaaagtgctcagttgtcttatgattatttttgtttccaaggctatttattttttatacatgaacggccacttaacagccccagacttcactttttttcttctctgattcagccaaccagactctgaagaaggcttttgaaatgtttgtaattcttatatagtttttcttcacggaaaaagagaagtgtgtgtgtgtgtgtgtgtgtgtgtgtgtctattccagacctccccagatgaagggcaaactctgttagttagcattttggcatgcttccatatatgggcacttctttattaggtctcccaggctggcctgaaacttgctgagtagccaaggataacacagaacctgaccctctcctggctgtgctctgagtgctgggattgaaggcgtgaccaccacatcctgtttatgggtttccagggattgaacccaggactctctgcaggacttcctgcatgctaggcaggcaccctgtccactgtgctggctccccctccccttcccccctcccttgtgtttgtacttggtagaacagtagaatgtctggcttttcttttcatgcagagactcttccatgagctatattgtacttcaaaggacatgatcctagtcccatggtcctcctcagctcccagtacttgaaacggttttccaattttcttttttgttttctttttttaagatttatttactttatgcatgtgagcacactgtagctgtcttcagacacaccagaagagggcatcagatctcattacagatggttgtgagccaccatgtggttgctaggaattgaactcaggacctctgtaagagcagtcggtgctcttaaccgctgagccatctctccagctcaggttttccaattttcgaatgaactctttggtcatggctaggtaggaattctctatttgccaagtatagcatcatcgcccactccgattaccacacacttaaattaactgagtgcttctctggcaaagtaacccggcctccaccgcttagcgtgttctccgtcagagtgtgaagggtatgaggtagtgcctgggcagtaactgtgacaagattgagcaggcagagctccccagcccgccctggagttgggtgggggtggctacctcggcttgagaggttgtagaagaaaagcttttaggaagaagacagaataaggctgaggaatggagacacctcctaccttagtgtggaatggagatgtccttattctgagtccttgctgtaggcggtgccagagctctctaaggcagtaagtggtgggctagctcactcggctgggttcactagacactcatgagtctctctgtgaacagctatctctcctgtcatcccaccctcctggtccagccagcctgtgttctgacacactctgggtagcctatacctctggatccttcctgctttctcctcccacagagcaggaggcaggaagaacaacagggagctcccactgcagggctggctcctgggttttcttggctctcagagtgtgcaatccgaccctgttggcaaggagaagataattcctagggctgcaaagccatttttggagacaccaaggcacagcggcttgcaggcatcctccgtggccctcgttctggggacggcggtgtccttctgagatacgggccatcaagggattgcaagcaccttcattgtgtcttgctcttggcagaaggagtcagtattattcgagccatgccttttaagggctaggaaccagcttatcaaaagagccatcttggaggcggtgaggggtactccaaggggaacgttctgacaagggatggctggactggatcaatgggaactagtgatagaaacagtttaacctaaacctcctgtgggcttttcagactgtcacatttgtgtaaaagcaagctggtacggtggtaagtcttaggatctgctaggccctgggttcacctgtagcgtgactcattccttttggtgctgtggacctggggtgtatgagatcaagcaagcactaagatgcttaggttagcgtgttagcgaggctgcacaggggaggaatcagagctatgtaaatccaagccatagtggtgttcagtgtgacctcttggacaccatcttcctgacgttctggcatttatagttttgttccctgaaaactcagagtctatgctggagtaaacctccttttctatggcggtaacttacacttgtaacaggaagaggaaagacaacacaatccttcccacagacctgtttcagatcattttactttcagtctccctgtgcacagtgtgcatgcagtgcctgcggaggccagaagagggcgtcaggttccccctggaactggagttacaggtggttgtgagccctcatgtgggtggttgggttaagagaagccacttaaccactgaactgcctctctagcccccaatttctgatacacacacacacacacacacacacacacacacacacacacacacacaccggtgctgaggaccgaatccagggccttgtgcttgctaccactgagctaaatccccaaactcccaatttctgattctactaagacttttttttgttgttgttgtctttaaattaggtgtcacctggcaaagtagccagagttttgtttgcccatctctgcccttgactgacttttagatcctgctggtggtggagccacctgcagggtttctcagcaggtccccaccagccttccagattccagcattcctttctggctggtctccaaacgagcctgttcgatttcctttctccggaaccctggcctgaccacagagtttcaaaaggttgcatggcagctgtggcagtatgagatcttacctccagactctggccctgtgaagatttccagtgtccctgggctgacctgagatgggagagggagaagacccctgagccctggtagtaattgccctttgctgatggcgtgtgaccattggatggctccagggtcttcctccagattgcaccaatgagatgcttaatctgctagaatctggggcagcaggtctgttccttttttttttttttttttttttttttgcctctctcttccttcctagcttccaggcaccttcttattcttatttttctcagttaacttttctcatctccagcacacttgctttgtagtgcttgattagttaggggaacgttgcaggctgctagaatggagctttagatgatgtagggggacagaggccatagttcagggccattgttaatcaagaagcaggggcccttgagttgacgttctcataaagacttctggctctggggaagcctgcgctggcctctgcccaagtgccacctcacctgccacctcgttctttttttttttcttttcgagacagggtttctctgtgtagccctggctgtcctggaactccttttgtagatcaggctggcctcgaactcagaaatctgcctgcctttgcctcccaagtgctgggattaaaggcgtgtgccaccacgcctggcttgccacattcttttgctagttgcccaggcagattagccacatttgtgtgtacctggcctctctcttactttgttcacccaaaaaaaaccaagaaccaaattaagccagctatgagttgtgtcaccattcagaaatgaatagcatcgtagttgactccctttgaaaacgtttcaacctgcgatgtctgaggctgagtgtaatctggtattctttagggtcaggacctcagactggttcactcctggagagtcggggccacctccaagtttgttttctggctccaaacaactgagtggctgtttgccgactggcacgcgacccggttttaaaagcacaaccatatagggtagcggtggagtggtaagcagggctttaaagagtgagctcatggaaggaccagatgaagctctttcaatgtgcatcgcagctgcagttaatcttattaacgggttgggcctgggtgtgccagggtagttacggggtatactttgaagggctcttggtttttgatgtggatggatagcagaagcgtataaaacatggcgtctgatactgtaaagctctcatatgcctttgcagattcattaggttttgagaactgagcaagaacatcacattggttgataagacacgcaagaggctagagaggttgcaaatgcagactccagccaggcttcaggacccagtctgttgaataggtctcctgttcaggacccagctagtttgaacacagcactctcccggtagaaggtttaaggacacagtagggtggctgagaagcccaagggtgtcatgggtgctgaacctggctgtgtgtggtgcgggccacacctatgggctgctgttggtggggatggcttccgttgtgggctgggccttgaggaggggagttggcttgcggactgctggggaccaccaggtggcacctggaaagggtggtgacaggctgacagtgggaggctgtgttgaagttctgagcatactgcttgtaaggggagattgctgcagaccccagtctcggacagtagctgctgttttatttttgtagtatgtttagatttaactttcatttgtttgattgttttctgttttgtcttgttttgttttcaaaacagggttttcctgtgtagtcctggttatcctggaactcaatctgtagagcaggctgtcctggaactcaaaagatctgcctgcctctgcctcctgagtgctgggatttaaggcctgtgccacctcctggcattaacaaatatattaacacacacacacacacacacacacacacacacacacacacatatatatatatatacatatatatatatatatatatatgtatatatgtatatatgatagtctaaagtacctacctttgtcctctggtgtcattttgattgttaataagtaaccttggggacaaaggatgctttaaattaccaagtttgactgatgtatcttgggtgtactagtaacaccaccccctacacccctcccaggatacagactaagtgaacggttaataagacactagacctataacacaccatcatcagactgaaggtggtgaatggcaaactggaaggcagctgcatgataaagggaagaaaaaaatctgttcctgcataaagtgctggctgggtcacaattactcagcaccacgttcacagcattgcggaaagcctcttctttgctgggtgctcttactgatgccttagctgcagggcttcctagagcctgtagcattctaaaggccacgcacatttttattgggatgatgatgtgaggggcagtgtttgaggtacaagaggtgtgtgtgccctgtctatcacaggaccaatgctctgagggagacacagctcccttgacttctctggcacccacacttccatctgctcccagttttccatttgcctttctgcctgaggcagcggtgggtcgtctgttgctacagggatgactgggtgggggttgaccaggagagtgcacgctgagtatcttctggctacataggagggttgcctgcctaccagctgaattcaggcaagatagactccctaatcctcacgggactggaaatggagtgccagctctccgaatcttgccagctaaagaagtcttcccccatctggcaggacaacaatctcaacagcccagtggccagtcaagatcaacatgccaggaccacacaccaagagaagcacagaatctctctggacttggcacctgcgggtttgcacacatgactgcgctttggaggccacagagccatcttgagcatcacgggtgctgccttacagtctcccctcagtactgttgtgtgagccccagccggggttttcactctagcttctgttacattgtttcctgttacattgtttcccgttacattgtctcttggtgctttttgcctctcatcctttgttggcaccagcgagttgctttctacatttgtgctgtccagtggagcaattaaaagacgcttgcaattagtttcctcatttcacgcttcgaagcctcatgtgactcctgcctgctgtaggctcacacacacagcatggctgctggaaaggcggctgggtagttatggtacggatggaaaagctgacccttgaaaagacttgtagtgtctgtctccttcagtatcttagtcaggagtgttggagtgttagacaggcagccaaggtaaatacagatctgtccccctccagccctccttacggatattcacaggagttaagcaagacaggcttctggtccagagggccctcttagaaccttgcagctttggctctgtctgacagcccattctgcattcagcccatcccagggtctctctccggtttgcatacccaaaagacttcccaccaaagttgtctgctgcttgttctattttagaactcagtttaggagcgtgtacatgcgtgctttcagtcaacttggaatcagtcgtatgaggcatgcctataacccaagtactagatgtggaggcagggggatacccacagtcacatgcataacaagtctgcagccagcctgggatacaagagatcctatctcaaaacaaaacaaaaaccttttccccattccctaggaaaacaataatcttttgcttgtttggagacagggtttctctttgttctctatgtgccattgtagactaggctggcctcgaactcacagagaatccacccactgcttttgggggaggacttttttttttttttaaacaaaacaaaacaaaacaaaacatgtcagccctgcccctgcttgctctgcctctggtgaacttggtttttgtttttgattttgtttttttggttttttttgttttgttttgttttgtttttgtttttcaagggtggggattgagacagggtctctctctctctatgtagaccaggctggccttgaacacacagagatctgcctggccttgaacacacagagatctgcctggccttgaacacacagagatctgcctggcaccacttcagtgtgtgaccactttagaacttcagcaggaggagcctctgcagagaatggacctctctagtttggatccctgtgttaagttgcttttcttgtggctacaaccagatatgcatggccaaagcaactgaagggtggaagggcgtatttcccgccaagtccaagtgactgcggttggcatggggaggaacgtgtcatagctggagtcgcctggtcagtggtactcaccaggaagctgaggtaggggggtagcagggcttagctggcttatctccaacccctttttattcagtccaggacctccacttagtgggctcctggtgcccacatttggggtgggtctctgttaacccacttcgagcactgacaaacacacagtgcacacagtgtgcctcggtcatgtgtttctcaacccaaccaagctgacacttggaattaaccaccacagtcccatcatacactgtgttgcttcctccctggaaccaggtctggccggaatttatcacagttagtgcctggattcagttcaccttaattggccctgaatcccatctgcggccagggcccgctgctccaggaaatgggcctgttttagggtggacaatgctagatactttcttctgtgtaatcgtaagtccggaactcattctgtctctatgcaactgggacctgagacgtcaggaggcggtagcctgttttcagagctagaggtgagatgagaagtgggaattcatgatatcagtctaggctggacagaaagcacttgttggcctggtcaggttaccttcagctgttgtagactggaccccgatccattggcttcagagagcggtgcggtgcctgagagccaggaggaaggtgggggtgcaccacttaggttctgtccttctgtccttcctctatccttggacaatctgggtttttgtgttgttgttggttttgggtttgagttttttcttcctctaacacccagggaagaagatcagtagcttgcttctctttctttttccttttttaaactttaatatttgtgggtgtggtacacttaagaatggacacatgtttggagggtggaggcctccctcctgtggattttgagacagggtctctgttggctgctgctgcgaattgtgaactaactgtcttgctgtgttcagggaccgtcctgtctctgtctctgtctccatctcactacaggagattgcaggtgtgtgctgctgtgcccaactttctctggggattcaaactcaggtcttgatgcttgcaaggcaaacagcttacccaccgagccatgtccagagaccctcattccacagaacccaagaccttgggtgtctcacacagcgctgtacccatgacctatatccctagtcctgccttattatcttagaggaccgtggtgccaagtgaaacaatcaaccggtatgagtaggtggggccaggggagtaaagcaagcttcgccaggctgtcggccaggaggggtgggaaggcagcgatcacaaccacctctcacagcttgaaatctggcttggcaccagtgggcactaataaataattgtcgaatgatggctggtattgtgtcctctcgtttgtataaagtaggtattgtcttcacacatttcacagagatgagaaagccggagctcagagaggtcccgtgacttagaaggtggcagagcagagccatggtttcagacctaagtatgtgggacccataagtcagatttctttactatgctaaatcggaggtagtgatgggcatagtcatctccttggggcctcctttgaagctgcttgtgtttgctctttatggtttgagcttttgggttcttttgtttttgttgttgttgttgttgttgttttgttttgtttttgtttttccaagatgagctttctctgtgtagccctggctgtcctggaacttgctttgtaagtcccaggctgaccccgaactcacagatccacctgcctctgcctgtgccaccacaacccggctgtttgagcctttgttgttcagtggttttgcttttaaaattctggtgtagcttcagagttagccaggaaagtataagtgactcccaggtcctctcagacttgtagggggtccgtctatccttagaaagcctatgagaaagaatgcgccttggacgcaggctctctgtgtctgtgaggtaggtgggtgtgtctctcctgagaaagttcgctgttgagaaaacaaacagcctggaagtggggctccaccctggaagtgagtctgacccaaattacactcctcggacacggaggctgaaatgccaggggtgggtttagagttagaattttgcatagacgagctctccttgtggcctcagacagaaatgacttgtaccctgcccgacagatgctttggggtgtggtaccagcccctccctggctgccaagggcaacagccatgcatcattcacaggcggctgcccctacccttccccgcccttcccctcctgccctgcagtgagaatcctgtttatagtctgctgtgccactgcctaaccctgcctccaatctttgccatcttccttccccacccctctgctgccacccgaggcgcatcgagaatgtgcgtgcatttggagggttctctcccaggctggcagacaagagtgtctcgtaaaggcttaagcagtctacaagttgtccaaggttgtggtccttctccagctcgggcgctatgtggagtctgtcattccccaccccgcccccgccccgtctgtgcgctctgtgtctgcactatctgcagttgaagcacctgtgtttgccaggctacccaaggaacaggctccttgagacgggacagctgcagggagccctgggtctcttaccccaccctcctcaagcactgtatggtgggtacatgagtagataccccacccccagccccaacccccagtttattatttttaaaaacccagctccgggctgtcgctttcctaggatttactgtccggttgatcattgaatagcaaagtgctcaacccaggagcagtcccgtaggccctgagctccagccctcttgatgctttccagtcttgcctcggtttagtctctgagaagtaaagatagtgatctatctgccttcctcctctgccctcaggtgtgggtcatcctggggtcatggctcctttgatctttctcatagtgccagtgggcttctggtccgagggggcctaagccctggtccttttctttgctatcctctgcccccttccattcctttccttagaattctcgcccgcgtgacaccccggacctacatgcaatgatgtttgtgtgcagcgagtggtctgggggcccttcggcgtccttgatcccttacatggaaccccgtccctcccgcgtcctgagagagaacagccatcagatcagataatctttgcaaacagcgctgcgctcagatcagatcagatctttgcagacagcactgcgctcaggtcaggagctcttcagagatgacctactccagactggtcacttagcaggaagtgagcaaacagactcagagggtgagcaaggcctgaggcccagtggtagaccaaaggacgtcaacaatggagcctgctgttgctgggatgcttgcctaagagccgttctgaattcggcacggcattcctccagcgggttccacggtgaccattcctggtgtgtttgtaccattgccacacagtgaacaactgctagcctggagaatatccagccagccgtgagcatggtgctggaacaggcatatcttcatactttctttttccagtcgctccttgagtttgaacccgactgtacacatgctctttgcattttcaaagaaaatggtttgtctacaccagggtcttggagacctctcctgtttcctgtctataccacagggagactagctagctcattgtttgaggacgtgttaaatgaaatgcctgtgtggagatacaggctgccacacagttgggttagtgagcatccccaggctttgggatgaggctccactcagcagctaagtctcatctggcaagttaactcactcactaggctgcagttgttctgcgtggacaccggggtcattacgccagctttgccggtggattggagaatggcctgccatgcagtccagtgcctggtgtccttgactctccaggtgctacagttaggcattgtggacacatggctgcacctgttctagttaggtttctattgctgggataagatactatgatcaaatatgtcaccatccagagaagtcagagctccaggcaggaaccagtggcggagaccatggaggtctgctacttactggcttgcctggcttgcttttgtatagcgcccaagcccaccagtccatgtgtggctccgcccaccgtgggctgggtcctcccacatcaatcatccaatcaagaaaatgcaccacgtgcttgcccgcagttcagtccggggtggggggcattttctcacttgaagttccttttccctgcctccttctacctccttctaccctgtgtcaaactgacataaaaccaggtaggatatacacgcactgtttgaggcctttagatcctaaattattagtgaattctaaaggatcaggaaagaacttaaccagtaagtatttcccctttcatgttatggggaaaggccaaatagcatggtggggagagagtctggtcacttatatcttggcacagagactattgggaaggtaaatataccctctggtagttgtgcacagtctgacaggccggtgattactgctggctacttagttttcattccctcctttctgctaaggcacactgtacagctgtagagaccatgacattaataaaatggactcaggggaggctttgaggaacctctttaactacctcagcactcgggaagcagaggcaggcaggtctctgttagtagttctaggccagcctggtttatatagcaagttccaggccagccagggccacgtaatgagaccctgtctcaaaagtaagcatgcagatacacaaacaaccctcagagggagaaatacccagtagcaggtactctggggaagtatatttttcagaaggaacttagcaaagacagatttgcaggacaatatttagcaaagtgctgtttctagttactggtgggttgacttcattctgctacacctaggaagaacgaggcctgcttggcagatgaccctggtgttcctgatggtaaactagagctgcctgtgtctcggggagcaacgcacctggctgctcttctgtgggacacagaagaatcctggcttatctgcacgcttgcccccctttccccccgtggctgtccatgcatgatcagggtttgtttttcttctaggatgtggagaaagagaaggaaacgcacaattacctcagcaaagaggaaatcaaagagaaagttcataaatacaattcagccgttacagacaagctgaagatgaccttagtaagtactcctgcctgctgggcttggctctcacggatggataggggcagggtgctggctggggtgtgtgtgtaaaagtacaagctggcaggtttgatccctgaggcccatgaagaggccagatggggcggcacacagctgtaacgccgacactctacagagagatggagagttgtgcaggggctttcaggactggtagcctgggctacccaagagctgcggctgcagcagccatagcagggacagaatgagggaccctgccctgaccaggtgggaggtgtgagtgtctgacatgctgtgtatgctctgcactaatgagtgtagcagaagtgtcatctgctgtgtgtccccttgccactgggaataaagccagcctgtttttctagtgtcaacttattgctgacttgggtgtctcagagccctccacacaaccttccttcttgtggaagattggtgttgagctccgagctgaggtacactccaggcttcgaggcagcactggtctgacaggcgtgtgccacacaggactgtgtattcttcagtgggtgctgatccatcccagaaggttctggaagctcaaacctcagggctagcatgtttcctccactgcatctgccctgcagatcttgtatgaatttcccactgaggtagcccctctctgcactctttggtgtaagacaaaaaaaaaaaaaatgggtaaaagctgttcgccttcccgtgtgggttagatctgctccttttccagcctgctggccacccgctcagtgtgacctttcttcattcttcagaattccaatgggatctacactggcttcattaaggtgcagatggaactctgcaaacctgcccagccctctcccgagcccagcagcggtggctgcatgaacacgcttcacatcagcagtacaaacaccgtgggggaagtgatcgaggctctgctcaggaagtttctggtgaccgagagtcccaccaagtttgcgctttataagcgttgtcaccgggaagaccaaggtacgtggccacacctaaaatgagagcggtctgtctgttcctgcctctcttactcattagcagaaggacagctgatagacgccatgtctaactgtgtctgtcagaggccagggacagactgtggaagccacactctatctacaagcagatctctctgaatgctcctgttcgtattttgagttgaagagtgttaggcctgagggccctctaggcttctgtatgagacgactcgtgcggaggacttgctggtgtgctgcacagagggacaggtttggtgaggctgtggtagcaatgacagcagtgccctttgacatgccagagaacacttttgtggttgaagtttttggccaagaggtacctgtacagagctgggcagtggtggtgcacgcctttaattaatcccagcacttgggaggcagaggcaggcggatttttgagtttgaggccagcctggtctacagagtgagttccaggacagccagggctacacagagaaaccctgtctcgaaaaaaaaaagaggcacctgtacagctcacaggtaaaaacaaacgagtgctgaccccgggtctccctgaactcacacgcatgcccagtgggtagaacgaacattagactacctcaggaaatagactagaatctcctggggaaagttggaatggaagctggtgtctacgttccaagcaataagtgacagtcagctacttacgtcttccctgggaaaagcctaaagcagccatagtggaaaatgtactgacttggacatgacagtaatgtcctttagctgcgcagggtgacacatggcttttcccagcctgtacagaaagataggcaagtcagaagccataggctcagcannnnnnnnnnnnnnnnnnnnaaatatccatcttttttaaaatccaagtctttttacaattaaaagtctcttaactgtgggctccactaaaacagtttcttccttcaagagggaaaatatcagggcacagtcacaatcaaaagcaaaagtcaatctccaactgtccagtgtctgggatccaactcacgatcttctgggctcctccaagggcttgggtcacttctccagccatgccctttgtagcacacacatcatcctctaggctccagatgcctgtaccccactgctgctgctgctcttggtgatcatctcatggtactggcatctccaaaacactgcatgaccccttcagtcctgggccttcaattgcacacctttaattaatcccagcacttgggaggcagaggcaggcagatttttgagtttgaggccagcctggtctacagagtgagttccaggacagccagggctacacagagaaaccctgtctcgaaaaaccaaaaaaaaaaaaaaaaaaaaaaaaaaggaggcacctgtacagcttacaggtaaaaacaaacgagtgctgaccccgggtctccctgaactcacacacatgcccagtgggtagaacgaacattagactacctcaggaaatagactagaatctcctggggaaagttggaatggaagctggtgtctacgttccaagcaataagtgacagtcagctacttaggtcttccctgggaaaagcctaaagcagccatagtggaaaatgtactgacttggacatgacagtaatgtcctttagctgagtagggtgacacacggcttttcccagcctgtacagaaagataggcaagtcagaagccataggctcagcagcctggcggaggagcagccacctccaagaaactgcactgtggttgcatctgaagtgctaagggacacagtttttgcttgtcagcgactttgccagtgcaggtagatgtcagccacacaatctaaaatggcagtgtccagctgagccgctggccacccccctccccacccccatggatggcaaatctttgtatgtgaaagtacgtctgtgtacatccgtaaagacgcattgtgcttgtgggataagtgcctggcctgctgggtcttactcagtctgcaaagacgtttgctcctgggagttttggaaccatgttgtttggttgagatgttttcatggtttttaaaggggttaaggtccctcccccaccccaaagtgtcccatctttctgaagggagggacagacggaatcaccatagcacgcttgatgcaaattcctatttcatcttattcttggaactcatcgcttcctcttcaaggctcggtgtatactaggtttgtgggactgtgttgttagtgtgatcgaatggtgatctagaggctcggggagtctacctgttactgtggtgtgtcacgggtgtgtgtgggggtgtgtgtgtgagagagagagagagagagagagagagagagagagagagagagagagagagatgtgtcctggtgtattcatgtgagcatgtgcttgccacagtgcatgtttggagatcagatgacaatcttgggtgttggtcctctccttccttgttgctcactggtgacattactccccaggcnnnnnnnnnnnnnnnnnnnngaccgggagcacccgctgtacctacgtttggtagcagggcccagaaccgacacccttagttttgttcttcgagagcatgaaattggagaggtgagtgagggagaggtcacggtggcatcagatggccccgaacagctggcctgctttattgcttcaaggaggtggggggcggggcagcaaaggagagagattttgaatcacccaaagtgaacccctagttagcttacaggtatgattctcttagaatattatgtggccatgcgctcttcagaggtcagaggaaagaattcttacttacgctcacacagagagcagtgttcacctctttgtcccagttccagggactctaatcccagcctcaccttccccattatctgctgctgagaaaaggttcccaagagcaaggaaacccaacaagacgcgggcctggcatcccctcccctctacatccagtcagatgactcgggacttctgtttgcatgtgtcctcttctctccaaggacgacgtattggggtgcccattgaaaaccatttttgggccgccctgtatatcctccgtcagcgttcagcgatcctggtgcaaactctccagcccaggtctcagactcaggatgtgtgaggtgtcccgtggagcagttctaaagctgagagaacaggttctgctcgatggcctagtcaggagacctgggccacggatagatagatagacagatagatagatagatagatagatagatagatagatagatagatagatagatagatagatagatgatagatagatagatagatagatagatagatagatagatagggacccggaggcagagcctctggttattctagccttccactcagaaacggtctagagagtggtactgagcctcttttttgtttttgtttttgttttgaggcagggtttctctgtgtagccctggctgtcctggaactcactctgtagaccaggctggcctcaaactcagaaatccacctgcctctgcctcccaagtgctgggattaaaggtgtgcgccaccactggccagcttgaggctttcttaaagtagttcttattctcattattgtgtatgtgtgagtgcattttgcgggcatgtgtaccacagcatacgtgtggaggacaacctttacatctcaggggcatgtgtaccacatgcagacgtggggagctgattctctgtggggttgactaggagaggagggaagccataaaaccaatactcaggactgtgaggcaggaggatcgtgaggtcaaggctagactgtacaacacagcaaaaccttgccctggtggtgggaaggggggcccaccctcccttggtttcggggagaacactgaagtgatcctgtctgcattattcctggatccagtcatggcgtcttcctctttgtccctttgtcccccgacagtgggaagctttcagcctaccggagctgcagaacttcctgcgcatcttggacaaggaagaggatgagcagctgcagagcctgaagcggcgctacacagcctacaggcagaagctggaggaagccctgggcgaggtgtggaagcccggctaaggccgagggctctccctgcccggaaggcactgttctgggacgcacaagagagtcgcgttggttgcctctcttctcagagagctgtcttcgtggcccggccactctagggtcttcctcttttctctgtagacacagttgtcaaagcctggtcacgcagcatcttgcgcctcacgagggactggcacaagggactccacaagcttgttctgttttggcatggcgatgttacctctcgcaagctgtgagcctttgggcatcaggcatcccagcgtgcttggaagcatgagctctgggctgaggccccctgtcttctactagttactttagtgacgtgattctggtaaccttcaggatgcaaagatgagctttaaggcttcactaagcaaccgctaagaccgtgttctacggtgaaactacctgcatgttttcattctctgttggagcagccctacccacctgaactgaaggacacaggaatttaggaactctgggggactgggaaaagagtttggaagagttttgacaaagaaagtagagagcaagtcgggaaggtagagggaaggtaagggcccagggctcggggaggtagtgtggcttctaagttagcgttagaggagaaaggtgtatttgtctgtaaaagagctaaaagcattcagggtcaatgttgagcttggttaaagattgcttaatttgctagtggtaaaatgtggggtcagagccaaagagccaggagctaagcccaaagggatccacaaactgcagccgacccgcagtggatttaaccttgaccgaggtggtccacaggtaggtgtgcctcagctggacctgacctgtgtatctgttctgagacccactggttctggacccgctggttctggacccgctggcgtggagcagatggcctggggtttagcttctctgtgtaggtggggcctggccatgtgctgatccctgttaatgtaggttctcaccccacccccacccccacacatagaggttgctctctgagttaaaaaggagtttgggtaggggcagctgcttcccctcagctgttagctagaaagaagatgtagcaaggccagggctcacagcacactttgtgacaatcaccctcttccgtttattgcatcctcctttcctctgcccctttcccctgcttcccccctaccctgcctcccagccccaatcactcttcaaagttgttcttacaaagtagaagacagggatgttgattaaaggccgggacctactgcatccttgcctcttcagagacttaactaagggccccaaggaaggaaagtccacacccagctgactgcacaacagtgttaattatggaactattttaacacaagcgagcatgttccttccaaccaaagagatgcatgtgcaatagacaggcgcaatggcctcactttccacagcagcttgcaaatcggagagccgagggaagggtgttccgattccggaggggccttacggttggtctgcctctagtctagataggttttgttgtttataaattcccaaggaattgttaacacggtgacacccgatggaatcgtttggaaattccaaggtgccccagctcttagcctttctatgaaccgtgccttctatcgagaatctgtcccttggaggtggccctcctgacttgtcagagaatgtcgccctgtgggaggcagatccaagtgtgggttatgctaatgcaagctccctggacaatcggatcttctaagctattagaaagagttgggaaaaaaaaaaagtagagctagctataaaatatgaatggcacatcttgtttaattttgcatgtgatttcttttttcgtgcatcaatgaggtttagtgacattgtcatccaacacgctgcctttgttgttcagggaatgccttcgtggttcttgtactggttttaccattgggtttgtgtatgctgccaccagccacctggtcttctgactactcctcccagtgtgcctagcgtttgtgaggcattggtttctctgattaagacactgttagacgctaaagtagcagctgatgggtatctgtgaattttttttttttttacttgaagtagactgtatgaagcagctccctcctccgtatgcctccaaacctcgctcgatggcgtgtgcacttcacctgaagatctgccagtccgaggttcctgaagaccgatgttctcgctcaaacactggttactacagcagccgttgttttaaagcataaaggaagaaaaagcataaaggaagcataaagcataagggaagaaaaggagccccagaggccaaagagatatatatatatattttttaaaccgttgttcagatcctccggtaaagcgaaagccagctttgctataatgctgttttctcttcagaatgtgatggtacagggatggtggtaaatgaagggtggcgcagggaagcttttaaatctaaagtgaaaagctatatttataatgttgaggactttaagttttatttttatagggcagatttttttttctcccctgaaattgtgtctggaatggcaaaattgttcctattattaaaaattgaagttgttagttgataaatttgtatgtctttatttatgataacatgctactatatgtgtaatatatatgtgtgtgtattttagtcacagttttggaacaagcttttttttttagaagaacattccataattcagtaatgtttacaaagatatggttttggctttgtgtttttctggagagggggcgcacactttcccaaatgtcattgttctttgttattctacctccatgtctgcctgtcctgcacattgaaattgttttccctgtgaaaacaaatgtatgccttgggaacccatcaaaaaccacgcaaacaccaaaagagctctcgggacacagacttctcgttcctcctgccagcagaagcaggccgtcctcagaggccccggtccacccctgccagacttgacttgccgggttttacctgcaagaagccacctcaacagcagggcatgtttggttttagattcctgcaactgtttgtacaaatgggttggacaggttgtcttggattcgtcttcaaggctgcataaggtgttctctcagccatgctgccccctggaggccatgagaggaacagctttttttgtttttgtttgtttgtttggttttttttttttttttttttgccaaactctttccaaagatcctgggtaggaggcacttccacaggactcccggctccttactccctcccccaagacaaagcatagaaatgagaatttctcttcactgatgaaggtcgtggaagcaaatcttcctgactctttgtcttggagctggccctaaaggaaccatcatcttgtgagactggagaggtggctcggaggttgaatagtgttggctgcttttccagaactgaaaaagataagtccccaagcaaccaaacctgggtgctcacaaccttctgcatgtgactcagtctctagggagatcccgggtctctggcctctgtgggtaccagcactcaacgtgccacacccaaacacatgctcataattaaaaatgaaaacgatttagagaaaaggaaatgcccttgggttgagttctgtactggctggttttgtatgtcaacttgacacaagctagagttatcacagagaaaggggccttagctggggaaatgcctccatgagatccagctgtggggcatcttctcaattagtgatcagtgggagagggcccattgtgggcagtactatccctgggctggtagtcttgggttctataataaagcaagctgagcaagccaggggaagcaagccagaaaagaacatccctccatggcctctgcatcagctcctgcttcctaacctgcttgagttccagtcctgacttcctttggtgatgagcagcaatgtggaaagtgtaagctgaataaaccctttcctccccaacttgcttcttggtcctgatgtttgtgcaggaatagaaactcttagacaagttccatctccgtcactatgtcaatagtaatgttaatacaaataacagtaaattatttgaagtgtagcataggactccgtttcaaaaggggtcctgcctcttggctgtaagaaagctaggcggctggcacacagaggaagagcagcctggagagccgcgccctgctgggctgattctgcttcactgaatgcttgtgtagtgaaggctccttagcgctccacaaccgccccatccccacttagagagcttggagagtagagctcttgcccagtgactttcttcatctgtatcttttgtaataagccagctcatacaggtgggtatttcccagccttctgggggctgtcctagtaaaattaatctgaggagggggccaagggagcccagatttatagccatgtaaccccggaccttgttagtgtctagtgtgtagtgagttggggggactgggcaggccctcagccgtgggtagcactacaagaggccatcttgcgggtgttcgctgcagggttccttgcttgctggtggggagttctcacagtttcgaggctcacacgatggatcagtgttgtgagtgtgtaacacacaagagggacagacttctgagagatttggagaagggtagaatacaaatgctgcattggggtgctgtcaggtagtcctaattgggtgttttgttttgctgaaaggggaaacctatatctggtacaacctatatcaacatgtcaactaggtgctaatcacgtaccaagccttattcaaaaggccgacagtatagtaacagtaactatctacttctcagtcagttaatgcgaatattacactcatagttgagtcccaaggtggggtgtgagtgatgggcaagcctttgacagcccagcttcttggtcatcttgttctcaagttccaaagtgtttagagcaaacactacctcccctctggggggcagacaggaaagcaggtttgtgctggaagaggggggcctttccactcactcagttactggtgagcttcagttatggaaatggttgtattaggacctgtgggtcatggcccctgtgggagtcgaatggctgtaaatatctgcatatcagatatttacgttataactcataatagtagcaaaattacagttatgaagtagcaacaaaataattttgtggatggggagtgtacaggctagttttgtgtcaacttgacacagctggagttatcacagagaaaggagcttcagttgaggaaatgcctccatgagatccaactataaggcattttctcaattagtgatcaagggggaaaggccccttgtgggtgggactatctctgggctggtagtcttgggttctataagagagcaggctgagcaagccaggtgaggcaagccagtaaagaacatccctccatggcctctgaatcagctcttgtttcctgacctgcttgagttccagtcctgacttccttggtgatgaacagcagtatggaagtgtaagccgaataaaccctttcctccccaacttgcttcttggtcatgatgtttgtgcaggaatacaaaccctgactaagacaaattggtaccagcagagtggggtattcctgtgacaacctgaccatgttttggggagggctatggaaggactttggaactttgggcttgaagatccatccattgttaagagctctgtcagatgttgtgtaggagcttggaagataatgttgagaacactgcagaagatggaggtttggtttgtgaaatttcagagggaaaattaaagactcttttcagggccattgctgttttgattgtgaagattgtgtagttctggttagctggggctgaagaatcagctgtgattaacaagataccagaactactaaagcaaaaactttgcattactgggactattgatgctggttagctggagctaagaaattagtggtgattaagaagagaccagcatcattgaggtgacatcttctgggaagtgttttctgaaagcacaaagaggctgtgttccagagatggccaaggttgtactcctgctgcagcgggacttggtaatatgtaagggtcacccaggtggtactggttttgaaggcatgaaggggtcacacagagcagctgaggctcggcactgtgagaggccatggaaggtcattggtgaaggtgcaattgaaggtccaggactgaaggggtcatgcagtgttttggagatgccagtaccatgagatgaccaccaagagcagcagcagcagtggagtacaggcatctggagcctagaggatgacgcgtgtgctacaaagggcatggctggagaagtgacctaagcccttggaggagcccagaagatcgtaagttggatcccagagattggacagttgtagattgatttttgcttttgattgtgactgtgccctgatattttccctcttgaagaaactgttttagtggagcccacagttaagaaacttttaattgtaaaaagactttggattttaaaagagatggatattttaaagagattgaaattttaagaatatgtaaagactgtgggacttttaaagttatttagatcttggggatgaataagaatgtaagggttgaggcttactagtgatgtgtttgtgtgtcaagttgacaaggggtcaattgtacaggctagttttgtgtcaacttgacacagctggagttatcatagagaaaggagcttcagttgaggaaatgcctccatgagatccaactgtaaggcattatctcaattagtgatcaagggggaaaggccccttgtgggtgggaccatctctgggctggtagtcttgggttctataagagagcaggctgagcaagccaggtgaggcaagccagtaaagaacatccctccatggcttctgcatcagctcctgcttcctgacctgcttgagttccagtcctgacttcctttggtgatgaacagcagtatggaagtgtaagccaaataaaccctttcctccccaaacttgattcttggtcctgatgtttgtgcaggaatagaaaccctgactaagacagggagtcaccacaatgagaggaactgtatgaaagggtcgcagcgttaggagggctgagagccaccgatttaggggctaatcctgaaatacagggcaggaactgtcctgcttttcctttaaggtctgttgcctgggaggagtgggcagggcagggcaggggaccattcattcctagtgttcctcttgtaattggtcagaaaattcctagaacaaccaggaaaggaaggcaagccactcaaagctgcagtgggctgagccgctcagccagtcccgagacaggcaccatccttagcaaaggaccgaaaaatttcgagttctccctgtgctgacttccgacgtgaaccgcaacttgcttaatttggtgttctagaaagaatctctgctaaagagtcaagggtggagaggaaggcccggtgagagcctggagggcgggccagctatggagctggctcacctggtcgtctgcacggtggggttaggctctggcttggtctctggtctggtttcctctggttttgctttgctttttggggaaccactcccagtcggtctgtcataggtgataagattgagaagcagtttgtgctgtaaagctctggtttctgagagaaaatccttcgaagacttcaacgagggagctctttttagacaaggcagacctctgcaccagtgcagagactccgccatcttaacatcctgccagccccataccttggcaccgagctccccgaagctcctgtctttgtttctgaggcaggtgagatgggacttagaaatgtttattcacacagcagcacaggactctaaatttttaagggattatctttgttctggggagggaattactttagccaatcaagtttgtgataactttattagtttgttttgttttgtcttttgagacagtttctacatattccaggctgtcctggaactcactctgtagaccaggctggccttgaactcagaaatccgcctgcctctgcctcccaagtgctgggattaattaaaggcgtgcgccaccaccacccggcccggctttttctttttctttttttcttcttttttctttctttctttcttcctttctttctttctttctttctttctttctttcttttttttttttttaaagattttattttctatatatgacgagtacactgtagctgtcttcagacacaccagaagaggccatcagatcccataacagatggtcgtgagccaccatgtggttgctgggaactgaactcaggacctctggaagagcagtcagtgctcttaaccactgagccatctctccagtccttaaaatgaaacttttaaaaagagctaacacaaggtaacacttgcagggtgtggggtgcaagctggtgatttatatttcgttgcaatccacccattttgtctctcttccggcattctctgtcaccttcaattttgacttaagagaattttttatcttagccagacatggttgtggaggccaagcaaggtgtgcgagccagagggaactggatctgtggcgtggccactgccaagtgtcttgtttgtattttaaaagttgattcttacagaaggaaattgatttaaacacagaacactcacaactgtagggtgattggccttccgctgtattcgccagagaggcagtaacaaaacttagattcaaggtacctggagcagtggggccgccgggctctccggtcttttcatggccaaggtgatgctaatgctgagtgatccagaccacagctggaggcctcaatcgttgttttttgccaatctttgtttccatgcctgtaaactctcaccccctccctaagtgagagtgtggaagcttacctttattaccccagcacccctgaggtggggggggggnnnnnnnnnnnnnnnnnnnntgacagaccgactgggagtggttccccaaaaagcaaagcaaaaccagaggaaaccagaccagagaccaagccagagcctaaccccaccgtgcagacgaccaggtgagccagctccatagctggcccgccctccaggctctcaccgggccttcctctccacccttgactctttagcagagattctttctagaacaccaaattaagcaagttgcggttcacgtcggaagtcagcacagggtgggggggaaggggcaggggcaggggcaggacaggggcggagcctggggaatgtagcttcaaggctagcctgggctccatagtgaagtccttcctgtctgaatggctctcagggattgtcacaagaacaaaaccaggttggttccctcagttggttatttccttgaagccaagcattattttcggggggggggggagctttgcatctctcctagcaggggggacttcccaaaggtgtgacaacagcttcctgggcagcttgtcctcctcagacacacacagttgcagcttatggcctgtgtgactgtggcttttgccccagctgagctctgcctgggcagcactttggggcattgtagggaggacgcaggaagccaggatcgtaagacgggaagcttctctgttctcgttctgtgagagggctcgccgtggccttgtgggcttcatgtgcaagcatctgggagagtgcagtagaagactgaggcagccttgggaggtgacacagccttagtcgacactcattccagctccctaggaagcaaccaaggtgtcacactgaccggagtccatatgcgggagatgccagagctgggaagcaaggccacacagcttaagtcgtaggggcgtgggcagaatagaatcaccatgtgtcggagctgctgccatctcggctcgcagaggaggccagggcagtgccaacaggtgctcctgccttgggtcagaggcttttggaaaccacggagaagtcactggagagaagggtggtctgtgatgagctgccagccagggatcccattaaaatattttccaacatatgctgggtacatttagcaaccaatccacaaagacacatctaccctctttagtaacaataggctaggactcgtgtttatttatattcctgggtatgtaatatgcatgcacttagtgggggcggtggcagggattaaacctagggcttggtgcacagtgggcaagtggtaggcagcactgagcaacatggtcagttcctgtcgtcccccccccccccccccgagaagttctgactatgtactgcaggctcctggaatgctctaaccctttggttttgaacttgtaatcctcctgcctcctggaagataaggactgaggaagaaagaccacaaattgtcctaatgctggggctacaggcacaggtcattgaagctggacaatgtagttgtgtcctctttggggagaagttgaacgtttaccattggccggctttgctctgctgcaggtacctgtaatgaaagaagccttggctaacaggagggacaaatcctgaagattgcagaacgagcagagtgtagcagaaaactggatttggggccgaggcagaagctcagtggaggagcggggacttaagctgtggaagggttcagtcctggcagccctcctgtcttagtctgggtttctgttgctgtgagaaaacaccagaccaacaggaacttggggaggaaaggctgtgcttcatcttccaggtccttgtccagcatcccgagaagtcaggacaggaactcacacagggcaggaacctggaggcaggagctgatgcagagaccatggaagggtgctgctttctggcttgctcctcatggcttgctcagcctgctgtcttataccattcaggaccaccctcctagggttgacacctcttgatttatttattattttttatacactcaggactgtggtaccacctacagagagctcacatccattatcaatcaagaatacaccacgggctttcccacaggtcattctggtgggggaactttctcagttgaggttccctcttcccaaatgaccctagcttgtctcaagtcaaaaccatccaacattgcccttcccaatctgaacccccatccccacctctgacccttttcagacagttttgctatggcctagaactcactacgcagcccggcctgacccagaacatcagcagtcgtcttgccttggcctctcagttgtggggattacaggtgtagcatcatcaaccccaactttattctttttttttttaaatttatttattacatgtaagtacactgtagctgtcttcagacacaccagaagagggcgtcaagatctcattacagatggttgtgaaccaccatgtggttgctgggatttgaactctggaccttcggaagagcagtagggtactcttaccaactgagccatctcaccagccccaaccccaactttaaacctggatctttgaagtcctggtttgtttgtttctcttttcttttcttttcttttcttttcttttcttttcttttcttttctttctccctttctccctttctttctttctttctttctttctttctttctttctttctttctttctttctttctttctttctctctctctctctctctctctctctctctctctctctctttctttctttcctaccgagaatggctctttattttcggagcagaggttggagctggccacagtgggcctacagtccccatcctctcgtgtccaagaggccagcctcggtacctccagcttcagtgcgaggagaggagtatttccccccaaggagggctggagaacagccacagagggctttctgtagggcctacaggaggcaagactttaggacaggtccaagggcaggcttccttcccgtcacagccttcgagccttcaagccttccggggtcagcagccattgtgtgggacaggggtgttgtctgtgactgagatcacttcctgacctccccctgcccccgctccggtcagtcctttggtggcagaccaatgtcctggtcctatgtctttcactatgactctgccgtgggtcactccctttcctgtggcctttgctgctgcagcttttctggatggtgatgggtagaagtcacaggatgcaactttccagagggcggcatccactttttttttttaatgcatctgagcacactgtagctgtcttcagacacaccagaagagggcatcggatctcattacaaagatggttgtgagccaccatgtggtggctgggaattgaactcaggaccgtctctccagcccctggatccacttttaaccctcacctgaagtgacttgagccacttccttttcagtactctgcctggcagctgagtcttctaacctctgggctctggtgtggatattcttagctggggcaatggccacaggcctggtcatcccaggtccagcccaggactgcaggagccacaaccctgaaatcctgacttctatctttagtattttactaagtagctttgtgagccttgaaaaattcagctgaagggggtcagggggtgggaatctgttccatgagttttgctgttttgagacaggtactcaccatgtaact

SEQ ID NO: 80 - DNA, 3581 bp, Mus musculus
gggaccagacggcggtttgagcggcggctgcagctgcagcaggacggcttgccggcggctcggggccgcgcgccgggaacctcacggggcgggcgggcgccgcaccccggcctggccgcctgcgccccggggaggccccctgcgcgcaaccggaccagcagcatgagcagcggctacagcagcctcgaggaggacgaggactttttcttcaccgccaggacctccttcttcaggagagcgcctccgggcaagtcccgttcgggtcagccggatgtggagaaagagaaggaaacgcacaattacctcagcaaagaggaaatcaaagagaaagttcataaatacaattcagccgttacagacaagctgaagatgaccttaaattccaatgggatctacactggcttcattaaggtgcagatggaactctgcaaacctgcccagccctctcccgagcccagcagcggtggctgcatgaacacgcttcacatcagcagtacaaacaccgtgggggaagtgatcgaggctctgctcaggaagtttctggtgaccgagagtcccaccaagtttgcgctttataagcgttgtcaccgggaagaccaaggccagggacagactgtggaagccacactctatctacaagcagatctctctgaatgctcctgttcgtattttgagttgaagagtgttaggcctgagggccctctaggcttctgtatgagacgactcgtgcggaggacttgctggtgtgctgcacagagggacaggtttggtgaggctgtggtagcaatgacagcagtgccctttgacatgccagagaacacttttgtggttgaagtttttggccaagagtgggaagctttcagcctaccggagctgcagaacttcctgcgcatcttggacaaggaagaggatgagcagctgcagagcctgaagcggcgctacacagcctacaggcagaagctggaggaagccctgggcgaggtgtggaagcccggctaaggccgagggctctccctgcccggaaggcactgttctgggacgcacaagagagtcgcgttggttgcctctcttctcagagagctgtcttcgtggcccggccactctagggtcttcctcttttctctgtagacacagttgtcaaagcctggtcacgcagcatcttgcgcctcacgagggactggcacaagggactccacaagcttgttctgttttggcatggcgatgttacctctcgcaagctgtgagcctttgggcatcaggcatcccagcgtgcttggaagcatgagctctgggctgaggccccctgtcttctactagttactttagtgacgtgattctggtaaccttcaggatgcaaagatgagctttaaggcttcactaagcaaccgctaagaccgtgttctacggtgaaactacctgcatgttttcattctctgttggagcagccctacccacctgaactgaaggacacaggaatttaggaactctgggggactgggaaaagagtttggaagagttttgacaaagaaagtagagagcaagtcgggaaggtagagggaaggtaagggcccagggctcggggaggtagtgtggcttctaagttagcgttagaggagaaaggtgtatttgtctgtaaaagagctaaaagcattcagggtcaatgttgagcttggttaaagattgcttaatttgctagtggtaaaatgtggggtcagagccaaagagccaggagctaagcccaaagggatccacaaactgcagccgacccgcagtggatttaaccttgaccgaggtggtccacaggtaggtgtgcctcagctggacctgacctgtgtatctgttctgagacccactggttctggacccgctggttctggacccgctggcgtggagcagatggcctggggtttagcttctctgtgtaggtggggcctggccatgtgctgatccctgttaatgtaggttctcaccccacccccacccccacacatagaggttgctctctgagttaaaaaggagtttgggtaggggcagctgcttcccctcagctgttagctagaaagaagatgtagcaaggccagggctcacagcacactttgtgacaatcaccctcttccgtttattgcatcctcctttcctctgcccctttcccctgcttcccccctaccctgcctcccagccccaatcactcttcaaagttgttcttacaaagtagaagacagggatgttgattaaaggccgggacctactgcatccttgcctcttcagagacttaactaagggccccaaggaaggaaagtccacacccagctgactgcacaacagtgttaattatggaactattttaacacaagcgagcatgttccttccaaccaaagagatgcatgtgcaatagacaggcgcaatggcctcactttccacagcagcttgcaaatcggagagccgagggaagggtgttccgattccggaggggccttacggttggtctgcctctagtctagataggttttgttgtttataaattcccaaggaattgttaacacggtgacacccgatggaatcgtttggaaattccaaggtgccccagctcttagcctttctatgaaccgtgccttctatcgagaatctgtcccttggaggtggccctcctgacttgtcagagaatgtcgccctgtgggaggcagatccaagtgtgggttatgctaatgcaagctccctggacaatcggatcttctaagctattagaaagagttgggaaaaaaaaaaagtagagctagctataaaatatgaatggcacatcttgtttaattttgcatgtgatttcttttttcgtgcatcaatgaggtttagtgacattgtcatccaacacgctgcctttgttgttcagggaatgccttcgtggttcttgtactggttttaccattgggtttgtgtatgctgccaccagccacctggtcttctgactactcctcccagtgtgcctagcgtttgtgaggcattggtttctctgattaagacactgttagacgctaaagtagcagctgatgggtatctgtgaattttttttttttttacttgaagtagactgtatgaagcagctccctcctccgtatgcctccaaacctcgctcgatggcgtgtgcacttcacctgaagatctgccagtccgaggttcctgaagaccgatgttctcgctcaaacactggttactacagcagccgttgttttaaagcataaaggaagaaaaagcataaaggaagcataaagcataagggaagaaaaggagccccagaggccaaagagatatatatatatattttttaaaccgttgttcagatcctccggtaaagcgaaagccagctttgctataatgctgttttctcttcagaatgtgatggtacagggatggtggtaaatgaagggtggcgcagggaagcttttaaatctaaagtgaaaagctatatttataatgttgaggactttaagttttatttttatagggcagatttttttttctcccctgaaattgtgtctggaatggcaaaattgttcctattattaaaaattgaagttgttagttga

SEQ ID NO: 81 - protein, 328 aa, Mus musculus
GTRRRFERRLQLQQDGLPARRAPGTSRGGRAPHPGLAACAPGRPPARNRTSSMSSGYSSLEEDEDFFFTARTSFFRRAPPGKSRSGQPDVEKEKETHNYLSKEEIKEKVHKYNSAVTDKLKMTLNSNGIYTGFIKVQMELCKPAQPSPEPSSGGCMNTLHSTNTVGEVIEALLRKFLVTESPTKFALYKRCHREDQGQGQTVEATLYLQADLSECSCSYFELKSVRPEGPLGFCMRRLVRRTCWCAAQRDRFGEAVVAMTAVPFDMPENTFVVEVFGQEWEAFSLPELQNFLRILDKEEDEQLQSLKRRYTAYRQKLEEALGEVWKPG

SEQ ID NO: 82 - DNA, 104451 bp, Homo sapiens
  misc_feature (1)...(104451): n = A,T,C or G
tatatctttgccaaaaagatccaaatgttgaagtttggattttgttttttttctttctcatttgagggaagctagaattctccactgcttccattcaccatatatgcatcatctttgtagcgtgactgaaagaattaacaaaaatttttaactgtgacctatatgtacgtaataatagtaagtggaaattaccaacagacatcttagaccccagtggttttgtgtggttttagaattttttatttatgaagctataacttagagttttaaaacattgttactatatttggtttctcaggcttaaattgatttctgtctttttctgattcgattactatgggaaatcagtttttagatatagaggtgctatattgctttctcctttcttcagtcttctcttaatgtcattgtaaccttccatagtgcccaaaacagggtcatattctatttttatccatctaggccttatttaaactattttaggctgggtgcagtggctcatgtctgtactccgaacactttgggaggccacagtaggaggactgctggagctcagtagcttgagaccagcctgggcaacacaggcagaccatgcctcaataaataaataaataaatcagctgggcatggtgacacacgcctgtagtcccagctactcgggaggctgaagcagaaggatcaattgaacctgggaggttgaagctatagtgagccatgatcctgccactgcactcagcctaggtgacagagtgagaccttgtcttaaaaatatgtaataaaaaatttaaaaaatagaaaccattctagtagttattgctatttcaaaacaaaatattttctacaaaattgttcgtgagagtctgctttactaccatgacttaagttttcagaagctttaggtctgaggccctgctctaacgccatcatctatggatgaagatcctcatagtattaaaatgtagttgtttaaaaaatttcaattaccatctgcctttcagtttattttactataaaattaagaatatgactgggcttggcctgtaaccccagcactatgggaggctgaggtgggtggattgctagagcccaggaatttgagaccagcctgggcaacatggagggaccccgtctctacaaaaaattagctggcgtgatggtgcgtgcctgtagtcccagctactcaggaggccgaggtgggaaggtcccttgaccctgggagggggaggcttcagtgagctgtgatcaggccattgcactccagcctgggcaagagagcaagactctgtctcttaaaaataattaagaaatataaggccgggtgcagtggatcatgcctgtaatccccgcactttgggaggccgaggcgggcagatcacgaggtcaggagatcaagaccatcctggctaacaaggtgaaaccccgtctctactaaaaatacaaaaaattagccgggcgtggtggcgggcgcctgtggtcccaactactcgggaggctgaggcgggagaatggggtgaacctgggagtcagagcttgcagtgagctgagatcatgtcactgcactccagcctgggtgacagagcgacttcgtctcagaaaaaaaaaaaaaaaaattaagaaatattccatgcataggccaggtgtggtggctcacgtctacaatcctggcattttgggaggttgaggtgggaggattggttgagctcaggagtttgagactagcctgggaaacatagtgagacctcatctctattttttttttttaaatattataacagggccaggcatggtggctcacgcctgtaatcccagcactttgggaggctgaggcgggtgaatcatgaggtcaggagatcgagaccatcctggccaacatggtgaaaccccatctctactaaaatacaaaaaaaattagctgggcatggtggtgcacacctgtagtcccagctactctggaggctgagacaggggaattgcttgaacccgggaggcggaggttgcagtgagctaagatcacgccactacactccagcctggtgccagagcgagactccatctcaaaaaaaaaagaaaaaagaaaaaaaaatgaaaaaaagtcagctcggagcagtggcacacacaatctgtagtcccagctatacaccacgctgagcccaggagttcgaggccagcctgggcaacatagtgagatccaatctctaaaaatgaaaaaaagaaagaaagaaagagaaaacagaaagcctcacaactaaagaaggatttctccctatactctttactctcccaaactcagggtgtaggccaggcgtggtggctcacgcctgtaatcccagcacttgggaggccaaggtgggtggatcacaaggtcaggagtttgagaccagcctcgccaacatggtgaaaccacatctctactaaaaatacaaaaattagctgggcgtggtggcaggcacctgtaatcccagctacttgggaagctgaggcaggagaatcgcttgaacctgggaggcggaggttgcagtggactgagatcgtactgctgcacttcagtctgggtgacagagcaaaactctgtctcaaaaaaaaagaaaaaaaaagagttgggagtgtagctcttcaatttatctgtttggtttctttaacttttttttttgttgttgttgttgtttgtttctttatctttcaaaggagaaaggtaattatgacttggtcagagtaagcattaatgtcaagggctttgagggtctgagatacaaggtaacatgattatgatgatcaaggattttttcatcaggtatatgctttcccttggccagttcttatcacagtaatgaggaaatgcagaagcctatgatgaaattcacttggacacagataccgaactatggggtttatcttgcagtcctcgtaccaggtagtgccctttgcacaaaatatttcagctcattaggtcctagatatgttggatggacaaatctagtgatggaaaagccatttgcttttctcccccaccttgtcctataaaccggggttacctccaggctcacaggtaacacatcctttccttgattattgaggatgtgcccaaacatggaaatactatccttatacgtaatcatattagctaacatcatgagcttttattatgtgccaggcacaatgttttgcatgtcttagtttacttaatccctttaagaatcctataaggtaagattttattaccctccctttccagatgtagaactgaggtttaaccagtttagataatatgctgtgggtcacaccatctgagcccacatttgaacacaggcagtctgatttccttttttttttctttttcttttttgagatggagtcttgctctgtcgccaggctggagtgcagtggcacgatcttggctcactgcaatgtctgcctcctgggttcaagcgattctcctgcctcagcctcctgagtagctgggactataggcatacgccaccacgcccagctcatttttgtatttttagtagagatggggtttcaccatgtgggccaggatggtctcgatctcctgacctcatgatctgcccacctcagcctcccaaagtgctcggattacaggttttctttttttttttttttagacagggtttgactccgttgcccaggctggagtgcagtggcctgatcatggctcactgtagccttgacctcccaggctcaagcaatcctcccacctcagcctcttgagtagctgggactacaggcatacaccaccatgcccggctaatttttgtatcttttgtagagacagggtttcgtgatgttgtccaggctggtctccaactcctgcgttcaagctatctgcctgcctcagcctctccaaatggtaggattacaggtgtgagccactgtgcccagcccaggctgatttctcaccccacatacttaacaaccaaacacattgcctttcagttattataccatttattcctgtcattgccatgaacaaaatggaagcaaccagggtgatagttgcagccaataggcactgaccaaagagaacagccgctgattgtatcggttcaactattaagagcctgtcctccagctaccaggctgatgtaaccaactctttttttttttttcttttgagatggagtcttgctgtgtcgcccaggctggagtgcagtggcgcgatctcggctcactgcaagctccgcctcccgggttcacgtcattctcctgcctcagcctcccgagtagctgggactacaggcgcccgccaccgtgcccagctaattttttgtatttttagtacagacggggtttcaccgtggtctcgatctcctgaccttgtgatccgcccgcctcggcctcccaaagtgccgggattacaggcgtgagccaccgtgcccggccatgtaaccaactcctatcatctttgagtttgtcatatattttttttttaatttattttattttatttttattttttttttaggcagagccttgctctgttgcccaggctgtagtacagtggtgccatctcggctcactgcaacctccacctccctggttcaagtgattcttctgcctcagcctccatgagtagctgggattgcaggcacccaccacattcagctaatttttgtattttttttagtagagatggggtatcaccatgttggccgggctggtcttgaactcctgacctcaggtgatctgcctgcctcagcctcccaaagtgctgggattacaggtgtgagccaccacacccagcctgtcagaatttttgagagaaattttagaacatattttttttcctttttaaagccaatttaaatacctctgctatgggttgcttttttttttaaggtaagaaaatgaactttctaaattatcttcaggggaacaacttagcaatcatttaaaaactcttacttctttttctatctgtctctactgattctaccaatgtcaatggaggagaacagaacgtggcagaaatattatgagagatatgactattccagcaggaacaaaatgatgggaatataggatgataacaggtcaactcaactggcttaaacaaggcagtatctaggccgggcgtggtggctcacgcctgtaattccagcactttgggaggctgaggcaggtggatcaactgaggttgggagttcaagaccagcctgaccaagatggagaaaccccatctctactaaaaatacaaaattagccagggtagtggcgcatgcctgtaatcctagctactcgggaggctgaggcaggagaatcgcttgaacccgggaggtggaggttgcggtgagccgagattgcaccattgcactccagcctggtaaaaagagcgaaactccgtctcaaaaaaaaaaaaaaaaaaaaagcagcgagataatatcttatgtcacataacaagaagtcctaattagggtggtgtcaaacctggttaatcaaagagctatgaagtctttgtattgttctgctttgccatggtgtctattttgtccacaatatggctacagaattcctaggtaccatatgcaagcatgcaagatccagaggaagaagacatagtctttttttgtaggtttcttttaaaagtgaggaacatcttcctaaaaggcaccaagccaggtttccttctggtctcagtggtcaggtctgtgagacctgtccatgcctaaagcaatccctggcaaggggaatgggaccactacgactgactctgcacgtcaggccttacccctgtgagctgagattggacttcttttcccgaggggattcttgaattaaagtccttgtttagttaacaagaaagaagtgagtgatgaatgttaagtatgcaataaggtctaatatttggggcaagaaagatgaatatttgcttgatcctattctatgccaaggactttgcctggattctttcacttaatccttacagtaaaccaaagaaaataaaatgaagacattgtcatccccattttgctgctgatgaacctgaggcatagagaagttaattaaattgttaaaggtcacataagagtcagtgatagccaaggcaggcagatcacctgaggtcaggagtttgagaccagcctggccaacatggtgaaaccctgtctctactaaaaatacaaaaattggccgggtgaggcggtgcgtgcctgtaatcctagctactcgggaggctgaggcgggaggatcgcttgaacccgggaggcagaggttgcagtgagctgagatcatagcactgcactccagcctgggtgacagagtgagactgcgtctcaaaaaaacaaaacaaaacttgaacttggttgcatacatttaattttatttattccacccccttccctgaatttgaaatgttaaaagtgtctagttgcttaacatgacattttgaatttttacagatacaattttcatgagctaaattttaaattcacaatattttaattaaaaatgctaccaggctaggcatggtggctcacacctgtaatcccagcctttttggaggccgaggtgggaggatcacttgagcctaagagttcatcaagaccagcctgggcaacatagtgagatcttgtctctacaaaaaaaatataaaaattagccaggcctggtggcatatgcctgtagtcccagctactcgggaggctgaggtgggaggattgcttgagcttgggaagtcgaggctgcagtgagccaacatggcaccactgcactccagcaacaaagtgaggccctgtctcaaaaaaaaaaaaagctaccagaaaaatatgcaaatatcattatgctgcttttaggaaacaaaatcacaattcttccttcctttatttatttatttatttatttattttctgaggcagagtctccctgtgtcgcccaggatagagtgcagtggcgtgatcttggctcactgcaacctctgcctccagggctcaggtgactctcctgcctcagcctcccgaatagctgggacaacaggcatgtgccatcatgcccagctaatttttttatatattttcagtagagatgggggtttcaccatgttggtcaggctggtcttgaactcctgacctcaagtgatctgccggcctcagcctcccaaaatgctggcattacaggcgtgagccacctcactcggccctttcctttatttatgttttttttgttgcttaaaagcagtgcttccatttcattatttgatcatggcttttaaaattattttatttatttatttttttaagagacagactcttactctgttacccaggctagagtgcagtggtaagatcatagttcattacagcctcaaacttctgggctcaagtgatccttccacctagcctcctgagtagctgggaccactagcatgtgacaccacattggctaatttttttttgttttttgtttttgtttttgtagagacagggtctcattttgttgcccaggctggtcttgaactcctggcttcaagcaatcctcccacctcggccttccaaagtgctgggattacaggcgtaaaccaccatgcctggcctaatcatgcctttataaaaaaatcatttttttttagagaaaaggtctcactatgttggtcaggctggataggaactcctgagttcaagtgatcctccacctcagcttccccctgtgccccactcaatcatgcctttttattataactgattctgatggtatgctgacagatatacaaattaatccagtcctttggagcttaaaaataatacaatgaaaaaaatcatttttatggtgtggtgcatcataaagtttatttatttatttattgagacgaagttttgctcttgtcgcccagactggagtgcaatggcgccacctcgggtcactgcaacctaggccactccgggttcaagcgattctcctgcctcagcctcccgagtagctggcgcacgctaccacgcccaactaatttttgtagttttagtagaggcggggtttcaccacgttggccaggctggtttccaactcctgacctcaagtgatccacccgcctctgcctcctcaggcgtgagccatcgcgcccggccaataaagcattttaatgcatttttcctcaaagtattcataaacttcaacttgttctaggtaaaattattttcccctttctacccacaataaaatgagtaatttaagcccttaacctacacattattcttaccttggaatatttaataagagctgcgctaatattatatctgaataatgaaataagagaaaccaaataagaaaaatttgtcataaagccctattctcctacattagattatgtgcatggcacacacacggatcagcttaagctgggtgaaactatatggagttagaattcctggcttcctatcattcagtagctgtgtggccgagaagaagactttaatgttgtaggacctttaaaatgggctgtaactcaaaggccctccttctggagttgttgtgaatcacgtggggtaatatatactagtttacaagatggatgtgtaagcccgaaggtggagcaggtttgcaagccttctttcagcctagggacagtaggatgactcatgagtcaattcttctctccttcccgtcatttcgggtccaactcttcctcctgtagtccacaaaagagcacggctgaccgataccaagcagagaacccagtagggtatgtgaccacgttcagatcaacagaacgcaaagcagaacggtccgagtactgcctcctacagccactttcctttctttaagcctcagctgctgctctaggtgtaaaaccggcataaaatagcactacgtaccttgcagagttgctcggaggattgaaggagataatgtaagagagtttggctagtttggctatgatggatggacattttctcttttctaacgtctctcttcccctcctaatgaaacctcttctgaagctcgctaactatagcagggcttgcagcttcaaaaaaacctttcagtcaagatcttgaaattagtattatttaaatcagtgcagtaacaccaaggtgtaaaagactgttacccactggtggctttaagaggattagctgactgaagagttttagaaaacatggaaactttttttgtacgtggatggatggaattccctgatctccttatccccaccacttaaaccatgccttgtgggtgaccgtggaaggctgattgtggcggggacatttacaaagcacatttaattgataagcactcgattgttctgtaactatagaactagttcacctttcagttgcactgagtgcgcctaagataacgatcttatttggaagtgagccctcgctagaaagaaggggaaaagggtaagaccgaagctcaaatgaatgaccagaaaggatgttttcattcgaataaactcaacccagtttttgacctccccacccatctctgccaacttgaaatcctcctggaggggcgagctgctggggttcaggactgggcgttgcggctgcaggaagccgtgggacctggggggtccctcggccgggcaacccccacccacccctacaggaccctggtgcgggggcgagcagggagtggacgcagagaaagttccccgctctgctcccgccctctccgaaactcgagccagcgaggctgggggcgggcggacggctcgcagaggaatttgcagtttccgggaggttgaggaagcgacccgagcacagccccagcagacgcagccctagcgcccggctttccgggttccgcgacgctgtcgggagaaacccgcgcgcctggaaggggcgggccgggctccccccacctgcgggcgggcggggagggtcgcggccgcgcggggtggggctcggccggtcgcccgtccggggcggggcccagggaggcggggtcgcgggcgcaccggggccgagccgcgcctggagcctggcggggaggcggcaggaggggccgggagagcctgattgagcggcggccgcagctgcataaggactgcccggggctgcgcgccgggaacctcgcggggctggcgggcgccgcaccccctccctggccgcctgcgccccggggaggccgcccgcgcgcgacgggaccggcagcatgagcagcggctacagcagcctggaggaggacgccgaggacttcttcttcaccgccaggacctccttcttcaggagagcgccccagggcaagccccgctccggccaacaagtgagtggcgcgcggcgggcgctgcagcccgcgccccagagttccggggaacccgccagcccgcgccccctgcctccacgtgtctctgcggggcgctcgggggatgctcgccgggaaggaggagcgggccgagaagtggcttctgccttttcgggtcccgggaacgtgcctggagcttgtgcgtgtaggcgagggaaggcggaggaagggcggggaggctgagggccggcttctgccttccgcgccagatggcctctgcagctccgcctcgggctgccgcctgcggggagcagccccggagccagcaggcgtccccgggccactcccccaggtttccccttcgcgtccccgctgggtcgacggtcgggttcgcgcgcctgtccttcctgttagtcagcttactcatctgtggcccccagagtggcttgggtcaacgtgtaatagctaggggtggccgggtgacctgacctcccctcttcctggcccgggcgccctggtggagtgggggtccaagggcaccgtgggcctcgccaccataggcgctcactaaatctcggttgcgggactcagggttgtgcgttttctgtaaagctaggttttttggtgcccagatgttttgcaaacaagctcctatgctaaatactagccagcgacagctaaccttttcgccggtttcttccttttttggaggcagcatgccgtgggaagcacgagttgggaaaagatgggaagggaacttgtgccagtttcgccagctgtagccgtgttttttgggaggccttcccgaaacggggcacgtcggctggactgaggagcccggtgctagagcccgcggcctcctggcactaggagccgcaccaggggagccgggccaacccggccacgctcacatcagattacagaagattgtaatggcacaaatttgttgcttttagaaaacaggcgttcgccaaacatttctattaataccggactgagacctagagactagaagcaagaagaatcgttcaggggccggatgataacttcttttggtggatgtgggagggtgcaatctgtcagggtggtcttgccagacctcttaagtttagccactttctgaagtaaaattctttctaaaattcggaagttctagtcttttcaggctcttaagtcccaaaccaggaggaggagaggagacggtgaagggtaagctgaagtcaagtgcccttattcagtaaccgcagttaatctcaagtcccggtgccatagttgtccgtcttgtattgtttctaaggcttaaggccccactatttacgagtcactttgagtgggatctcttactttcagcagagtgtgttctgagagcatgagattgctgtgaagtttggaagttggaaacgccctctcctcccccatgcccaccctccctgggttgtagaaaaattgcatttgcttatgctttttccatttttgctttctctttcttggcctctctcttccccttctccgttttgcattttctcctttcatttatgttgctttcaccacttgacatgaaaaggaactcatggtagtttgaagtttattccagaggtgtctgctaatctcctgaaaactggctggttcttggattctccaggggtgagatgccacaagggccaaactattcaggtttgaattgtatgagaatcctttagtgctttaaagagtaaagacatcagtttttttctaggtttatatgcatttagcgtttctttttttttttttttttttgagatggagtctcactgtgttacccaggctggagtgcagtcgtgtgatctcactgcaacctcagcttccctggttcaagcgattcccttgcctcagcttcccgagtagctgagattacaggcatgcaccaccacatctggctcatttttgtatttttagtagagatgggatttaaccatgttggccaggctggtctcgaactcctggcctcaggtaatctgcccgccttggcctcccaaagtgcagggattacagatgtgagccaccgcccccggcacatttattgtttctatgttgtatgcaatcatttatgtatcatctagcatatatattatactcagggtagtattatttagcatttagaattagtctaacattaatatgtattttgaaatatcgtgttggaaatcaggacaggaagacatagttcgtggttgaagagcttcatatgtgtatttgaagctttattgcctgcatatttttcccttctaacataacacatgtaaggtgctgagttgtagaagttatttgccaggcagagaaagtgttctaaactacgaattttagtgagcattgtggtttatttaaagaagtgatatgaatgttttaaattcctggtaagattggtgaattagggaagtaaaacatcataaatataaagcaaaacactcttaatgtagaatgttccttttatctaaggttagataagcctttttcttcattttcatgctgatgattataagaataagataagcacttctgacatacatcatagtagtgaaatttatcctttctctagagagatggaaagagaggtattgctagaaggatctattagagatacagtgattttttttttttttggatgctgtaccacctggtggaaaagtgagaaaaatgaggtttctagatttcttgaaaatatccggagaaaacaagatgtttgtggtaaatgcagaatggggagaaaggggtgagggagcgggtggactggaaatttctttcttctcttgccaggcaagggaacatagtgcaacttctttctatccccaacagtaacaaaaaccttataaagaaaatgttttcattttttttcttactttaaaccccattcttaacaacaagaacaacaacaaaaatggaaaagggttaaaaaacctgtctaggccacgtgtggtagctcatgcctgtaattccagcactttgggaggctgagatgggaggattgcttgagcccaggagtttgagaccagcctggacaacatggtgaaaccctgtctctacaaaaaaaatgcaaaaattagtcaggcatggtggtgctcgcctgtagtcccagctactcgggagactgaggtgggagcattgcttaaggccgggaggcagaggttgcagtgagctgtgatcgcaccactgcactccagcctgggcaacagagcgagaccctgtctcaaaaacaaaactgtctaaaagatataaagggaacgaacatatgacgttttgtggcagtttgaatgtcatgtttattgtatccgcagggtctcgatcagtacctgatatacagtagttgctcagtgaatgcaagctgaatgaatgaatgttttcctgatttgatagtaactgggtctttaccatttctttttttttttttttttgagatggagtttcactcttgttgcccaggctggagtgcaatggcgtgatctcggctcactgcaacctccgtctcccgcgtgcaaacgattctcctgcctcagcctcccgagtagctgggatcacaggcacctgccaccatatccagctaaattttgtagtagagacggggtctcaccatgttggccaggctggtcttgaattcctgacctcaggtgatctgcccgcctcggcctcccaaagtgctgggattacaggcgtgagccaccgcacctggcccctgatctttaccattttcaaatgtactgtatcttatggtgctcccaaaaactgtatgaaacattaacttaatgaaagggggaggtattatttagtgattgtataaggcccacacctagatagcaagaaggctggaactcaggttttcagactcaaattacactctctattttgttactttttagctataaaaataattttatggctccatattccctttgcaaataaggacacctaaaatttaagagtttcttaaaatttcttttcttttcttttttttttttttttgagatagattcttactgtgtcacccagactggagtgcagtggcaggatcttggctcactgcaacctccatctcccaggatcaattgattctcatacctcagcctcctgagtagttgggattacaggcacccgctgccaggcctggcttttttttttgtattttagtctagatggggttttgccatgttggccaggctggtcttgaacttctgaccttaagtgatctgccctcctcggcctcccaaagtgctgggattataggcatgagccaccgcgcctggctgtttcttaaaatttcaactccctgacctgcatatagtcatgacagtgtttataatttgtatttgtggattcacgtatttgtggattcgctgtgtttcaaaggatccacctaatcattgttttcagcaaaaccaaaaatgtggacagttgtgtaatttattatttgccttcttgatttcccaccaaaatcaaactacctgtaaatacaggacacattcagatttccaaagaatagaaatggtctaaagttataatctgtcagagtgtgtcttacctcttagctaagctacctctcctcctgagcctttggtagttcatgggaataaggaaatgagacagtatttttgctttagaagtagggtagtcaagaagtcttgagaaacgtgaaattgtcttctgaacaacccacactttaaaaaaaattgcgctgaagaattttacttcagtaagtaagtctattagactccccatagcaggcctcaacttcaccctttcggttttctctttcttattcaaatatttttgtgcctcaattatttggttgtgtcttattgctagaatcaacagtaatgagctgcactcttttattagtgtttccattagaagtttagagctagatcactggggtaaaagaatagtggtttatgacataataggtattttgactctactagcctttttctttttttttttttgagacggagtttcgcttttgtcacccaggctggagtgcagtggtgtgatctcggctctgcaacatctgcctcctgggttcaaatgattctcctgcctcagcctcccgagtagctgggattacaggctcccgccacagtgcctggctaattttttgtatttttagtagagacgggctttcaccatgttgggcaaactggtctcaaactcctgacctcaggtgatccacccacctcggcctcccacagtgctaggattacaggtgtgagccaccactcctggcctatactagctttttaaatgctgatttttaattcccgtattatggggcataaacattttcaccagacattttgcctagggcaaggtgatttacacatcttttctgcatgtctgatatgttctgttcttacacgatattaatccattggaattttgtgtttgtgtgagcaagattcacaaaggcatattcctttaaatgaatttcagaagaaaaagtttccagtcctataaagcctcatatttgagtagtatactccttatcccatttcttcttctggccaactcacaagatttggaattatttggaaagcagtgacacaaaacatttttgaaaagaaaggctaaaaatatccaataatgtggttattctttttagacttcctttggcagtcagtgcatgtcatacggttaacattctttttctgggagaaaaaaaaactgagtctgaccaaatactttctagtgtggcctgatcaccaactcttagccctgggcattagccctcgcattttccacccccaagtctccaagcataagtagctgtctttcaataaaggccccagtttgaaacgtgtatttcactcctaatttggccaaaggccattggctagcagtccctcttcagaggggatggtgaaaagacagtaggatatatgataaatgcatgcaaaggagcttctcttctatatgacaagtcttggctaacttagcctctttgcatcttcctctgtttgaagagctacacacatttgccttgtaggaagtttttattctcatggcaagcaggcattacctctattacaaggccccgcttattgttcaccctgtgatgtaagagcttttaggactccaacaatattagccttctctttaattcctttcaggccccatcgccatctcagaaccatggcctggagttgccgccctccattctccttaacatgtcgactcagaaaagtcttaaagcccgctgttctttcccttcatagcaaaaattataatttatcattatattttgtttaatgaggacagagactagcattttttacctactacataatataaatgcttggcacttaaggtgcttgaacaaatgaaagcctgctcattttggatggatgtcccagtatttggtactgttagttttcctttatacacaaatgtacacaatgtctccccctttccaaactagaccataagccttcacagtatcttacaggtagtagtgatttaaaatgggatgatattggtaatatctgtgattactggttaagcataactcactttatatactttccccttgttttaagaaaactcatcatttattcattaatatatttagttgacaatttattgtgtgcctcctatgtgccagatactgttctaacctctggggttagggtggtgaacaatacacagtccctggcctcttttggcaatgtttttaaaaagcttacccaataggcaaatgaaaatatctctctaatttttccctaaagagcttgctcctttagtgtatttgaggaaactttgaaatgtagtttttcaggaacacacctattttgtagtgtggtaaagctatacattgattgattgattggttgagacggagtcttgctctgtcacccaggctggagtacaatgatgcgatctccactcaccgcaacctctgcctcctgggttcaagcaattcccctgcctcagcctccccagtagctgggattacaggtgcgtgccaccacatggggctaattttttatatttttagtagggatggggtttcaccatattggccaggctggtcttgaactcctgaccttgtgatctgcccgcctcggcctcccaaagtgctgggattacaggaatgagctaccgtgcccggccctatacatctgtttagatgggaatgttgacgtggaagtgtatcacttcctgttttacgtccctgtgtaaaacaatcacatttccttattgatgactgtcttccaacagaaacgtaatcatcttcaaggttagaaaatgttttttaaataacttcaaccagcgttaaccaaactggttaattcaccaaaatgttaaccaaaattaaccaaatcaaatttggtttattttccaggtctcttttttcttttcttttttcatttttaaagagatgggatcttgctatgttgcccaagctaaaatgcaattgttattcacaggcatgataatagtgccctatagcctcgaactcctgggcccacatgatcctcctgccttagcctcctgagtattccaggtttttcttaatagtttaaacaggtagttctggtttggctatcagtagtgttgtcaaatagcttttgtttgcttaattttatttttattttttttgagacaagtcttgatctgttgcccaggctggagtgcagtggcgtgatctcggctcactgcaacctccacctcctgggttcaagcaattctcctgcctcagcctcccaagtagctgggattacaggggcatgccaccatccccggctaatttttgtatttttaaagtagagacggggttataccatgttggccagactggtctcaaactcctgacctcatgatctgccctccttggcctcccaaagtgctgggattacaggcgtgagccaccacgcccggccttttgtttttgtttttgttttttttaaatggagagggccagataatgctctaggaaggatgtcagaacccataaaaaatgatgagtatttgaaatatatgtaaaaacttaagtaacaaatcagaaaatatattctgagatagaagtgaccattctaaaactgtgctgtacaatacagtagtcactagctacatgtagtttttaagcaatcgaaacgtggctagtctgattgagattgctgtgaaaaatacacactggattttgaagattagaaatgtaccctaaaacttaaagtataataataaaaaaaaagaaagaatgtaaaatatgataattaaaaaattgcaattacatgttgaaatgataatattcgataatatttgagttaagtaaatttaatgttacttattttttagcatggctatggaaaacttaaaattatgcatgtggctcgcatgatatttttgttgaacaatgctgtttgctgaagcagggctggcagcccttgccagaggtttgaatctccattgtcttggtggctgcagatggatggatgtgggggtaccagcctggtgtgttgggaagatttttctttgtgaaggggaacttgccctttactgttggggatagtttcttctcagcctatccagggacacacataccagcattttggggttgtgaaacttttgtgtggggaacttcccttttttttttccacatgagccaataagataaaactgacctaatggcattctcggtgcaactctgccttcagtttaaggacagaagagggctcatgtttcatagagtattaaaggagcaagcttaatattttgcattttgtggactgtaattgctaactgctgctacatgattcagtcagctaagaataatttactaattatatattgcctcacttggttctttttccagatgctaaacaaagtgagataattagaggaggaaaaagggtgagtttgggaattggagaccagaaggatggatttagaagatcttggagttaacggacttagaatatagtcagcaaagagttcacttaaaattagtgcaggttgccaggcgtggtggctcacgcctgtaatcccagcacattgggaggccaaggcgggcggatcacgaggtcgggagttcaagactaacctggccaatatagtgaaaccccgtctctactaaaaatacaaaaattaggcaggcatggtggtgcatgcctgtactcccagctactcggtaggctgagacaggagaatcgcttgaacctgggaggtggaggttgtggtgagccgagattgcgccactgcactccagcttgggcaacagagtgagactttatatcaaaaaaaaaaaaaaaagaaattagtgcaggttgactgtgtgtgtgtgtgtgtgtgtgtgtgtgtgtgtgtgtgtagttttctgaattcatttttcaagtattgaatattcacaatgatgctagactaagtgctagagatttggtggtgaacgaaacagattgaaacctgccttcatggggggcgtatataggttcgtctgactagtctagataagtgaatttgtgtagtaattgtttttttgtaactggcttagtttacttagcttgatgtcatcaagatttattcatgttggagtatgtgtcagaatttccttccttttaaaggctgaataatatatccattgtatgtatatatcactttttgtttatccattgattcttccatagacattaggattgcttccaccttttggctcatgtgaataatgatgctgtgaacaggggtgtacaaatatctcttaaagacccctcttaaaactttttgcgatatatacccataagtaacagttgctatagaatcatatggtaattctgtttttaattttttgaggaatactatactgacaaatttgaatccttatttaaacccaggattatggaatactgctgcttgatttcagctgtcattttgttgtctacattgtattttattgaattggcgttattcccaaatattggaaaatgtggaggtttctaatttttgctactgtaaatagcactaataaataccttgagcatgaaaccttttccattatggattaattttataggatagttgtacaaaaatggaattttactaattatgagggtgtgactttttatgattctagttatatattgccaatttatgtctatttttaagtttcattacacccttacttccattggatatagtcattaaaatagagaaaaaaaacttcaataactaaaggcaccttattgctatttaatttacattcctttattattattttttaaattattattttttgaggcggagttttactcgtcacccaggctggagtgtaatggcgcgatcttggcttactgcaacctccgcctcccaggttcaagagattctcctgcctcagcctcccaagtagctgggattacaggcgcctgccactacgccctgctaatttttgtatttttagtagagatggggtttcaccatgttggccaggctggtctcaaactcctgacctcaggtggtccacccacctcggcctcccaaagtgctgagattacagacgtgaggcactgcgcctggcacattcctttaattaactgtgaatttaatactttttaaatacttctgagtaaatctcccttgtgtgagaattgtccatgcatgacctttgcccatttgtctattaggtaggcaaaatcttgagagagcactgcttgagtctgtgcatttttagcttggtagatggttctgcttttttgaggtcagctgaacttcagggttttttttgacttacactgtttgtaccaaaaggatattacatattcaggctttcatttttttaagatggagtttcggtcatgttgcccaggctggagagcaatggtgcgaacttggctcactgcaacctccgcctcccaggttcaagtgattctcctgcttcatcctcccaagtagctgggattatgggcatgcgccactatgcgcggctaatttttgtatttttagtagagacaggattgatcaggctggatggtctcgaactcctgatctccggtaatctacccgcctgggcctcccaaagtgctgggattataggcgtgagccaccgtgcccggcccaggcattttgaaatacttcagaatgtgtttcaggctgacatcactgaaactcagaaaaatacttattactcctgtagttacaacatgggaaaggcattgctaagaaagcatcaccataaataaacccgtgggattcagaaggtggggagttgggtgatgtgttttctactaaccatgtgttttaaaaaaaagggtgactagaagttcctgtttatctttgaatttcaataaatttagggcttgttttccaaccactctggtagaatttagaagaacctaacttatttatttttatctttttgacagtcttgctctgtcaccaggctggagtgcagtggcgcgatcttggctcactgcaatctctgcctcccagattcaagctattttcctgcctcagcctcctgagtagctgggattacaggcatgcaccaccatgtccagctatttttttttttttttttgtatttttagtagagtcagggtttcaccatgttggtcaggctggtgtcaaactcctgagctcgttatccgcctgcctcggcctcccaaagtgttgggattacaggtgtgagccaccgtgcctggccagtcctaacttattttgtaagtatactaggtattgaaaaaaggatggtaggacaaactgctggaaaccttacccaccaaagataatttatactgtttacttataggcttactgtcttttgttgaaaaattgcgatgagaaaggaatcggcattggcatctattaggttggtgcaaaagtaattgcggtttttgccattactttcagtagcaaaaatctcaattacttttgcaccaacttaatactttcaggcttgttgaagcctaagtagaaaattgttgcttaatctcttttattctgattaactcctactttaaattttttctttcagaatctttttatcaagtgaatcttttaaaaagatgtgaagagttacttctgactttatgattgatagattatgagccctccttaatccccaatttcttaattcaaacaagcttactgtgaaaattttcttttttctttctttttttttttgagatggagtcttgctctgttgcccaggctgtagtacagtggcacgatcttggctcactgcaacctccatctcctgagttcaagtgattcttcagtctcagcctccccagtagctgggaatacaggcgcataccaccatgcccagctaatttttgtatttttagtagagacggggtttcaccatgttggtcaggctggtctcgaacccctgacctcaggtgatccgcctgcctcggcctccctgagtgctgagattataagcatgagccaccgcgcccggccaccgtgaaaattttctacaaatgcttgtttcgaggaatcttttttgatattttgccagcaaagtcataggagcaaaatttttttaaatgaaaatagaaaacaacatagttaaatatatcacgtaggaggaaaagtaccagtaccaaaattaactttagcatttcttagtgttttacagttaacagagcattccaagggaattaaaattcagttgattttattggactttaatttcagaggaactctgagatgagaaatttaactagcacgtttatccgtttaggccttaagcagatgcaggtttcatgacatgccagaggtaaatttaggggtacttgactgtagtgagtaatttcccagctatgggaaaatgtaaatattatgtagatggtataaagaaacaatattacgtttgtccatttaaggtctgtttctgtttgttcagacaggcttgtggattgcttttcttgccagtgttcctttaggtggaaggtacagccctttcagatatttcagaattttattttcttttatttttttgagatggagtctcactctgtcacccaggctggagtgcagtggcacgatctcggctcactgcagcttctgcttcccaggttcaagaaattctcatgcctcagcttcccgagtagctgggattgccagcacccgccaccatgcctggctaatttttatttttatttttttagtagagagagagtttcaccgtgttggccagactggcctcaaacttctggcctcaaccgatctgcccgcctctgcctcccaaagtgttgggattacaggggtgagccaccatgtccggccatatttctgttttagaattgctttcttgcttttcctctgaccagatttggtcacgtgaaactgtcaattagcatgaatgaggtgctgctgccatgcaggggtttgatccttggctgtcatgttgatggtctctgtatccaaattagtatttgtgaaatttgggggaagagaatttgggcttattgtgtagcggaacgagtacgtttcataaaggcaaacctagcaccgatatcaacaaatccacttacaatccattcctaaaggaggaagctctgttacagttttaaaattaacattacaatgcatcttgcttgtttgaggtgagggcttaaaactcagtaatgaaaaagagggagaactataggctaaaagggtgtgtgttcttaattgattaattgcaagcagctatgtagggcaccctgtgtttaaatcagtgctagctgtattatcttgagcaagtcattgtacctctttgtttttttaatttatttttattttttacatttttaagagacagggtctcactatgttgctcagtttggtcttgaactcctgggctcaagtgatcctcctgccttggcctcccaaagcgctggtattacaggtatgggccatcacgcctggcaaatcgttgtacctctttgagcctcagtttcctcatttgtaaactagtaggatgcctggaagttcataagcattaataaatgttagcaatagttattatttcttgagacggagtcttgctctgttgcccaggctggagtgcagtggcgcgatctaggctcactgcaagctctgcctcctgggttatgccattctcctgcctcagcatcccgagtagctggaactacaggcgcctaccaccacccccgggtaatttttttttttttttgtatttttagtagagatggggtttgactgtgttagccaggatggtctcgatctcctgacttcgcgatctgcccgcctcggcctcccaaagtgctgggattacaggcgtgagccaccgcgcctggccagcaatagttatttttaaaagatcctcctacatgtgattatatgccccttttcatttgagggtagtagaccatatggagaactgacagtggttgagagatttgaagggaactaatagtccagccaaagagcgaaaaatggcaggaaattggaaattaggtctgtctcattggctttattaaccaaaatgaattgggaatctcaatgtaattgatcaggaaggagctccagtcattcctggaggattaatttattattattattattattttttagctgcataccatatcactgtggtgcctttgtttttggaatggagctgttgcctgctgaccacgcctgggggcacctaatcacaagtctttcccaacttctttttcctttaaagcaagccactccagttgaaagagaatgattagacatatgaaagtgtggttttgtttgcccaagagtttatgtataagttaacacattgtacacttttttttttttttaaacttcctctttctctcttatctgcctctgatcacgggatcctggttagttttgctcagggcagctcgcttgacctggtgacaaattccgcttcttcctggggctttcctttttcctccagaaagtcttgtgctcatggtttaggaacttagtcactgtcgtctttctggttttcatgagatcaaatcaaataaggtaatacgtgcaaactgtataacgtgctgcaaaggcagactctgctgctgtccttagagtccagttccctggccgtggctgggttcccagccctctgttctctctccacagagtgactgtctcggctctgagggtttcagcgatactggatgcttccacatttaggaaataggcctgcttatgctccagtgcaggcattaaagctcaatgagtcatgtgatctgcttggccgactcttcagagttcgtttgtactcagtaaaattagtatgagtcttggaacccggtgggaaacctcttcctagtcctacaggccggatgcgccttctgagttttcatattatctctccacccccaacctccccctcctttggttgtatgtttctcacaatgaattggttgttggaaactggctttgtaataattccaaatgccactgtgaagatttttaatagcctttaaaatttttaattggctgagctgtagtgttattgatatatttttgtataaatgttattattaacaagttaattcatataaagggcttggaactatacctggcatataagtacatgtttaataaagattaacttatttctgccgggtgtggtggctcacgcctgtaatcccaacactttgggaggccgaggtgggcagatcacttgaggtcaggagtttgagaccaacctgggccaacatggtgaaaccctgtctttactaaaaatacaaaaattagcctgatgtgcttgcttgaacttaggaggcggaggttgcagtgagccgacatcatgccactgcactccagcctgggcaacagagtgagactcttgtctcaaaaaaaaaaaaaaaaagaaaaaaaaagaaaaagattaacagtatttctaatggtattagaattgttttattttattttttgtttttgagacagggtctcgctgtgtcacccaggctggagtgcagtggtgggatcatgcctcactgtagctagccttgaactcctggactcaagtgatcctcccacctcaacctcctgagtagctgggactagaggtgcattctaccatgcctggctaattttaaaaaatgtttttgtagaaatggggtcttgctgtgttgcccaggctggtctggaactcctgggctcaagtgatcctcctgccttggcctcccaaagtgttaggattacaggtgtatgccaccatgctcatccagcattcttaattaaaataatttggtaggagattttatgaaggcagtatgttcagtagaaaggtttggggatccagaattgggagactattttaattttggatctgttatttactagctctgggagcttgagcaggttccttacttaagttccttgagtaacagtttcttgatctttaaaacattatagaggggttaaatcagataatgtatgtggaatgtattcctagattatagattattacataattgtaagtgtggtagcaatcacaggtgtgtttagagactactaaaaaatggttttctcttttaatcttgtctgatgtaaattaatgacacattctcagtcgactgtagtattgacacttgataaacagtttttgaaaatgaatttattctccatctcttctatgtctgcttttatctgcaaagtcgtgatttgtgtttggggacttgaacaattgatagctaagcatcaactttaaattgctttatgaattgatgattgtgtttatgaagcactggtgatttgggggaagatgacattttagcttactgttggatgcatcagggaacttgagttaatttagctttaagccttccagattatcctgcctatgagcttcacaagggcagaccacatctctagttttcaccatgatattttcagtgctatcttggtgcctggcacagaggacagagggagtcccaattatatttgttaattgaccacctggttttcatctgatcagacttgtgtcagaattataatcaaggaaaagttgggcaaaggcactaaaatgagtttcttttggtttcagagggagtaataataaaacaacagtaatagcttatgtattcatgtggaaataggacatttaggtgaaaagtacgttgggccaggggtatggagatctagctcctaggactggtcctttattaaatagcagagataactttgggagagttacttaaccatttttggcttcagtttcttcctcaaaggccctgtccagctgtgtggcaaatggttagtttattctggagcagaattactgattggagggaaagtaacagcaataggatttgagagggcttcacaaatgttttgagatgccaaatgaattagtttagaaacagctatattaggtcatatctgcttggatagggagaacccaagtgagttgagtcatgggtgtttgagaaatgaatagaatatgtagaattatttcttttccaaaagagggaatgtcttgggaaagaaatcaaagggaacctgggtgatatctttgattcatcccctatctagtgccaacaagaacaagtttctttctttcttttcctttttctaagaatggatttcatgtaagccaaaagaacacttgattgttctgaacttgtatatattgcaggagttataaatataatatcaagaactatttaataagagcccaccagcagttccacgttcctcaaaaccaggacaggatgaatgtatgagaatcatcttcttactgagaatggtaggacagaagggatagtttagccactatacttcctggaagaatcagtacttgagggttgctgcagctttttgggattgaaggagtatgttcatttcctttggaagattaattttttccttttttttgacatggagtctctctctgtcgcccaggctggagtgcagtggcacgatcttggctcactgcaaccccacctcccaggttcaagcaattctgcctgcctcagcctcccgagtagctgggattacaggcatgcaccaccacacttgcctaatttttgtattattagtaaagatggggttctgccatgttggccatgctggtcttgaactcgtgacctaaggtgatctgcctgccttggcctcccaaagtgctgggattacaggtgtgagccactacacccggcctgattaatttcttttacttgcttcaagtgtctcctttattccagcctacacatagaggtaaatattcctaggaaactttcagcaagttaaatcctattataaaatgccagagtcagttgtctaatttttattttattttattattattatttttttgagacagggtcttgctttgtcacccaggctggagtgcagtggcgtgaacacagctcaccacagccttcacctcccaggctcaagtgatcgttccagttcagcctccttagtagctgggatcacaggtgcagaccaccacacccgactaattttcttttttttttttttaagacaaggtctcactctgtcgtccaggctggagtacagtggcgtgactttggctcactgcaacctctgcctatgggttcaagcaatcctcccacctcagcctcccgagtagctaggactacaggtacgtgccaccacacccagctaatttttcgtatttttttttttgtagagatggggtttcacagcattgcccaggctggtctcaaacacctgggctcaagccatctgtctgccttgacctcccaaagtgctgggattataggcatgagccactgcgcccgtcccactgctattcttccagctagaaggactatacttaaatgcataattatacaaccttttgatttgttatgaaaatcataaaaaattatttttctagcaactcctgcccttttcattaaacagatcctagtattcctgaaattctgtggtggatttttatatgtaatgtgataatatgaagaaatagctgattttggtagctgctcacatattatgtttgttttaattggaaaagttggcctatgaaaatgagtgttgtataaaaatggtttatgtggaccaggcgcggtggctcatgcctgtaatcccagcactttgggaggccgaggtgggtggatcacctgaggtcaggagtttgagaccagcctggccaacgtgatgaaaccccatctctactaaaaatacaaaaattagctgggcatggtgtgtgcgcctgtaatcccagctactcgggaggctgaggcaggagaatcacttgaacctgggaggtggaggttgcagtgagctgagattgtgccactactccagcctgggtgacagagcaagactccatctcaaaaaaaaaaaaaaaaaaaaaggaaaaaaagaacaagaaagaaaaatggtttatgtgaactaaaaggttgtttgcattttgtggcaaataacagcaccaaattcccagatcctaaatgtttcagttatgaaatatttgaagtacctctgaatttacacataggcattccactcatgtaagcactcattgattttaagatttttcattcatcaaaagggaaaatgtgggctgccatatgtataatttttgtcatccaaaaaagagatataaagttaaaaattagcaaggccatggtgggtcatgcctgtaatcccagcactttgggaggctgaggcaggaggattgtttaagcccaggagtttgagaccagactgggcaacagagcgagacattgtctttactgaaaaaagagaaattatccaaatatggtggtttgtgcctgtagtcccagctatttgggaggctgaggcaagaggtttgcttgagcttagcagtttgaggctgcagtgagctatggtcacaccactgcactgtagcctgaatgacagagacagaccctatctcaaaaacaaaacgaaatttaaaaaaagggtgcttagaaatcctgaactgttctttttactcccaggacatgtgatcatatgcctactcaggagtgagttatagctagttctcagtagatgtttagttattaaaatggaatgaaggcatgaatgtggggatgaagtagaggaggggctgggttggagatactggttaattgggaggcattagtaacactgaatgtgggcagagaggtggtgagaaagaggagtcaaggaagagttgtaggtttctggtttgggagccttggaagatggtgctagcaagcagccactcaccaagaaatcaagtaagaagaaagatcaggtttaggagggaagacacattcaggcaatcaatatatggcatacaccaggcagtcaataaattttgagtgagtaaatctgggcatgtgtgttttgagatgtctgtgggctatcaaagtttctggagtttcttatcaagaaggtagacctggtctgcagagagagcttcaggattcgttgaagtcatgggcttagatgaactatgtgtgtaaagcaaaaaaggtgtctttagacagaagcatggaggataccacagaagcatgggggcaccagcaggtaagaagtgggcagagaagggcatgtccatggaggaaccaaggagtggtcagagaagctggagaaaaagaaaagggtggttgtcctgggatcggaggttgggaccacctcaagaacaagggcttggccatgggacaagtgcttcagaaaagccaagaaggcctggggtggaactgtgtggcagtctctggagaccttgaggagagccactccagtgaactggaggcgtacagtcacactgcagtgggtggtgagtgaatagtgcagaggaagcaggagagtgagtagaggtgctcttccgtgaggcttgtctggcaaggagaggatggtgtagtaaaatgaggagcctacaagggcgagggaagtggtaagggtgttgtcatcgtatgtaatgtatgtatgtatgtatgtatgtatgtatgtatgtatgtatgtatgttgagacatagtcttgctctgtcgcccaggctggagtgcagtggtgcaatctctgctcactgcaacctctgtctcccgggttcaagattctcctgcctcagcctcccaagtagctgggattacaggcacctgctaccacacccagttaatttttgtatttttagtagagatggagttttgccatgttggccaggctggtctcgtctcaacctcctgacctcaggttatccgcccacctcggcctcccaaagtgctgggattacaggggagagccaccatacccggcctgttttttatttatttttagatgagaggacttgaatggaaagaagactgagtgtcaggggagtgaggatcattgaaagagatgcctcccttcgcactggaagggatgatatttggattctaagtagaaggctgcttagaaagaagacgtctctcccatcgttgagtggaggagaagttcaatctagaaatgtgtatataatacaagagggggtgactaggcctttcagttggtggcaggtggatattgatggaggaggtgggtatgcacatgtgggagtggtgcatgaagagaagcccacacaggcaggcaccgggccagaagaggggagtgctggggtatttgggaccaagtggtggtatggctgcagcaaaggttgccacgccaaaggtgtggtgaaaaactacgctggaaaggagggagggttggcaggctctgaaaggccgtgcttgccagcctgaggattgaatattttgtgagtaaggaggagccacttagggagaaataaagtggtcagacctatgattttaaaactgacagcagagtttagagggcaagaggggtagggatattgtttggaaggtgattgcggtaacctgggtgaaggtaattagggctagaaataggatagttgcagtgggagagagaaggactccagaaattgagttgtcacattggcacctgatcgaccagggtgaggggaggcaaggaaggagacgagagaaaagaaggaggtatggaaggtggctgggtgggaggatggccatgccactgtggaatggggagcacgggaggaagaggaacaggtttagtgaggtaggggaacaactcggttttagggcctatacgcaacatttgtgtagcatccagctgcagccagaattaagggtctgaagctcaggacagacctcagatctcatggaagcatgagatcatcatccttgaattggaagtggttgagatttatttgaaataacaagagaaaaataaatcttgatgtggatatggactggaagagtaaacttcacagaccatttgagtgtatttttaactttcttagaaaaaaagtctttgaagaccagaatgtggtggtgctccacaaatagctcaaaattagcacatctagaataagctagaaaataaatctaagcagtttcaatagaaatgctgttatcttgatctggctctatttgttttttttcctatcaggttaaaatctgtttcttcaatcattttgtttattccttttgataagagacttcagaggactgacagggactagctggttatgtttttgaaaagtctttgaagatgaaacatatgttttgagtgtggtgacactgcattaattattctctggttttgacaccagtggatactgatacggtttggatgtgtgttgccttcaaatcttatgttgaaacgtgatccacaatgttggagttggggcctagtgggaggtattggattatggggatggatccctcatgaatggcttagtaccacctccttggtgatatgtgagttcttactctgttcacgtgagagctggttgtttaaaaagagcctggcacctcctcctctctctcttgttccctctcctgccatgtgaccacctgcttccccttttcctttcacctcctgaggtcctcctgaggtcctcaccaggagcagatgttggtgccatgtttcctgtgcagccaacagaactgtgagccaaaataaacctcttttctttataaattacctagcctcagatactcttttatagcaatgaagaaaagacaaacacagaaaattggtaccaggagaggggcatcgcaataaagatacctgaaaatgtggaactggctttggcactgggtaataggcagagattagaagagtttggaggggtcagaagaagacaggaagacaagggaaagttttggaacttcttagagactgattaaatttgaccaaaatgctgatagaaatatggaccaagtggggtggctcacgcctatagtcagcactttgggaggctgaggtgggaggattgcttgagctcaggagtttgagaccaccctggacaaagtggcaaaactgtatctctacaaaaaatacaaaaattagctgggcatggtgacatgtccctgtagtcccagctactggggaggctgaggtgggaagatggcttgagcctgggaggcagagtttgcagtgagccagtatgagtcactgcactccagcctgggtgacagccagaccctgtatcaagcaaacaaacaagaattgtgtgagctgaactagttgagatgtctatggtgttggctgttgtttctgctgttaatcattagttctcttaaactaggagatgaacaaggttaacctttttcttgcaaattgacacagagggtctgctgctgtgagctttatcttcaacatcatcttgtcctttttttttttttcctactttgaaaaaaaaattcattttttcatagaaatgagttcttactatgttatccaggctggtcttgaactcctgagctcaagtgatcctcctcagcctcccaactgggattacatgtgtgagccactgcacccggcacttcttgaagggttatccacttgaaaactgctgatttttggggggcattgtccccacaaacttttcaaaaagcaacagtgatttcaccattctgcccaagcttcaccataaatttgatgtttgtttttgcttcaattttagcagaattctagccctgcgtggtgacaggcacctgtattctcggctactccggaggctgaagcatgagaatcgcttgaatttggcaggcaaagtttacagtgagccgagatggcaccattgcactccagcctgcacgacacagcgagacaccatctcataaaaaaaaaaaaaaaaaaaaaaaaattagcagaatttatgttgctctgataggggctcttttcaaactgatgtttatccttcttagtgcctcaaactaggttttgctcagacatgttatgacaagttagtacaagtttattttggtgcaaaaaatttttcaaatccatgcatagtttcttctttttcttttcttttcttttctttttttttttttttgagacaagatctatctctgtcatccaggctgaaatacagtggtgcagtcttggctcactgcaacctctgtcacccttttcccacctcagcctcctgagtagctaggactacaggtacataccactacacctggctaatttttgtattttttggagagatagggttttgacatgtttccaaggctggtctcaagctcctgagttcaagcaatccatctgcttcagcctcccaaaatgctgggattacaggcatgagccaccatgcctggccgtagttttttcataatattcattttccttgaaatttttgatgacccctcgtatctgtattcctgttttatagtatcacacatttattacgtgcctgtctaatacccattgctgtggttttctctgggaattcaaagaggagtaagctagtagctctgccttctagcacatgggctagtggaaagtcataaagagccatttaatgaccactgtcaatgtctgtgtaagggcagtgaagagcacgctgctgttgataaggatggctcacatttatggtacacttgcaataccttttacccatactgattcatctcattctcacaccaactctgtgatgtggtacagttattagaagaggcacagagaggttaaatagtagctggtaattagattaaccaacgttagaaactgggtggtctggtgtgagagcacaggcttttaaaaagcggtaagaagaggggaagctgcagcctagttagggtgactgttgtgttattgaagatgaggggatgaggactttgtgcatgtgtgtggagcctgggctgtgagggtcaagggacaatgggaagggacattaaaaggttatggttaaagtaagcctagacggactagtttgaagtcaaatagtagaaggtgaggatagagagggggatgggaaccagattatgaaaataggcagtatctcttttttatgtcaagtgttaccctgaaattccgaaactatatttcttatgaacatactgattacattcattgttatttaaaaatatgcatgtacaatatgggtggaaatgataatgattgtaatgagagtggctcacaattccaaagaagttgggggtttctgtgggtttattataacttacggttttttttttttctgatatggagtctcactctgttgcccaggttagagtgcagtggtgcgatctctgcttacttcaacccccgcttgccaggttcaagcaatcctccccgctccgcctcccaaggctcccattgcaagcatgcaccaccacgcctggctaatttttatatttttattagagacagggttttgccatgttgccaggctggtcttggattcccaacctcaggctgtctgtccaccttggcctcccaaattgctgggattacaggcatgagccactgcacctggccagtttattataatttaaaaagcagtctgttattagtaggcttcggaaatttgtttcagggagtggtaaggaaggagttctagaaagtggttgtatattgctgcatgcttgttttcctctcagatcacaaagaaaatgtaaaggacctgggtgagttccaaaaattaaagtagccgggnnnnnnnnnnnnnnnnnnnnnnnnnnnnnnnnnnnnnnnnnnnnnnnnnnnnnnnnnnnnnnnnnnnnnnnnnnnnnnnnnnnnnnnnnnnnnnnnnnnnnnnnnnnnnnnnnnnnnnnnnnnnnnnnnnnnnnnnnnnnnnnnnnnnnnnnnnnnnnnnnnnnnnnnnnnnnnnnnnnnnnnnnnnnnnnnnnnnnnnnnnnnnnnnnnnnnnnnnnnnnnnnnnnnnnnnnnnnnnnnnnnnnnnnnnnnnnnnnnnnnnnnnnnnnnnnnnnnnnnnnnnnnnnnnnnnnnnnnnnnnnnnnnnnnnnnnnnnnnnnnnnnnnnnnnnnnnnnnnnnnnnnnnnnnnnnnnnnnnnnnnnnnnnnnnnnnnnnnnnnnnnnnnnnnnnnnnnnnnnnnnnnnnnnnnnnnnnnnnnnnnnnnnnnnnnnnnnnnnnnnnnnnnnnnnnnnnnnnnnnnnnnnnnnnnnnnnnnnnnnnnnnnnnnnnnnnnnnnnnnnnnnnnnnnnnnnnnnnnnnnnnnnnnnnnnnnnnnnnnnnnnnnnnnnnnnnnnnnnnnnnnnnnnnnnnnnnnnnnnnnnnnnnnnnnnnnnnnnnnnnnnnnnnnnnnnnnnnnnnnnnnnnnnnnnnnnnnnnnnnnnnnnnnnnnnnnnnnnnnnnnnnnnnnnnnnnnnnnnnnnnnnnnnnnnnnnnnnnnnnnnnnnnnnnnnnnnnnnnnnnnnnnnnnnnnnnnnnnnnnnnnnnnnnnnnnnnnnnnnnnnnnnnnnnnnnnnnnnnnnnnnnnnnnnnnnnnnnnnnnnnnnnnnnnnnnnnnnnnnnnnnnnnnnnnnnnnnnnnnnnnnnnnnnnnnnnnnnnnnnnnnnnnnnnnnnnnnnnnnnnnnnnnnnnnnnnnnnnnnnnnnnnnnnnnnnnnnnnnnnnnnnnnnnnnnnnnnnnnnnnnnnnnnnnnnnnnnnnnnnnnnnnnnnnnnnnnnnnnnnnnnnnnnnnnnnnnnnnnnnnnnnnnnnnnnnnnnnnnnnnnnnnnnnnnnnnnaaactgccttaggggagggattataggcatgagcctacgcccccagcctagttatcatatatctctactgaagaatgcaagattataatagaaaggaattatttttgaactattatgttgtaaatattaatttattgaagtaggtcaaatgctaggaaaggattctttttactattaaagtaattcaggcatacggtaattctataaaagtagtatgggccgggcgccgtggctcatgcctgtaatcccagcacttcgggaggccgaggcgggcggatcacaaggtcaggagatcgagaccatcctggctaatacggtgaaaccctgtctctactaaaaatacaaacaattagctgggcgtggtggcgggcgcctgtagtcccagctactcgggaggctgaggcaggagaatggcgtgaacccaggaggcggagcttgcggtgagccgagatcgcgccactgcactgcagcctgggcgacagagtgagactccgtctcaaaaaaaaaaaaaaaaagtaatatgaataccttttagtcaccatccagtttaaaagaaaacattgcatcatagttgaagcccttgggtctcaattgctggccccatttgttcttctccctgtcgtttcccccagttcattttgatcattgccatccatctactttatacttttattaaggatgtgtggtgtcatattgtgtgttttcttctataggttgtttctgttgttgaaccttgattttgagattgacttttgttctagttccttcttctgagctgctgaacacgccatagtgtgcccattttactgttgatggacatttaattgttctttcctcccatttttctctattatgaatgatactgcaataaacatctttatggatctccttttgcatgtgtgagagacattgtgtagttataatccaaggcctggaactgcttagtcatagggaaggggctgtgtcttcatgttcataggctactgccatacgcagattcttcagttctctctttgaaatgggaagctctgaggattaagaaattatttttttaaacctgtatgctgattttttttgaagctgtaatggcgctttgcatacttgtggtttagggggtaaatggaatatacacaataagaaatatttactgtgttaatggttcataacttgtgacttatgtaaagttccatctaatttaaataataaataataatactggctgcatagtaatacctaggaccacaatgagagactccgtaaaaaagaaattcctaaactgtattttttttttttgtatatctgtgcccacctgtaatttgacttacagtgaatgtggcttatttgggcaggggagacttttgaacaggtgataacatttttgcgtggccttaaaatttctataatttatttgaaactctttttaaaccatcatgtctcaaagtgatcaagtagaaaggatcaggtgccttaattacgaagaatggcataaatcatgacaaggtctttttgaagtcacctggaatgctccctttgggtgaaagaaggttctgttctcttatcatattcttcctgctcaagttgcccaggtgtagtttgtggtttccaagatacctgttggactggctttaggctgataatattggttccttcatatttttttcacattgtttttagaaattttatgtaactgcattcttcaataaggctctaaaacaattttcctattatggtatagttgcttctccaaacacttaactacctactgggaggaatcaataagagagccacttctggtggatcttggccacaaggtctgtgatgtgtcgttatattgcagagatcttttgaggaaatgcaacgtgaaagatctccttgacattctatgatgaagaaattaaaggtaaactgcatttatgcagatttaatgtaggtagataactgacctgtttaattcatgtgaggcctcagagggtcttttatattctctgctttccagctagtttgacctaagtcaaaccttttctccccagtggaccatgttacttttattttaatcagttgatttttttaaggctttattgagtataattgatataccagaaacctgtacatatttaatatatacagtttgatgagtttggacatatgtacacaccagtgataccaccacactcaaggtcataaacatctgttgcctccaaattttcctgtgtcacttttttttgtggtaagaacacttaacatgagattgaccctctcaacacaaaagtgtacagtaccgtatcattaactataggcattatgttgtacacagatctcgagggcttattcatcttgtgtaactataactttattcccattgaacaacttctcatttccctctctacctataccctggcaactacctttctattttcagcttttataagttggattattttagataaaccacataaaagtggaattatgcagtatttgtccttctgtgactgattttatttcacttagaatattgtcctcaaggttcatccatgttgttgcaaatggtaggatttccttttcattttattttattttttgagacagggtctcactctgttacccatgctggagtgcagtggtgcagtcatggctcactgcagcctcaacctcccgggcccaagtgatcctcccacctcagcctcctgaatagctgggactagaggcatgtgccactattcccagctaattattattatttgtagagacagggtcctcactatgttgctcaggctggtctcgaactcctgggttcaagcagtcctcccgcctcgacctcccaaagtgctgggaggtctcactcccagcctaggatgagcctcactccctcactcagcctaggattttctttttaaaggtgaaataatattctaatgtatatatacattgcatttttaatagtcttatttcatgacattaaataagatatacttatttaacgtcaatcatcgtttggattgtttccatgtgacttagagctttaaaacaggtgatgttaaagttgaaaataaaggcctgtaatcccagcactttgggaggctgagggaggcagatcccttgagctcaggagttggagaccagcctgggcaacatgatgaaaccctgtctccactaaatatacaaaaactagctgggcgtggtggtgtgtgcctgtaatcccagcaactcaggaggctgaggtgggaggatctcttgagcccaagaggtggaggttgcagtgagccgagaccgtaccactgccttccagcctgggtgacagagtgagaccctgtctcacaggcgcacacacacacacgcgcgcgcacacacacacacatgcgcgcgcgttgaaaacaaatgagaaaccctatggacgtgggggactagacctgtacagttgtcaagcctggttttgagaaagtaactgactccagctgggtgtggtggctcatgcctgtaatcccagcactttgggaggccaaggccaggaggattacttgagctcaggagtttgagaccagccaggcaatatggtgagaccccatctctctctcttttttttttttttttttaagttactgactcctagggggcatttaagcggttgaatatcagcatttctttagctatttagcacctcccttgtgactttaaagtacctagtgattttttttttttggatggagtttcgcccttgttgcccaggctagagtgcagtagtgtgatctcggctcactgcaacctctgcctcccgggttcaagcgattcttctgcctcagcctcccgagtagctgggataacaggcatgtgccaccacgcccggctaattttgtatctttagtagagacggggtttctccatgttggtcaggctggtctcgaactcccgacctcaggtgatccgcctatcttggcctcccaaagtgctgagattacaggcgtgagccaccgtgctcggcctgtgattctgatttctatatatggagccatctaattataattatttgttgcaaattatcttttctactgcattaagtttccttatgggctgattaaaatgttctggttgacagctcacctggttatttaaattgtttgctttatcttctggcttagcaattgtacttctaaaaaactatcttaaggaaaaaagtcaaggatatatgaaaatatttcttatgagaaggttcatcaagggccgggcccggtttctcatgcctgtaatcccagcactttgggaggccgaggcaggcagatcacctaaggtcaggagttcaagacaagcctggccaaaatggtgaaaccctgtctctactaaaaatacaaaaattagctgggcatggtggcgggtgcctgtagtctcagctactcaggaggctgaggcaggagaatcgcttgaatcctggaagcagaggttgcagtaagccaagatcatgccactgcactccagcctgggcgacagaacgagactccatctcaaaaaaaaaaaaaaaaaaaaaaaaagattcatcaaaactttgtaattaatacaaagttttgtaattaattaatacaaagttaattaatacaaattaatacaaagttttgtaatacaaaactttgtaatagtgagaagtttggaaacagtagatattcaattatttaaaattatttgtagagtgcagtggtttaaaagtatagcttctggattcagactaagtgaattctgatagttgggctgccacttagaactttatgactttgggcaagtttctttctttctttttttttttttttcttgagatggagtctcactctgttgcccaagctggaatgcagtggtacgatctcagctcactgcaacctctgcctctggggttcaagtgattctcgtgcctcagcctcagctgggactacaggcacatggcaccacacctggctaatgtattttagtagagacagggcttcaccatgttgcccagggtggtcttgaactcctgagctcaggtgattccgcccctccccacccgcctcaccctcccaaagtgctgggatcaccggtgtgagccatcacgcctggcccgggcaagtttcttaatgcaattgttaattgtagcttaacagctgtccttggattatttgagtatgaaagaagttattaataccttgtaaaatgcttagaacatgtctggtccatagtaaagctccataaagatttagctattgttactgttaaagtgttagatgcacagatactcacaacatttttcaaatggaaaagaattttaaaacagcatgtatagaagccggtgaggtggcaagcacctgtagtccagctgcatgggagactaaggcagaacgaccgcttgagccgaggaaggagtttggggctgtagtatgggatgattgttcttgtgaatagccactgcattccagcctgggcaacctagtgagaccccgtctcttaaaaaaaaaataaaaccccaaaacaaaaataaaccaaaaaccccaacaaaacagcatgtataatgtatcattaaatataagaataggaaaaaaaaaccggaatgatctactctgggtgataggacaatctcttttggcttctgtgttttttctctcctacaactcttctgttttataactgaaaaaaatgttttgcatgtgaattttagactggggtctttgggtaaaagcacctagagattactggcaggttaattctaaaaagggcaatttgttttttcactttatctcagagtttcatttgtttcccagtgattgactaattattttaacaaagtaaagcttcattgttgtgtgtatgcaattgaatcgaaaatatacttttcatacaaagacaacttcctaaaggtaagtgtaaacttgtatgtagtttgttaatcttattgtggtattttgtttttcttaaacacagtttcctgttcttttgcttttgcatgtcaacattgctgaaaataaatattttgctctgcagggatagtaagccagatggagtggtatttataatttgaggaaatagcttaaactttgtcatcagtttaaattgcattaaaaaacctgaagcacattgattagagttgtttaaggtagagaaccagaaatattctaaatatcctatgcctaacctgtcaaaactgttcctgaaatatatagagagggaaagagtacctgaggagctcaggaagagtgatggcctagagcgtagcttgaattgagcagcagaggtttctctggagtgtcctgtattatcttaggcaaatttgtagtcttcttaatagtatctgtttacatatcaatatgttttctgtccaggcaaggtggctcatgtctataatcccagaactttaggaggccgagatgggcagatcacttaagcccaggagttggagaccagcctgggcaacatggagaaaccccatctccgcaaaaaaatacaaaaattagctgggcgtggttgcacatgcctgtagttccagctacccgggaggctaaggtgggaagatcacctgagcccaggaggttgaggctgcagtgagctgtgtttgcatcactacactccagcctgggcagcagagaccctgtctccaaccaaaaacaaacaaacaaacaaaaatatatataatgtatatgtatatgtgtggttttcctgtcaatttttaagtagaatgtcctcagatacatatgccatgtttatcctgttacttccaggatacctgggaatacccagaggtttgtgtctatgttagtgtgagaagccctaacacatttttgtgtagagacagcaaaacctgtctctacaaaataaaaaataaaaaaattagcttagcatggtgccgtgtgccagtagttcccagctactgtggagaatcacttgagcctgggaggttgaggctgcagtgagccatgatcacgccactgcactccagccttggtgacagcctgaggactttcttatggattaaggtgggaattatttatggtttgcatgctgagagagattttctgaattttttcaacaaatattgaacacctgcccaggttgtgaatttttgtggagtggatcaaaaggactgaaggaaatgaacaaataattttggcaaaccattattaagtaatgaatatgtattgtattcattaattaatgtattaagtgatgaatatgtattgaatatgtgtatcatcacagtaactctatgagggaggttctattatcaccctcatttataggataaagtacatgagagatgaatttatccttaagaaatattttcactttggtgaggcatggcagctcatattttcactttggcgaggcatgacactttgggaggctgaggtgggaggatggtttgaagccatgagtttgagaccagcctgggcaacatagtgagaccctgtctctatctttttaaattataaaattttaaaaataaagaaatttttttttattttgagaagtttgtgtgctttaggtgtgtattctgtttcattaagccaaagtttgtattactagccttctatcctgtcttcccatccttaccaaaaaaagagaaaaagaaaaatagttttactcctgaggttaagaatggggcatgttgtatcaatgtttatttgtgtagatattcttttgaatttttaaaaattggggtatcacttatatacaataaaatgcacaaatcttaattgtacaatctaatgagtctctatgtttaactaccacccagatgtagaaatgcagtacatttctgttacccaggaaggttcctatgtgactgttcacaatcagtaatctccccagcccttggctagaaccactagtctgacttttatcaccctgagttaatgttgccgcatcttgaacttcatataagtaaaatcatgcagtatgcactcttgcagctgacatcttttgcccaagtcagtgccacacattgagattcatccatgttattgcatatatcagtaattcttcattgttgtaaaatattacattgtttgaatatatcattatttatccattctcttgatgaacatttggattgtcaatcagctgctttgatcattcttgtagaacgtgtcctttggtggacataacccttcatttttcttggctatatatatacctaagagtggaattactgcattgtagagtaggtgtatcattggctttagtagatattaccagttttctaactgtgttagactgacgtacatgcccactagcaatggatgagagttctgttttctccacatccttgctaacagtctctttagttgttccatttttaattgtgtcttcaagtaggaagcaccctcacttacaggagaaaggaactcccaaggaagtttctgattagtgcaagttgggtgggatgaagatgaataaccaatacatagcctaaagctttgctcagcatcttattcagatgtagtatttatttcaatgacaaccaaaaataatttctgaatggaccctccctacccatctactgtaagttaacattgtccaaattctagtctaattatgcttatgttcttcttctcccctcttatattcatgctgaaatattaaaaaatcactgcaaattcctatggaaaacctcatacttcaaaagggatcagtgtttggtttctctctccattttttttttttttctgttgaaatagagtgaaagacccaggaataatatgcctgtgtgtacattttgcagatctggtaataataacaactgtagcggttactgagggcctcctctgggtcaggctctgtgagaagtgatttgtattccttagttcatttactttctatcatgacccaataaagtatatgtatctttgctatccccattttatagatgaagaagctaaagctttgagaggttaagtaatttgcccaagtttatctagctagtaagtgcagaagctagaattttaatctaggtctgtctaactacaaaggatggaattaggcccctttcttatgattattaataaaaatgatctctatgtagttaggatttactaacccaatttcttttatcttttaaactgagaatccctccacctcctggcaccccagttctggtaaaagataaatgaaacccatagttgtttttctcagcaagggttttatttatttatttatttattttattttttttaagacagagcctcactctgtcaccaagactggagtgccgtggcacgatcatggctcactgcaggctcagcctcccaggctcaagtgatcttcctgagcagctgggattgcaggcacacaccaccatgctcggctaatttttttttctttttttttttttggtgagacggggtcttgcactgttgcccaggctggagtgcaatggcatgatcttggctcactgcaacctccgcctcccgatttcaagtgattctcctgtctcagtctccagagtagctgggattacaggcatccaccaccacgcccggctaattttttgtattttttagtagagacggggtttcaccatgttggccaggctggtctcgaattcctgacctcatgatttgcccacctcggcctcccaaagtgctgggattacaggcatgaaccaccgcgcccggccccggccttgtatttttttttatagagacagggttttgccctgttgcccaggatggtctccaactcctgggctcaagcagtcctcccatctcagcctcccaaagtgctggggttacaggcatgagccactgtccccagcctcccaaggttgtttttaggccctttgaggcttataaaatagaataaatgagaaataggtccaaccttcaagagcactgtgtatagcacccaagattagaaatgcatatgttcagccatgacatctatggaaagtacagaggacaggtcctgaggaagtgctggggctgttggtggtaccagcctttgtgtagcagaagatgtttgagctgtgctttgcaaagtggctggatcatagacatgtgaacactaggagttgggccagtgggtggagatagaatttgtgcctcaaattgcagatacttctgtttggtgggtacatgtgtgacaggcataaacttagtgagtaggtggccccagatttggaccaggtcagggagactcttgaatgtcaggccttgtggccttttgaggcatttcccgctggacgattagttgggcagtggtgtggcagcatgtggaggtggagaggctgatggagaacttgcagtaggatgtccatcatgtgggactgaaggctagctgggaggtatatctgggctggagaaaatggacatgggactcacaaaactggttgtaggagctatgggaatagacagaggctcccggctagagctctagggcatagtgggttaaccagcggtgggtgtggtgtcagaatcactcataaagctttttttttttttgagatggagcacgttcctggctcactgcaacctccacctcctggattcaagcgattatcctgcctcagcctcccaagtagctgggactacaggcatgcgccacaacacccagctaatttttgtatttttagtagagacggggtttcatcatgttagccaggatggtctcgatctcttgaccttgtgatccgcctgcctcgacctcccaaagtgctgggattacaaggatgagccaccaagcccggccaagcttcttgtttttacattgattttttttttttttttttttttttagagataggggctcgatctgttacccaggctggagtgcagtagtacagtgttggcttactgtaacctccaacttctggactcaggtgatcctcacccctcagcctaccgagtagctaggactataggtgtgtgccaccatgcccggctaatgatttaaaaaatgttttgtagagacagggtctcattatgttgcccagctggtctcaaactcatggcctcaagcgatcctcctgccttggcctctcagggtgctgggattaaagtaaaggaatgagtccagctactcatacagctcttgaaaaccctctggcttggtctgaccctggagcttctaattggtgttcttggggtctcagcagccatctgggttttttttttttctttttttgggatggagtctcgctctgtcgcccaggctggagtgcagtggcgcgatctcggctcactgcaagctccgcctcccgggttcactccattctcctgcctcagcctctggagtagctgggactacaggcacccgccaccacacccggctaatttttcgtatttttagtagagacagggtttcaccgtgttagccaggatggtctcaatctcctgaccttgtgatccgtctgccttggcctccgaaagtgttgggattacaggcatgagccactgcgcctggccagccatctggatttttaaaagcaccttggcttctagtgcatattctctgcccactctgcaggtaagaagcagtgaggaaaatggtcctagggtacccggttaggacatagtcatatctctgagttctcagggaactcaggaaaaatcatgccgtctcgatagccaagttatcagtgtcaaatgtctcgaaaagatcttgtttccaaagtcgtcatgcttaacacttccaaaacaaagagtgtgccaacttctttgggcaagccatttgtgggcaattttgaggatcagaaaagctctttggtgaaataaactaaacggtctccctgaatagctttcacagtgtgggccttgcagggagcacaaggccagcccaccctatacatgatattctttacgattataaagacactttttactgtttctcccagttttcctttttcccacactaacatccccagtatgctcttgtgtagttttcagagcctttgttatgattccctctgaactgttgctctttgccagtattgcttttcaaataaggcaaccccaaatttacgcaccagcattgtttagtgggaccatttatttgtctcttgtcatgtagatgatacacgcatgtatttgcaggggcagggacaggggatccccagtataaactttaaatgtgcctttaattctatcttggattcaccctgtttgagcctgtgatctggcttaccctcccagatgtcattggccaatttgataaacaaattcgattatctccatgccaaagaggaagcagtgcctcaaggcaagcctgaagcagcgctgccatgacaggaccttgacaggtccttgataggacctttgtgctgtgctcagtgatgacctcagtgatagttgtcctcagccaggaggtgtttctttttttttccttttttttttttttttttttttttgagacagagtcttgcactgttacctgggctggagtgcaatggtgcaagtctgggttcactgcaacctctgcctcccaggttcacgggattcttctgcctcagccttctaagtagctgggattacaggtgcgcgccaccacacccagctaattttttgtatttttagtagagacggggtttcactatgttggccagactggtctcgaactcctgaccttgtgatctgcccgccttggacttccaaagtgctgggattacaggcgtgagccaccgcgcctggccgagttgtttatttctaaaggatttttaggagtcttaaaaaaagtcttttcctgtaccttaaacaatggtttcactaaagggaattgctgtcttagatgtttcgtgttgaatcttacacatttttgcctaagctgtatcatcctcattggaaaacccttgcaccgagtatttacttttagtcacactttgctataaactttatgacttgtgcatgcgcgattgtatggctggctctttgccttttgcctctactgtgaccaacactgatttcttacaggcttgtaaagtggtttccaagatctgtttgctgtgtgtgcttggctgcatttgatataaatagatttgagattagtgtttgaaagtgccatatgaccatatacagagctgacttactaaggatatgttactgcatttcagacacatctagtaatagaaaaatcagtgtcttaatgggctgtgcctctctcgtgtcccctcttttaaaaaaaaatttagttacaactaaatgtcaggaaattttgtagcttacctagtttaagtcccaagatatgtggagagacaataaaaatgataatgacaatggtgcctggagatgcgtatgttaacatatgttaagaagttatttttaaggttgcccacttaatgtttttgtttttatttttgagatgaagtctcactctgttgcccagactggagtgcagtggcttgatactggctcactgcaacctccaacctcccgggttcaagtgattctcttgcctcagcctcccatgtagctgggattacaggcgcctgccaccacacccgggtgatttttgaatttttagtagaggcagtgtttcaccatgttggccaggctggtcttgaactcctgacctcaagtgattcaccctcctcggcctcccagagtgctgggattacaggcataagccaccatgcctggctggttgttgttgtttttgtttgttgagacatggtctcactgttacccaggatggagtgcaggggtgcagtcacagctcactgcaacctcgacttcccaggctcaggtgatccttcaccctcaatctcctgagtagctgggaccacatgtgcacgccaccacacctggctaattcttgcatttttctgtagacatggggtttcaccatgttgcccaggctgttctcagactgggctcaagcaatcctcctgccttggcctcccaaagtgctgggataacagacatgagccacctcgcccagctccatttaatgtttaattgtaggcttggtgactcttatgtattaattactagatattcttatttggaattattagacgtgctaaggcaataattttgaaatttacaacagactagttggtgttaaggtgttataatagattaccatattttgcaatatattggttatttccttgttgaatagagatgaggaaggatggtattttggctctaaattagagggctgaggttctaatggcaaaattaacattgtagttttacattgcttgaataatgtaatcttcttaatagatattatacttaattttgctttaaagacaatgttcattgataaactttctgtatctttcagtgtgttctgtagcacagtgctttcttcatggccatcgcaggtgtttgggctttttttttaaacacgtctgaggactgcaaaggtgtttttttctccccctccccctccccccctcctctttcttacttagactgttgttgtccaggctgacctcaaactccagagagcctcatgcctcagcctcctgagtagcttggaccaggcttggctcgaggactgtgattttatagacattgtttccatcctgtagaggaaacagatgggttaatttaattgttcagctggtgcttgagcacactctgggagtgtccaatccagagatgaatgaggattcttgctcttaattcagtgttgttttttgcttcatcttgcttctaagagagttccttgaatatatgatggaattatgtagtggttactgcagtaatcacactcttattattttctaattatgtggaacttgggaaatgttgattttgtttcagtatatgatttgcagtataattctatttacatgtaaaatcttgtctgtgttagtttgccttgacaaagcaccacaaacaaggcagcttaaacaacagaaatgtgttgtctcacagctctgggggctataagttctggattaagatgttggcagggtggcttccttctgagggttaggagggaaggatctgtcccaggcctctctcattggtttatacatgattgtcttcacccagtatctttacgtcatcttctctctgtacatgtctgtgtccgaatttccccttctcttttgagatagggtctcactgtgtcacccaggttggagtacagtggtgtgatcatgaatcgttgcagccttgatcttccaggctcaactgatcttcctgcctcagcctcctgaggtagctgggactataggcatgtgccaccaggccttgctaatttttttatgttttaaaatttttgtggagatggggatctcactgtattgccctggctggtctcaaattcctgacctcaagtaatcctcccacttcagcctcccaaaatgctgggattacaggcatgactgacccatcacacctggcctaatatccccttttcttagggacatcagttatattgcattaggaaccatgctgatagccttaacattttaacttgatgacctctataaagaccctgtctccagagaagatcacattctgagttattgggagttaggacttcaacatatgatttttgggaggacacaaatcaatattcagcagtatctttttttttttttgagactgagtcttgccttgttacccaggctggagtgcattggcgcaaacatggctcattggagcagccttcacctcctgggcccaagtgatcctcctgcctcagcttccctagtagctggcactcccatgtcaattaaaattttctgtagagatggaatcttaccgtgttgcttaggctggtcttgaattcttgggccttagcaattctcctgccttggcctcccaaagtgctgggattacagcgtgggccactgcgctcagcccttaacggtgtctttaacagctctccagtagtgtatctagagagcactgcctgcgggatggtggccatgggacccagcttggaggctggccctcaagaatcacccggttggtggtgggctgttagtggatccccttctccatggggcacaggcaagtctggtttggaaaaggatgatgttgcttcagtgtcagtttgccagtttttcctctgttctccccactctgattctgactagaattaatttggtagcactgagaagagtcatttctactttggcacagtaatcttgcccataatctgactaatttttatttttatttttttgagacagagtcttgctctgtcacccaggctggaatgcagtggtgcaatctcggctcactgcaacctctgtctcctaggttcaagagattcttctgcctcagcctcctgagtagctgggattacaggcatgcaccaccacgcccagctaattttttttttcttttgctatttttagtacagatggggttttgccatgttgtccaggctggtctcgaactcctgacctcaagtgatccgcccgccttggcctcccaaagtgctaggtttaaaggcatgaaccactgccccggccccataatctgccaaattttagattaaactatgtattccacttagaactaattcaccgtggctgggcacggaggcttctgcctgtaatctgaacattttgggatgctgaggtggttggatcgcttgaacccagggggttgagaccagcttggtcaatatagtgagaccgtgtttctatgcggggggcgggggtcggtgaagccagcctgtccaacatggtgaaacctcatctctactaaaaatacaaaaattagccacgtgtggtggcacacacctgtaatcccagctactcaggaggccttggcatgaggatcccttgaacctgggaggcggaagttgcagtgagccgagatcatgccactgcactccagcctgggttgacggaacgagactctgtcaaaataaaataaataaaataaaatacaatgtaaaataaaataaaatagaatgaattcactgataaagttgacttctctcatctccaagtaaatgatttcattttctcctttgttccttgcatgtatgctgtgatttactgactatcaagaactcattacaccagtacgtatcccaagacaaatcagctccaaagtggagtgagtgcaaggggagagctttaattcaaaactgctttatggaggaagtacaggttttcctctaagctgcactgttatagatctgtagaagttttaaatccatgtaatgctcatcagtttttagtttagtatttagctgtctgtgatgataagtaaataatttacctttttgaaggcctgtgatatactgtgtcttcattgcttcatttaagaggatgcaacatcaggattttcaaaaatacacataacgaagtgttgtgtaatcgtctgtacatggtttctttgataagagagaggcaggaatctgcgtaaagcaggtgtacagacatagtttgcccatgagacagcaagaagagccctgatgtcctaaaggagagccctctcctgaaatgcataacatacatatatatatttttttcctttttttcaaaaaatagagacagggtctcagtatgttgcccaggctgtctcaaactcctggccttaagtgatcctcctgcctcggcctcccaaattattgggattacaggtgtgaaccaccatgcctggtcttgaaatgcatatcttagtcactgttacttcttttaaattgttttaattgtataagataaaaaccaaaacaaacaaaaaaaatgctaccatttcaggagcatacatctagtcttaaaaatatcataaatttgggccgggtgcagtagctcacgcctgtaattccagcactttgggaggccgaggcgggcggatcacgtgaggtcaggagttcgagaccagcctggctaacatggtgaaaccctgtctctactaaaaatatgaaaattagccgggcgtgattgtgggtgcctgtaatcctggctacttgggaggctaaggcaggaaaattgcttaaacccaggagatggaggttgcagtgagctgacacagtgccactgtactccagcttgggcaacagagtgagactttgtctcagaaaaaaaaaaaaaaaaaattataaatcctttttattcccctaacttggatctcaggttaattgggatatgcctaataacaaaatttctgaacatgaggtttactagaaagaattattttttagattatttgtgatatatgtatatatgcatttgatagtagtggatgtgtttattggactcttaagtacttgctatgtactgtgggacatgtaggagtatatgaatatttgtcagctagattataaagcttaaaaacatattattgggcaggagtgggctatggggctgtgactactagtgggcctggggtttctttgtgggttgatgaaaatagagatggttgtgcaactttgtgaatatagtaaaaccatttaattgtatacttatgggtgaattttatgttatgtgagttatatctcagtgatgcttaaaaaatgctgttaatgaatttgcagtgctgaaaagattccaaagttgtgattctctacctttttctgttctccagatctcccaaagcagttgcagtgaaagataaagaacatcaaacactcttatcttctggtggtggggaaatgctgagtggccctgactttgtgcagtgaaagttgtttacacaagcctgagtctataaactcagagataaaaaaaatcacaccaggctgaagccccatcaggcaaaaacctaccagagaaatgggcctgcccgtctgatggaatatctgggatttcctgatgttggtcccttaatttgtggaccattttaggctgtcattaaagtagcagtctaaagtaagagaaaaattctgacatggaataatgtggatgaatcttgaggacattacatgaaataagccagtcactaaaaggacaaatactgtatgattacaattgcatgaagtgcctagagtagccacattcatagagacaaagtagaatggtagtcacagggaaatagggagtcagtgtttaatagtatagtttcttttttttttttttttcagacagagtcttactctgtcgcccaggctggagtgcaatggtgctatcttggctcactacagcctccatcaaccaggttcaagcgattttctcctgcctcaacctcccttgtagctgggactacaggcccacgccaccacgtctggctaatttttgtatttttagtagagttggggtttcgccacgtgggccaggatggtctcgaactcctgacctcaagtgatctgcccacccgcaaagtgctgggattacaggggtgagccaccacgctgggcgatacagagtttcagctggggaaggtgaaaaagttctggagatggatggtagtgatggttccacaatattgtgaatgaactcagtgtcaaataactatatactgaaaaatgattcaaatggtaaattttatgttgtgtttaatcacaataaagtaaatttttaaaaagtaagagtagtaaaatcactttgatgaaaagaaagggtgggaccagggtatttggattgtctaccaggccaggcacccttttcagtggtcttgcctctgtgcctgccttctgagtgtgaggaggatgatgaggatgcccagggcaggtctctgcctgctcccttcgttctggtccttccaccagtcacccatggagcatctcttgtgtttcagaaatgccagtgccttggcacaggagcaggataaaactgtgcccccaaggcacttttaatccagaggaaggttggcaaagatacatttgcttgaaaaatattgtcagggccaggtgtgttggttcacacctataatcctagcacttcccagtactttgggaggctgaggcaggaggatcacttgagctcaaggagttcaagaccagcctgggcgagacctcatctctacaaaacttcaaaaaaaattagccagacatggtggtgcaggctgaggtgggaggatcattttagcccaggaagttgaggctgcagtgagcgttgattgtgccactgcactccagcctgggtgacagagcgagaccctgtctctaaaaaataaataaattgtcaggttgcgttatgctcccctgtggtagaagtgtgggtggtgttatttaggtagtacttggagagtgcccgtcagatgtctggaaacctaatttaaagtagtaaaatcaacacgtgggtgagacttgatacccacagacatatttttttttaaagctagagtgtctctaaaagaatgagacttgtttatagcctaaaaattctccatggaatgaagatcctcctggtgccaaaggaactgtgtgcttttggtgaggagcccatcagcatgaggttttccactgactacggtttcccaaggcaacttaagagacatagtcaaggccttaaggaattgatgggccagccatggaggagactcaaatacaaacacaatgtttttgcgctttgtaagcatggttatggagcactgtctaaactagtgaaagtaaatttaataagaaggaattacggcaggcacagtggctcatgcctgtaaccccagcactttggaaggctgaggcgggcggatcgcttgaggctgagagttcaagaccagcctggacaacatagtgaaaccctgtctctactaaaaatacaaaattatccaagtatggtggcatacacctgtagccctagccacttgggaggctgaggcatgagaattgcttgaacccaggaagtggaggttgcagtgaactgaaagtgaaactctatctcaaaaagaagaatgaattatgctgggcatgatggctcacgcctgtaatcccaacactttgggaggctgaggcaggaggatcacttgagctcaaggaatttaagaccagcttgggcaacatagcgagacccctgtctctacagaaaataaaaaattagccaggtgtggtgatgtacacctgtagtcccagctactcaggaagcagaggcaggaggatatcttgagcccaagagtttattaaggctgcagtgaaccatgattgtgccactgcactccagcctgagcaacagaaaaaagaacaaattgtggaagagacatgttaaagtccagtgggtcagtgaccaagagcccagagactctagtttcaaacatacacattccatggtcctgcctgtgtttttagacagatcattctcagaggcagccttcatctgttaaataaattctttacttggtgggaggaggtgagagagaggtggagtcagaggtgaagtgtggggataaggatgtgatatttttagcacagtttgagatataaagtaatttcctgataagattattcttctcctaaatggaacctgtactgtcctcattctcttactaatgacaaggtcagagcaaaccgacaaacatggaagaacagggttcctagccctggtggtgaattccgaggcggtctgagcatactccaaaaagttggctttaggatacagaggggtccatttttgtggactgctttattttggttcaagggttgtctgtgaattttacaataaatcagagtctttgttttcctattgctgagggaggggagggagaggtttgcaacagtctattaatagaatatagcataatttgaaaggaaatgtagaaaaatcaaatgctaataataataatattgctgggcatggtggctcatgcctgtaatcccagcactttgggaggctgaggtgggcagatctcttgagatcaggagtttgagaccatcctggccaacatggtgaaaccccatctctactaataatacaaaaattagctggatgtggtggtgcatgcctgtaatcccagctagtcgggaggctgaggcaggagaatcactcgaacctgggaagcggaggttgcagtgagctgagatggcgccactacactccagcctgggtgacaaagcgagacttcatctaatacgtgtgtgtgtgtgtgtgtgtgtgtgtgtgtgtatgtatgtgtatatgtgtgcgtgtatatatatgtgtgtgtgtgtatgtgtatatatatgtgtgtgtatgtatatatatatatgtgtgtgtgtatgtatatatatatacacatacacgcacacatatggcacgcactatgttgcccaggctgatctcaaactcatgggctcaagtgatccgcccgcctctgcctcaaaaagtgctaggattacaagtgtgagctactgtgcccatcctgaaatgctaataattattaacctaatgttgctggaaacaaattctttgttttttcaagaagagaaaaagtagataataatggtactgaaagtggtatttctttttactttctcacaattccatcatcattaaccatttacattcaggagccactatactaggcactctaaaggcacctttaaagagctgtctcattgtatgtaagggtgtgtacactgagaagtctgtattgcccagtatttatgagaaagctgctgcttgcacctggcttggtgctatgagggacaaatacaactttgtgtttcataaggaagattaatactttgacataattctaatttcttggcctttaaggagaaggtcacaaaatctttctttaaaaaaaggtagtgactatcatttgctttttctctgtaaaagcagggacatttctttttaacgtattttttcccaatggctaaaataatgtatactcaatgcagaagacttggaaattggaaaaaatggaggagcttttgaaaaaaaatttctttcaggatgactgttggttttgctttgagtcagaagcaagctttgttctgctgacttgtctcgtgcttagtagtcctttcctgcctcctcttgtgatcccttgaatttggaggatttggcggggagtcacatggccctctctccccatcaacttcccatcttcccactggagcacacgagctttcctccgaatctgtgagacttgagctcagtggttcatgttaatataatagaacacccctttcttgtgaacgtgtgctctcagggtttgtttccaagttgaggcttgacatgtcagaaggtgttttgtggaaggaaagagccctagtgctggaggcattgggttcagatcctggcctcactcaaatggtagccgtagccgtgagtaagttaaactcggcttgctcgtatgtaagtggtaataacaatgcttagatacaatgatctgatttacctggtacatagcaggttcttgggctgggcatggtggctgatgcctgtaatcccagcactttgggaggccaaggcgggaggatcacttgagcccaaaagtttgagaccaggctgtctctacaaaaaattaaaaaactagctgggcacagtgtggcgcctgtagtcctagctattcaggaggctgagatgggaggatcacttgagcccaggaatttgaggcagctgtaagctgtgattgccactgcactccagcttgggcgacaaagtgagaccctgtctctaaaaaaaaggggcgcagggggttctttccatgaatgtgatgctcacacaaccctgtttgttcctttcattcaaaaatgtatattgaagtcctagctagctgcttgggaggctgagatgggaggatcatttgaacccaggtgtttaagtgcagcctgggtaacataacaagaccccatctctctttttctttttcttttttttttttttttttttttgagacagggtctcatgtgttgctcaggctggagtgcagtggcttgatcttggcccactgcagcctccacctcctgggttcaaacaattttcctgcctcagcctcctgagttgctgggattacaggtgccaccaccacgcctggctaatttttatatttttagtagagatagggcttcaccctgttggccaggcggttctcgaactcttgacttaaggtgatctgcccacctcggcctcccaaagtactggaattacaggcatgagccactatgcccagcccccatctcttaaaaaaaaaaaaaagtgtattaagcaccagctgtgtgccaagccttgctctagatgctggagacaaaaatggagagagagagaaaaaaaaatccctgcctttgtggagctcagattcttgttggggaagtaggtaataagataaatgctgggtgtggtggctaacacctgtaatcctggcactttgggaggcagaggcaggtggatttcttgagtctaggaatttgagaccagcctggtcaacatggtgaaaccccgtatctacaaaaaaaaaaaaaaattagccaggcctggtggcgcttgcctgtagtcccagctactcaggaggctaaggtgggaggatcatttgagcctaagaggttgaggctgctgtgagctgtgattgtaccactgcactccagcctgggtgacagattgagaccctgtctcaaacaaagaaacaaaaacaagataaatgcctagatatctgttagattagtggtcagttgcaagaagtaaataaaagaggttgaggctgctgtgagctgtgattgtaccactgcactccagcctgggtgacagattgagaccctgtctcaaacaaagaaacaaaaacaagataaatgcctagatatatgttagattagtggtcagttgcaagaagtaaataaagcttccatggtctctgcgtgtgtatatgtgtgttgagaaggaatattgggaataatgagtgattgtagctgcatcttgtttccgtgtgaaatgtgtctttaagctcctgctggggtccagaccccatcccgtgttgaaatgggactccctggttgtttctggggcatggtgtctgtggaagaaggtggattctggatcttgcctggctgggaatgagggctccagcagcaaggcttagggtttgaaggggaaatagtgtgtgtgttttaaggggctcagggggagatgtctttggatatacatgaagagtgcttagaatagtgctaagcactcaataaattttagctattaacatatataatgtactgtgccttttgttataaaacgcagacctttaaatagaaactagaagggccacgttcttggaaaaaatgttcagtgttagaagcagtaattatgtattaataattatgtaagtgccaaatttggagcatgcacataatgttgatctctctctacccctcaccctttcattcccttaggccattttggaggaatacattttaaggcgggaacctcggatgtgttacgtaacaaaggccttcttgtgttactgtctagtggatcagtaggcaaaaggaagaaacacattctcaaagcatggtcagattccttaaaatgtacttagataagggggaaaagggtaagaaatctagtaaaggtgtggtgcatgctaattgatggggaagacaaaaaaagaatataatgatttccgaaactctgaccatatctaggttagtgacaaaatttgagtttgggaaaaatatacatatcagggatgcaagcttattctatgcagtttacacctgcaattgttattgttatttttttttttttgagatgaagtcttgctctgtcacccaggctggagtgcagtggtgtaatctccgcttcccaggttccagtgatcctcccacctcaacctcccgagtagctgggactacaggcacatgccaccatgcccggctaatttttgtatttttactagagatggggtttcaccatgttagccaggctggccttgaactcctgacctcaggtgatctgcccacctcggcctctcaaagtgctgggattacaggtgtgagccaccacccccggccatcctgcaatttctttaccacgttttagccttgccttttttttttttttttttttttgcctcaacagagaattctttattatgtccaaaagagcacaacaaaaacatcccaacaatacataaacctatatataaaatatagaatatctccaaatttttactttctatggcagcacgccaatatatgcaagagaacatattgatggggcaaagggaaaactgatttgggcaatgacttaattagtcaggcattaacattcagagacctggtaaacagcaactttagtcagaaaagcaatatgagaagagttcctgtgaagctgggatttacatacttcattctccgttcctggtcatttcatccacaacttgactgttgtcaatcatggttctttgcctttggagtggtactatgaaggtacagagaatagagaatgcccatctcagtaccaaaatttcaccatgaaaaatcataatagaaataacaaagcttaaaaaaatgctgcatttcagaagtatttaccctaataatttttaagaaagcttaccataaatacttctaggttagtgacaaaatttgagtttgggaaaaatatacatatcagggatgcaagcttattctgtgcagtttacacctgcataggccacccatctcggcctccctaagtgctgggattacaggcgtgagccaccacgcctggccctggtatatgttttaagtcaaccagttctccttaagtacttgtttcaacatcatgttattgtgtactacagaagcaatctctcagttatgaaaaataaaatcagtttcagggctcacaaagtaaaaagggaaattctttcccaatctccccttcccccaccacctggctttttttgtttaaaaaattaaattcaaatgtataagaccaagcaccggcactttccaaaaaacaaaaatgaagccaaatcacaaaattactcaatagttatagaagacagctctgattttggggggtcatctctggttgcctcagtacaagcattgatctttggctgctagccttgctttttagtttaaggaatatggatcctattattggtattaaaaattatacttctaaaactattgaaggctattactaattatttcagttctctatatagtattcgtacctcagtttaatagtgcttactaagtcatttaaataataggtctctgttgaaaaatattagaattgtacccttccacctctaaaaagtcagagttcaggatgaaaaggtatgaagtcctctgttggtcatagtattttgtgggctaaatcattgtctaaaatcagaaagacagcgcagtggaaggttctaggagttgcatggatctgggttagaatctcagtgcctctcgcaaccaattgtttaaaatgtgggcagattagtccctccatttccattttctcttttgtgaaataattattattttgcaaggctcatgtgacaaagtggattagtatgtgtgtctagcataatgtagatgctaaaattaaatgattgacttggcaccagtcagagtttattcacttttaatattgattttgaaagtctccagtcagattgcttaattgatacacattaatttttactgttagatttttaacttattattaaacaccaagtttgataataaatactattagtgaggtaggaggtggaacttgactccagaccagattgaagactggctgaaacagggaagaggtgaaagcacctctccataagacacgcccaccagtgccatgtcagtttaccattgccatggtaacacctggaaattaccacccctttccatggcaacaacctggaagttaccaccctttttctagaggtttctgattaacctgccctcttaatttgcatgtaattaaaaatgggcataaatatgactgcagaactgcccttgagctgctgttatggagcagtcacagagcttaacactgccacgtcagtaaagcagtttccttctaccgcagggtcgctcttcagctctttcctaagtgcagttgagaatcttcctgggctgagccccagtttgggagcttgcctgcccttcatcaatagcagtagtaatagtaatgatgatggtagccagccagatatagtgaagtgttctatgtgttctcagttactctgaacaagggccctcaaagggcaggtatttttatgttctttttgctgacaagaaactgaggcttagtgagactgagatttagaaagtaatgaaaggaaaaagttatgttaaatgatcacttttttatggagccatgcttttttgtgcttaatttattgcctattgctcatatgtgttttacattgttcagtgttttctcaagataagcaatgagaagtaacagctgtagtcaactttcttccccaagtactaagtaaataaggtggttaggtgtagaatggaattagctatggaatgctgattgtttattttctatgtaggatgaaagaaattaggcatgaagaaggaagataattttctacttgctatagatttgaaatagttttctttcttttgctttttttttgtttgacctactgaggagttcagagtggttaactgaaacagactctaaaaataccctttggtagcgtgctcactgaagtattttctgtttgtctaaaattagcagatttgagcagatttgagcagtgtactctggttttccaaagccttccattaggtgacttcttattctggtgtactttgttatctttctggataacacgtttgatgggtgttaaaaggtaaagccaggaatggctttactttctaacagaatactttacaaagcagtttccagcttagatacttcctcctacagggaaccttcccaaggtgtttccttggcagtgctcccttccttatcccgccactgtcccacatgtcccacctaggccttgaagggcagaacctgtgctctgttcactgttgtattccagtgcctgacacaactatttgcacagtatttaggtgctgaacaaatatttattgaatgccaaaattggttcatttactaagcagaaagaaaggaaaatattttttgttggcagtgtctgcaaagagatttgtcttttcccatgaaaattgagaagtggggacagaaaagcaagaaagtgggagcaaaagtaattgagatccacagtggctcaggagtgttgaccggtgcagggtgtggtagaagcccgttaatgggtaggggagccagatacggaggctcagctgggctgggggcaggtctgcaagaaatgggggggtgtggagaaggttaccagccgttaccagagttttcctctgcattgggaatttctaaggtgtgtttttgtttttaaaacaatatctgtactttcaaaaatatggtttctttgctgcaaggggaacacatttattttgtgaaagtaagtgtacctagttaacagtttccatttattaatttctggaatagtgttttggttacttggaatgtgtgtgtgtattttctttctttctttctttttgagacagagtctcgctctgtcacccaggctggagtgcagtggcgccatctcggcttactgtagcctctgcctcccaggttcaagcgattctcccgcctcagcctcccaaagtactgggattacaggtgtgagccactgcgcccggcctattttctttctattacaagtcccttgcgggaaagatggtcgtagctcctattctaaatgaacagaagttctgtcttagaaattttcccattttacaagtgttcaaagaggaccaaatttcatcctctttccctgcctgtgtcctggaatcagctgagaagaaagacaggagtaaggtggtcttcaattcagccagtcttcaattgttggagaccaaaatttacctttatgctgatcagggttagagctgctatgcagaacatggcttatctctgcgggcaagtggccttcctgaggctcatctccagagctgtgcagcagaatgttgccctcaaaagaggacagagggcaggactggctatgcatgcatgctcactcccttcttccagattcactgagcctgttttccttctgaattaagaggtaagaaagtaacacctggaaagatgtactttcccaaggtcacgcagatagctggcaacaggtttttctcctgggctctagaggcctttggtctgagtagaaagggcatggttatggggttggccaggccttgtgttcaccacattctgcttctgtgctcttagctttcatttctgcatctataccatggggttaaaatttctaccctcgggattcctgggagggttacctaaggtgtaactgttgaatgacctgaaccagtgctttgcactcagaatcagcaatgtaaatatcactcagccagcctggggcactttcctctatcaaaccttaccaatccttttcttcttcttcttctttttttttttttctcttcaattgaaacagggtctcactgtcttgcccaggctgaggtggaatgtggcacaatctccgttcactgtagcttccacttcacaggctcaatcaattctccagccttagcctccaagtagctataggcacgtgccatcacacctggctagtttttgtattttttgtagagatgggttttcaccatgttgcctaggctggtctcaaactcctgagctcaaagcgatctgcctgacttaggcttcgaaaatgctgggattacaggtgtgagccaccatgtccagcctcgttgttctttcttttaatcaccctggcttggcacctcagaaaacatggtgattggagtttagctttcagcagggtgggacttggatgttgactgttttaattttgatttttttttttttttttttgaaacggagtctcactctgtcgcccaggctggagtgcagtggcgcgatctcggctcactgcaagctctgccttccgggttcacgccattctcctgcctcagcgttgtgagtagctgggactacaggcgcctgccaccgcacccagctaattttttgtatttttagtagagatggggtttcaccgtggtctcgatctcctgacctcgtgatctgcccgcctcggcctcccaaagtgctgggattacaggtgtgagctaccgcacccagcccaattttgattttttaggaggaaaaaaaattgttcctaaggaagtcaagtcctaaattgaaagactttcatatattacacaaaccctagaaaaacttgggttacacctgggattgattttgaagtagggcgttgaactatgtgtcctgtttaacctcgaggagcaaatggctttccattctaaacattctcatttcttctctgggacattctttaggtgcttgtttgagtttctgttttgttaggcacattagaggactctatatgaacaagttcctaggggaggaaattggtgacttagatgaaagggtgaaaaaggtgaaaccttcacattattgtgtaagggattgtcccagaatgtgtgaaatttgatgtagtccttcttggcttcgttttttcctcagatgttctggatgaaacagttccccctgtcacacgtggagataaggatgtggctctaggcagggcatatcctgtgtttaagactgtgttgactcttcttttacagtgtctgccacttgtttcctgcctaggtctttagttttgagtgaagtacagctgtgaagtcctagacttgtaatgctaaggcgttcattatgttaaattcagtttctctttttcttttctctgcttcacatcagccttgtactttagcacgtttccagtccagccttggtagctgggctgctgttctccttgacccgtccctttgcaagcagcagaccacggccagggttgggagtccggctgggccactgaccgcagtgctgaggaaaggtggagcgggaggccctttcctcccagcctcgggcttcctgtgcaagccactgaggaggaaaaggagctggagggtgtgtgaaccctcaggttatacaagcagcacttctatgcaacaaagaaaatgtaaattgctgtaaattaccaaaaaaaaaaaaaaaaaaaaaattgctggcaatctgctttccagggcagatggagggtagcttttatttatacattggtcagctgattgagtaatgtttaaaaaccacctttacttctggcacttcttggcagtatcagttttttttttttaatggatagagaagcttttttattttacagataataactgcatatctttacctgagggagctcaggttcgctctatctagcagcttccacgtgtcatctctgtatgtgcagttggtgcctgcattaaggaggacggacagccttgtggcgttggtgcctctgttttgtgtctaaagctatttatttgggggtggctgccccaggagcagcacatcaaagtggtgttcagttatgctggccaagtgctgaattgcattgtgtttatttttatttccaaggttattttattttttacacatgaaagcctttttccctcctagattttactgtttttttttttttcctgattaacaaagatgtacagactgaggagaagtttttgaaaattttgtaaaaatgttgaaatttttatgcagaaagagaaacaaagtgggggcccatcccaaatctcaccaatcaggcagaaactatttgtcatactggatacggtttctctctctctctttttttttttttttttgtgggggggatcttttcattaaaaaactcttctgtaggtatcttaacagcacttgcatggtccttaggagatgaaggtgtttcgccatttctggagtgctgcacatgtagttttcttctttttaaattgtcagtggccctggccagattactaattccctactaagttgccagttgtgctagtaccccaccctccaaaatccatattgaccttctgtatcaaaatggctaagtcgtcagaaaccagcagtgggcaaacgttagggtctcagctttcctcctttctttcacttgcttggcttcattggctttgaatcggatagacccgggtaggaacctcacctagcccctccactaactttgtgtcctccggcaaaataaatctccctaagcctctatttcctatatgcaaaatagggatgatagtattacccaattccagggttattgtaagaattcagaggcaagttgtgaagggtgtggcatggtgtctggaatgggtgatgatacagttccctaaggggagctgctgccacctctgtgctggggactctccctttgccccatcccaagaatttgggttggctaatcctgccctgtctggttttggatgagggaccaggaaagaaagggaggcaggataggggaggtgtttttgagaaaaaccttctttttccctctgcaagtatttgtttcaggcagtacgtgaaccctcgaagactgatcggggctggtcctgggtcaccccagcagggttcagtgaagtgggccaggggcactggaccctcggctttctccctgcagggggatctgcctccctggcctcgcctcttgtgatcttctatgcatgttcactccttactcactctgagccttctgactctgaccagcctgtgttcctggcattcttttgatgatgtaagtgtttcacaccctatctgcaaccaagcaggaggacggagaggacttctgcagcaaagagtacctctagaaattgcttttgtgaggttctttgaggtgctaatcacctaacttttatttgaattgctctgacttatcatttaataactccggaggactttttacttccttggcaggaggaggaaggtgattcctcagataaaaccaaaacctagagctgcacttctgaaggaaattgctgctcaggtagggctggatgtgtaggtgttctccatgggcccatgccgtgcctgtaccagcgtcctgaattgacggcagcagaggggtatctttcttcattcttcattatttattgcctgaggcagaatgaatacttgtacacttgggatttcagccatgccttttaagggctgtgaacagacttatcaaagagccatcttgagtggcctgtagggcggaagggagaatacaggacaagaaagtggatggaattaatgggaacaagagtgacataaaatagtttaaccccctgtggccctcttcagacttttacatttgtctatttttatttatttaaaattttttaacttttgtgggtacgtaggtgtatatatttatggggtacataagattttttgatacaggcatataataatcatatcagagtaatatcaccccaagcatttatcatttgtattacaaacaatccatatatattcttttagttattttattttgttatcttatttatttatttattttgagacggagtcttgctctgtcacccgggctggagtgcagtggcacaatctcagctcactggaacccccgcctcctgagttcaagcgattctcctgcctcagcctcctgtgtagctgggattacaggccggtgccaccatgcccagctaattattgtatttttagtagaaatggggtttcaccatgttggccaggctgatcttgaactcctaacctcagatgttccacccacctcggcctcccaaagtgctgggattacaggtgtgagctatcgcacccagcctattatttatttttgagagataggatcttgctctgttgcccaggctgagtcatgctcactgtatactctaccttctgggctcaggcaatcctcccacctcagcttcccaagtagctggaaccacaggtgcacagccgccactcctggctaatatttttattttttgttcagacggtggggaggctcttgctgtgttgcccaagctgatcctgaactcctgggctcaagcgatcctcctccctccgccttccaaagtgctgagattacaggtatgaaccactatggctagcctggtctacagaaatgtctaattttcttcagactttgttctcccttcaaattaggtttcatctggcagagtggctactccatttgtttgcaagcctctgcccttgatgttcagattcctgctgctggtggagccggctgagtttcccagatgggctccacctgcctcctcctcggttgctgcagcattcattgcttcgtgcttcctgtctggctcgcctccaaatgagcctgttcatttcctttctccggaaactgtccttatcactgaggttcaaaagttccataaaggatatggcagtcttgagacttgacctccaaactttgaccttaataaaaactggttttttaaacccagccaacctgaatgagtggactatggcttttgattgctgttagctgaaggagatgtatggctgctgggtgacgccttgaacagtgagatgttatatataatcttgaatttggggtggtgcttgtgtcaccactcggaattatgttgtcagtctcacttccctcctggcttcttggcaatcgtctttattaatgttttcaattttcttactatccagtgaacttactttgtatttattgtttggggtagtgttgtagatggtattactatttgaaaacttactgttgaaagggaccgtagtccagtggcctcttttaataatcagggaaaactgagtccatgaagacacgcctgcctttgaaaacctaagaatccactgctttttctgttgagacagaccccacagagatctccgagaggacggctgcagcaagagtgctgactcccatgcagccgcattccttttctaattgtcaaagctgattagtggatttggatgtgcgtggctcggagtcctctaataatctttcctttcttacatagctcacctagaatttgaggaaaattaaaccagttgtgaaatatatcacgtttcagaaatgaacggcatcttaattgattccctttgagaacacatcagactgggatttctgagtgtaatctggtatgccttgaggtggggacctcatgctggggcactcagaggagactggtccacctccaagtttgttttctggctccaaacaaatgagtggctgtttgactgttggcacactacccagttttaaaagtacaaccatatagggtatggagggctggtaaccagggggtttaaaaagtgaggtcatggaaggcccagatgaagctcttttaatgtgtatcacaactgcaattaatcttattaacatgctgggcctgttcctgctttcgctgccccaggtgtgtgagagtatttagggggcatgctttgaaggattcttgttctttgatgatgcacatggataacagaagtacatcaaactttgtatctggcattaaaagggcttttgtttgcctctgtagattcattcagttttgagaagagagcaaaaagcttcatgccaattgataagatgtacaaaagagggtggattgcaaatgcagtcttgcagcagtgagctctatgaccagatcagaatcagctgaacaggaatggagccctcttctatatccaacactaaggtagttccagcacagtattctgggagtgaaagatgtaaaaaagcagccaggcacagtggcttatgcctgtaatcccaacactttgggaggccgaggtaggaggatcgcttgagcctgggaggcggaggttgcagtgagccgatgtggccccactgcacctcagcctgggcgacagagtgagaccctgtctcaaacaaacaaaagtgtaaaagcactgttgtgtatttgggaagcaaaagtatgcacaggaaacaacaaggcatagaaggtgttgtggatcctaaacctgaattgatgagggtagcatgggggttctgagggcagggaggtaactgagggctgttgtggttaggacggcttcctgggtggggtgggccttgaacgcaggtgaggagcaggatggggtgcaagtggtgctcttagcttgtgctgactgggtagggcagtacgtagtgagaggtaaagttgggggagtatagtagcagcgggtggtacacttcggttttctgtgtgcactctttctctcttgctctcttgtttttctttcttacaagtatgtttaaggaaggctagtatagtactccagccttgtaaggttgccgcttcattttattttttagactatgtgttagaagttgtctaaaatacccacctagccccccccccccccgccaccccggcttcttgcttaacaagtaacctcaaggaccaagaaagaggttaaagtttcaagttcaacagatggggattgcgtgtgctaataatcctctaatgaatagaatctgctcacttcaatgaaaaataagaaaaaagaaatatttgttcctttataatgtactcatttgctcatagttaatgaatatcacataagattaaaagtcgcttaaggttttcttgctatgtcctttaactggtttattttttaattttttaaattttaaatagagatggggtttcgcaatgttgcccaggttggtctcgaactcctgggctcaagtgatcctcccatctcggcctcccaaagtgctaggattacaggcatgagccactgtgcccggcctggtttcttaactgcaggatttcttagagtctttaactttctaaggaacactgggaatctctaagaggagtgaaggaggaggaagaacaggagggccttttctgtccacagcacattttggaggattggtgttccatggaacactctttggaaagcatggccccccgctgttctgcaaagctgtgtgccttgcccttgttcattccagttgccctctgtttttccacttacttttcctaccctgagataacagtgatgcatctattgctacaaggaggattaggggatggggagaggctgttaagtccctctctaaccttttcctgctgttcaaagcatgaacaaagtgaacatcttatatggctgcactaaaaaagttgcccgcttacaagctgaactcaggcaaaatgaactcctgaatcctcacataaacggaaatagagccccaccctgtatcctgccatttaaaaaaaaaaaaatcctctcatctggcagggggaaaaaaatcccagccctagagtggccaggatgaatcagcatgccagggccatacaccaagataagcattgagtctctagatgtggcaccatggcagattatcaacactggtgccgtgagaacactgcagcaagcagcacactgtacttttaaggacaagaacagcagcaccaaacaccccagaaacaactgttctgattctttccttcaggagtagaatttttttttttttttttttttttgagacggagtttcgctcttgttgcccaggctggagtgcagtggtgtaacctccacctccagggttcaagcgattctcctgcctcagcctcctgagtagcttacaggtctgagggactacaggcatgtgccaccacaccgggctaattttttgtatttttagtagaaacagggtttctccatgttggtcaggctggtcttgaactcttgacctcaggtgatccacctgccttggcctcccaaagtgctgagattacaggtgtgagccactgtgcccagcttttttttttttttttttttttgatggaatcttgctctgtcgcccaggcttgagtgcagtggcacaattttggctcactgcaacctctgcctcctgggttcaagtgattctcctgcctcagactcacaagtagctaggattacaggctcacgtcaccacacctggctaattttgtattttcaatagagatggggtttcaccatgttggccacgctggtctcaaactcctgactgcaggtgatctatccaccttgggctcccaaaatgctgggattacaggcgtgagccattgcacctggccactttttttttttttttagacagtgtcttgctgtgttgcccaggctggagtgcagtggcacgatcttggctcactgtaacctccatctcctgggctcaagtgatcctcctgcctcagcctcccaagtagctgtgactacaagcgcacaccacgatgcccagctaattttctatttttagtagagacgaggtctccctgtgttgcccaggctggtattgaactcctgggctcgaaggatccacctgccttggcctcctaaagtgctgggattacaggaatgagccactgtgcctggcctggagtattgctctagaacatcctgtttcacatcgttttatgtggggtttttccttcctcattcttcatttacacctctgtctattatagtctgtatttgcaatgtttactacagtaattagatggagcttaaaattcagttctcatttccagggctcagaagccacatgttgctcctggctgctctgatggacagcacggtcacaggacatttcctccactgcagaaaatactgctggatagccctgatgtatatcaacaatgctgatcattatttgagaaaacgttctgggctccctcaatacctctgcctactttattattttaaaacaattttttgtaggtgcataccatcatacccagctatttctatttttttgtttgtttttttagagacagggtgtgctgtgttgcccaggctggccttgaactcctgggctcaggtgacccttccgcctcagcttcccaaagtgctgggattataggcgtgagacaccatgcttggtgactctgcttactttaatatcttagaagttttggtactgaaagtgaagaacattggacagacatcaaacgtaaatacaaaactgtcccaggtggctcttctcatacatttcactagggttgagcaggacatgctccccacctggaagaccctcctagggctttgtaggtttagctctgtgtgacagttctctttgtattcatcacagggcggtctccactttgtatacctaaaagacttctgagaacagtatttttccctattagtcatactttaaaatctagtttaggagcatctaacttcacatgctgaaattttcttttgaaatttcctttgaaacccccacactgcttgctctgtagctcatggaaatcacttacttcataccatgcttcattgcaaacctgctttggtttgcttataagtccctccatgaattcagtggaaatgtctctcccagagaatgtttttctcttaaggtctggtccatggtactttatttgatgtccttattagaagacatctagaggagtcaagacctagactcagttcagtttgagctaggcttgaattccatttgcaacatgggatgggcccactgctccaataaatgtgatgttttacatgtgaaaggtgcttgatgttttgctctatgcaattcctaggctagaacctgttctgtctgttattgcactgggtattgcagtctgttggtcatcagcaggtgactgcctattgccaaaagagacgatgagatgaaaagtaggaattcatgatttcagaatctagcctcacttggagaaagcacctgttggcctgggaagttcacccttctctgctgacacaggctggaccccacacctgaccaggtgtcagagcacctgtgagagctctgggacctcctagtggcagtgtgatggtaccacttactgagtgtcatgccactggcatcaggcactgtgcatatattgtcccccactcaatcagagcatctgtgctattaatatttgctcttttttgtttgtttgtttgtttttggtaaaaggtctttattttttaaagagatccgtaataccaaaaaaaaaaaaaaaaaaaaaaaccaaacaaaaacccaaaaacctcttgtggggctggggtggggagtaaggtaaactaggctgtcagccaagcaaaggcagaaaggtggggtccacaactgtctctcacagctttaagtgcttggcaccaataggcactcaataaatagttgttgaataatggcttatattatatcttcataacagttgtgtagatattcttttgcacattttacagtaatgagaaaactgaggcccagagaggttaagtaacttgcctctggtcacgcagctagaatgtggcagagctgtgtgattttagacctaagtatgtctaaatcatagtccacaggccgtcactaagctaaagtagaggaaatgatagggccacattcaccttctctcttttgaacagtcactcgttttttgaagcgggggtggggacagagttgctgtgttgtccagactggagtgcaatggcacgatctcagctcactgcaacctctgcctcccaggttcaagtgattctcctgcctcagcctgctgagtagctaggattacaggtgtgccaccacacccagctaatttttgtattttttgtagagatggggtttcaccatgttggccaggttggtctcgaactcctgacctcgtgatccacccaccttggcctcccaaagtgttgggattacgggcgtgagccaccgctcccagcctgaacagtcactcttaattgcactatgtttatttgggcattttgttatgtttttatgtttttaattttgatataatttcacagttatagaaaaattaaccaaaagagtataaacaattctcagaccctttactgagatttgttgggacatattcttagaaagtctgagttgtgagcctgtgggattgggccgcacttcttgagtagagcctgggtcatgctacccgagaactcctgggtgcctgtgaggttgggtgtgtcccatctgagaaagttcgctactgaaaaacagtgacgtaaccccacccaggaactgaagtgagcctgagagcagctctccagggcttgctggctggaaacaatgagggaagagtctaggatttatgaaatatttttttgtggaagaactcttcctctgagaaactgctggagggtttggggaatacaaaacaaaactgacttatgaaaagatgacttgtaactcaccaagcagacgctctcaggcgtggcatgatgccctcactggctgccaagaacaataactgacacattatccacagacggctgcgccccatgccatttcctctcctgccatcacaatgaaagaccagggttgacacttggtattgtatctattccacgtccgctgcaccattttcttttaacccttctttcttgctctcacccctttacctgttggagctactatgcccctcctgggtttcgttttcttctcttcctttttcctgggcatacagctgcgttcctagaaattgtggttctgattcataatcattgtatgtggaggaaggggcaggattctactctgtgaggggacgggagggtcttttttaaaggggtaaacaattggaaagtttttagagttaagggtctttctctgatgctaaatgaaaccactgtcctctgttccaaggcctgagcttatatcttctttgctatgagacccagagaaacagtgcttgggggccattttggaagcagcttgtcctttgaccttccccactccacttgtgcagacaccacgccccgtgaggacgggcgtggtgtctgctgctgagcctgactgccccacacttaggcaggtacctggcacatggcagaagctcagcaaatatttgctgaatgatgaggccttggtgtatgattgctacatttttggcttaaaaagtacagcatcagggccctttgggttttacctgcttttctgggatatactttccagctgatctttgtttttttttgtttttgtttttgagacagagtctcgctctgtcgcccaggctggagtgcaatggcgtgatctcggcttactgcaatctccgcctcccggtttcaagcgattctcctacctcagcctcccaagtagctgggactacaggtgcttgccgccatgcccagctaatttttgtatttttaatagagacaaggccaccatgttggccaggctggtctcaaactcctgacctcaggtgatccgcccgcctcggcctcccaaagtgctgggattacaggtgtgagccaccgcgcccagccagtttccttagtttttaatctctgagaaggaaagataattgttacgtaaggatgtctcagttatctatgtgtggatgatccagggaaaatttctctttccagactggcttactctttggattttcctcaagcttctcggtctgcctgtgcgaaggggcctaaggctgggtgttaagtcccatagcatgagcaaaacctgtaatttagggttaaccagctttacttaactcccattaccccttttccttctcctcattcttagaattctcacgtgagtggtagtaagcccctaggatgtatgtatgctgctgtgtatgtgcttagccatttcctgtgtatttaatggtgaacctttggtgattcctcacatggaacccttttgcccttggtcacacttgtgaaagcacctccacatctttgcaatcagatcagcctaggccaggaagcaccttagaggaggtgattgactctagttccttgtttggtagagaatgagggaacaggctcagaaaggttaagcccaaggcacagggttagttggtgacagacccaggactggggcccaagtcttgcaggtgtggtgcactttctgcaacacccctttgccctgccaacttcccatcccacatccatgagattttaagtcccttattgtacactttttagtatatgctttgaagagtctttggacagttaaaactgaatgtacaagccaagactacctcattttcttcttcagctatgactggtacccagctaattgtggattggtaagagcaagacaatcagagatatgatacatgtttaaaacttcattggggctcagtgcagtggctcatacctgtaatctcagcactttaggagactaaggtgggaggactgcttgagcccaggagttcgagagcagcctgggcaacatagccagacgtcatctgtacaaaaaattagctaggcgcagtggtgcttgtctgtagtcccagctattcaggagactgaggtgggaggaatgtttgaactcaggaagtcaaggctgcagtgagccgtgatcacgcccctaaacactagcctgggtgataaagtgagaccctgtctcagacaaaacaaaacactttcttggaagtagtcactggagcttttgaaagtttattttaatccacagcttttcccccaccaaacactaataccaaaaataagattactttggggttttaccttggcaaataggatgctcccaagggactttgaagcctacccctgaagctagggaatgaacacattatcttgtgctggtatttatccagtattacccaatatactgacccattagacttcaccaggatggtgctgacattgaaaagtcacggagataggccgggcgccacgagataggtggctcacgcctgtaatcccagcactttgggaggccgaggcgggcggatcacaaggtcaggagatcgagaccatcctggctaatacggtgaaaccccgtctctactaaaaatacaattagccgggcgtggtggcgggcgcctgtagtcccagctactcgggaggctgaggcaggagaatggcgtgaacccaggaggcggaggttgcagtgagcccagatccggccactgcactccagcctgggtgacagagcaagactccgtctcaaaaaaaaaaaaaaaagaaaagtcaccgagataatttgtagtcagcacacccctcttagggtctaaagtcaaagatcttgaggcttcaatggatcaagagccttttcttactctacgtggtattgacgcaagttctgtagtagcccctcctgctgtatttacgacactagcttccagtgggcagatggaaaccagtgcctgcctggagactatccagctgtgagaatgatgtgatgtgtctggcagaaagaggcgtgtttacaaaggctttattttgcaggagtaaatcattggattttaactgttcttcctctctttgtgttgaatctgattatgcagcttttctgtaagtttttaaatgtttacccacaccagacctttggggactgattggatttagtgggagcaccctagaagacctggattaaagtggaacttggtctctcaactagttgggttgtccttggacaaactgcttgacctctgtaaatcttctgtccttatctgtaacgtaggggtgctaattagcattaattagctcattgttgggaggattaaatgagaacacccctgtggaattacttagagctcccagtaaaggttggagttagggaggattagcaggctttcatttgcttccacattttttttcagcagtttaatttactgaaactggcataataatgcctccttgattaggttgttgggagaagtaaaggcaatacaagtttggtgcctggtatacttcatcagggtgacaaaatgctgtcatttggtcatttgtgatcatgtctgctactgcataatgtcatgcactggtgggactctttagacagctaattattggtaaattcttcacagtgagaagaggatttaaccgatatttctccctctagagtgtggggaggtagagaagtgggtgagactggaagggtgggaaggagaagtctggctacttgtatcttggcctggggatttgtttggaagatgaattatcctctggtagttgtgtacagtttacaggtcagtgattagtatgagtccgtgaatagtgccagttaatactgattaactgctgtactttttgccaataaatattgtaaagctataaagacaacagagttaatacaagttgctaaagagaaacttgtggtaaatgtctttaaatgttgtttaaaatagaaatggccaatctagcaggcatgctgaggaaatgatgtttttgcagaagggaaatttagcaatgacagttttgcagaatatattggtaatgaagtgttacttgtagctgctgacaaattagttttcttaaaaaatatatcccctaggaagactgtagtatgaaagaatgagaaccgtaattggtggatgagcctggagagtttgaaggtaagagagaaagagaagcagcgagggagagaaggagagagagagagagagagagtgagtgtgtgtgtgtgtgtgtgtgtgtttcaaggtaacatgcaagaacaataaggttcttcttgtgtggttgtaatttttttttttttttttttgagacagggtcgcactctgtcacccaggctagagcatagtggcataattatggctcactacagcctcgacctctgggctgaggtgatgctcccacctcagcctcctaactagctgcgactacaggtgtgcaccactgcgcccagctaatttttgtattttttgtagagatagagtttcctcatgttgcccagcctggtcacaatctccagggcttaagctctgccgtccttggcctctcaaagtcctgggattgcaggcttccaccaccgtgcccggcccttgtgtggaatttttaaaaaatcctgacttatctgtttgtttgtttgtttgtttttttttttttgagacagagttttgctcttgttgcccaggctggagtgcaatggcgtgatctcagcttaccacaacctctgcctctcacgttcaaagtgattctcctgcctcagcctcccaagtagctgggtttacaagcgtgcgccaccatgcccagctaatttcgtaattttagtagagacagggtttctccattttggtcagggtggtattgaactcccaacctcaggtgatccgcccacctcagcctcccaaagtgctgggattacaggcgtgagccactgcgcccggcctatccgcacttttttttatgattgctcacatgtgacatgtcttgtttttcttctaggatgttgagaaagagaaggaaacccacagttacctcagcaaagaggagatcaaagagaaagttcataaatacaacttagcagtcacagacaagttgaagatgaccttggtaagcactcaaaatactatttaggttgacacctgtcaaaagacaaatataaattgttggtactacaatctatagttctaaatatctgaatagcatttgtagaagtgtagtagtcaaggtatacagaacaggaaagtggaatatttctgtggctttccatttaaatctgtattgtgaagtagctttgtctcaaaaatcagttgctgggttaaccttaaaaaagtgaaacacttataattttattttaaaagattttgtgacccacccctccctcctcaaaggatttttagcatcattgcctaacatacagaaatggtgactcagattctaagaagacctcaggtaaggttttttgttttgttttgttttgaaacaaggttttgctctgtcacctgggctggagagcagtggcacgatcaccgctcactgcagcctcgacctccgggctcaagtaatcctcccacctcagcctcccgagtagctgggaccacaggtgcttgccaccatgcccagctaatttttgtattttttgtagagacggggttttgccatatcacccaggctcatctcaaattccttggctcaagggatctgcccagcttggcctcccaaagtgctgggattacaggtatcagaagcccctaagtttttgtcttgtacaaaataaatatggaagtgtcagggaaaggattttgagcccatggattggaatatagaggtatataataggatagttttctctgccggtcgttagtgtaagacaaggtacttaatactcagtttcttccacgtcgctgtcgcaggcttccacagcattgtgccacactgaagcatgcagggagtcggcgtacaggagggagaagcctcagggcctggggacagggaaacgagctgacagcggagctagagtattcatgttcctctaaacttagctggcatctaggtctcgcctacccattgggtggcccgccttcttcatggcacttgtcagcccttggcgccagtttccagggcacttggatccccgtctctcagtctgtttactgtgaactgacagagtttggtaaaggacaaggtgattggtttaaaacaggccctaccgaatcggtgattcttggggaggagctttcagatagaaacccttgtggtaaaggacccctccctggtagaactcctccaaaaagaggggagaggagcagagaatcccaagataactcttcatcattccagcagcaagatttctttttcaaacacattttttcatcaaaggagaaatccacttgctatgttttttttttttcctttcctgatagagactaaaacagatacaaattatccatgtcattttaaagataaaaattttaggctgggcacagtggctcacacctgtaatctcagcattttgggaggctgaggcgggtggatcacttgaagtcaagagttcgacggtggctcacgcctgtaatccagcactttgggaggccgaggtgggcagatcacgaggtcaggagatcgagaccatcctggctaacacagtgaaaccctgtctctactaaaaatacaaaaattagccaggcgtggtggcgggcgcctgtagtcccagctacgcgggaggctgaggcagaagaatggcgtgaacccaggaggcagagcttgcagtgaggcaagatcgtgccactgcactccagcctaggcgacagagcaagactccatctcaaaaaaaagagttcaaggccagcctagtcaacatggcaaaaccccatctctcctaaaaatagaaaaattagccaggcatggtggcgggtgcctgcagtcccagctactcaggaggctgaggcaggaggatcacttgaactcaggaagttgaggctgcagtgagctgtgttcgtgccactgcactccagcctgggtgagagagtgagaccctgtctcaaaaaagaacaaactagagaattaggattgaaaattgatcttgtgggaaggaagaaaaataacacaccataaagatagttttaaatgttctactttaactgtggcatttatatgtaacacttgacagtttaataaaacagtacaataaatcttttctaaatatactgtttttgtttgtttttgagatgcagtctctgtcgcccaggctgaagtgtaatggcgtaatctcgtaatctcggctcactgcaacctccacctctgggttcaagagattctcctgcctcagcctcccgagtagctgggattataggcacctgccaccacacccagctaatttttttttatttttatttttagtagagacgggatttcaccctgttggccaggctggtctcgaactcctgacctccagtggtctgctcgcctcggcctcccaaagtgctgagattacagacatgagccactgcgcctggccccaaatatactgaatacaaaaataaaaataaaaagtgaagaccaaactgttattactgtttttggcaactaagaaatagtaattctaccatcagtgaaggtagttgtttttaagatctgtactgtgaagtatagtggtttgaatttgtttttttttgttttgttttgtttttgttttttgtttttttttttgagacagaatcttgctctgtcgcccaggctggagtgcaatggcgtgatcttggctcattgcaacctccaccttctggtttcaagcgattgaatttttttttaaaatgctgcttaagagacccgaaatgcattctatgctgtatggcatatatgctgcattaaaaagtttaagcagagttagtaattcagtgcatatgaatatagccactaggaatgaaaatagcctgttttcttactgtccccttgttgttgacttcagtatttcagagccctaattgtgaccttccttttgtgtataatagtcaccagttgaggatgttgtttcctttgagcctgtagcctagacatatcccccaagctttaataagttttgtggtttggctagcatctgctccgttggattgtaacctcgcaaatggaccctgaccttttgccagtagcttcagaggcatgagtctggggccggcagtcagccacagcatcaggaggcttcttcagtgtccacatctgccctgcagaccttgcctctggaagcactttgcctggtgtgttaaccgccctctgaggtcattcctttgggggcaatctttagtgaagttctgccacaaacctcaagagaagagaacaaaggagtgtttcaccttcccgttttgttttgatatgcttcttccctaaagtgccaccatccacccagctaagtgtgtgcttctctccctgcttcagaattcaaatgggatttacactggcttcattaaagtacagatggaactctgcaaacctccacagacttctccaaattctggaaaactctctcccagtagcaatggctgtatgaatacacttcatatcagcagcacaaacactgtcggggaagtgatcgaggccctgctcaaaaagtttctcgtgactgagagccctgccaagtttgcactttataagcgttgtcacagggaagaccaaggtacgctgccagcttaaaaggaaaatggtctgtgcttctacttgcatctgctgttctcattagcagagggaagactggtgggtctcatccatgtcagttgtgtcagagcctggagtccgatgctggaagccatggtgatcttagcatgcacttagtgcttcctggctgtccatatttttgagttggacagttgagggtctgaggagcttggaagcatccatatgtgattggcagttacgagtattttgtggtgttggtggggggatggggcgggggctgtttttggtggttgttaggagtggctttgattttagttttctttaggacacaaaagagtgcctctgtgtttgaagttttcaatagcacattccacatttgatgtgcatcagtacgtggagtggtttggtggatgtgtgctgagatcttgcgactggggaggcacatgtgcatcacagcacatttcagcgtactgatggaaacggcccagccctgggctctcctgtttccttagcttgtctcacttggtgttacgccgggacattttggtactctgtcccccagaggctcatcaaatgagtgaataacattttgatctagggtctgactaaaacttcatatccacattcaggggatagaaagagaacattaaatattaaattactgcgtgaaacagaatgagatattccaggtcaggcagtgaccagaaattgataacattggtggacagtagtgattcagtgactcactacatgcgatttgaaatcggggtgtgtgtgtgtgtgtgtgtgtgtgtacaataaactatttaagctttctttggtttttctcggtaaagcctaatgtagctatagaagaaaatatattaaccttgacatgatagtaatgttcttcagttacacaggatgaaacccagctcattgctgagtatgcatacatctttttaaaaacaaaccatggggctagaccctgtggaatacaaagatgaacaggccagggttcctaccttcagaggtcacaagcttagtattgtgggggcttatatctatagggaaattggcacctgcgatgcagtgcatctggaagtgccacaataatgtagagaagctcgatggcatttttatctgccagtttctttgcctgctcacctggactttagctgtacaatctgaaagtaatcgtgacttgttgaaatattacccccatggctggcaaatcctttaacatgattggcaatgtcactgtatgtgtgtgtctagcatgagacatatatagctgtgcttgaagctaccggagcttatattctgattgcttggtttgtagctgctaattcgctaattctttttttttttttttttttttttttgagacggagtctcgttctgtcacccaggctggaggtgcagtggcgcaatctcggctcactgcaagctccacctcccgggttcacgccattctcctgcctcagcctcccgagtagctgggacttacaggcgcccgccaccacgtctggctaatttttttgtgtttttagtagagacgggatttcactgtgttagctaggatggtctcgatctcctgaccttgtgatccgcccgcctcagcctcccaaagtgctgggattgcaggtgtgagccaccgcgcctggcctcgctaattcttaattaatctgtagagagatttgcttttagaactcttgtttttatgttctttggatggtatatacatttttttttaaatttgttttttgtttgtttgtttgagacggagtcttgctctgttgcccaggctggtgtgcagtggcacaatctcggctcactgcaacctccgcctcctgggttccagtgattctcctgcctcagcctcccaagtagctacaattacaagtgcccaccaccatgcccagctaacttttgtatttttagtagagacagagtttcaccatgttggtggccaggctggtctcaaactcctgaccccaggcaatctgcctgtctcggcctcccaaagtgctgggattacaggtatgagccaccacgcctggccttggtttttgagacagcgtcttactctgtcacctaggctggagtaccatggcatgatcatagctcattgtaaccttgaactcctgggctcaagtgatgctcttgcctcagcctcctaagtagctaggactataggcgggccccattatgcctggctagttagaaaaaaaaattttttttttttggagaccagggtcctgctatgttgccctggctggtctcgaactccaggcctcaagtgatcctcctgcctcagcctttaagtgttgggattacaggtgcgagccactatgcctggcctatttttattgtttttaaaggagtagtggacccttttttaggtttcttatcttgccttttttttttcatttaaaaaaaattttatttattttttgagacagagtttcactcttgttgcccaggcaggagcgcaatggcacgatctcggctcactccaacctccacctcccaggtttgagtgattctcctgcctcggcctcccaagtagctgggattacaggtgcccgccaccacgcccggctgattttttgtatttttagtagagacagggttttgccatgttggccaggctggtctcaaactgctggcctcaggtgacccgcccacctcggcctcccaaagtattgggattacaggcatgagccaccatgcctggctcttaccttgttttctaaaaggaagagcagagctaactataagcatattttgggactaatatctattaaaatttattcttgaaaataatttccttcttaatcaaggcacagtttatatttgaacagaaacagaatagattttattccactgtgggctactggtattaaataataagatgagccgactggcgacttagaggctggggtaacttggatggttaccttgatctggaggaggggatcacaatggggaagtggtctcaggaatggctgaatactctgtaacatgctgcttgtttctttacccagtctacgcctgcaagctctcagaccgggaacatccactctacctgcgtttggtagcagggcccagaacagacacacttagttttgttcttcgtgaacatgaaattggagaggtaagttattgttcactattgctttaaactatacagaacagctggccctattttattgcagtagcctagtgacttggctattgatgggggatgggaagagaagagagttggagggcagggggatgggaagagaagagagttggagggcagggagagggagagggattttgaattgtcagaaatgaacccaaagttagcctatgatgtcattctctcacaaccttatattattagtctgtcattttcagaggtgggagaaaataaagtttttttacttgatctccatccagagagtcattttcaccccttcccacctccaaaatactccagtccagctgaactttgaaagttgacactcaccatgtgtttgctactaacaaaagtctccaggctaattcccttctaaagggatataaaaggaaattcgatctctttaccatggaaggcatttagctttctagcatcttttttttcccccttgcccagtcaactgattaagaaattatgtttccatgtgcatcatttgccatgttgtctccagggaggattgtatttagccagttcagtagaagaaaaaaagcacttgagcctgccctctagatcaagtgtcagctttaaatgacacttgagcaaatcccaagctcctgtcccagtcttctgtctggaacaggaaatggtgtgaaatgtcctacatggtgcaattgagaatagggtttctaggttaaaagttaggaaacggctctgtttcctactgtttgttagattagtagcatgaccttggataagtcttctaatcttttagccctcagttttaaaatctgttaagtgggactaaacactttacaaggtgggctttgagtcacaattagaaatgtatacatgtaagtgaagggagttttaggaagacagtggttttacatgtttttgaagtttcttttgattctggtgttttgaagcttttcaagacattcagactcattttggggagaaggcagggtgcagaaatctgacttggctttgcagatggtgaccattccctctgccagcttaagccagacacattagcatagtctactcagtgttttatttttcttgtacttagtgttttaagtagcaactagaactacattgggcaagaattttattaacttggttattttattgtattttaattataattagagatagggtctcactacgttgcccaagctggtctcaaactcctgggctcaagcaatcctcccacctcagcctcccaaagtgctgggattacaggcatgagccactgcacctggccttaacttagttttgaaattgacttgacattgggttttattgttccagactgctgtactggacctctgtatggtgttcttatttctcagttatttaaggaaaactgaactgaggaagaaatttccatagctgttagggggtgggagggatatttatatgatgtctttattttggagacttcaacataggtgaaagataatctgttaaaattttaaaaattaacagaatattctaacgtagaagttttgctctcctactccatgttgctcttttttttttttttttttttaaataaccagcctaaactgttctccaggaattcttctaccactgagcccatttggtggatttacttatttttcactctttgtttgtatttggttatcttgaatcttttctctacaccatcagacagcagttctccaccaggatccagggccccctttgggagaggaggatgtgtttggaaaaaacctcgtagatgatgctagataccctccttgacattcactgcttctattttttaaaatctgttttaatttttttttttttctttttaaagagactaggtcttgcactgtcacccaggctggagtacagtggcgcaatcatggctcactgcagcctcaatctcccgggctcaagcaatcctcctacctcagcctcccaagtaactgggactacaggaatgtactgccacagccagataatttttaaattttttgtagcgacctggtgtcactattttgcccaggctggtctcgaacttctggtcttgaacttctgggctcaaatgatcctcctgcctaagcattccaaagtgctaggattataggcatgagccacaatgcccagcctaaaaacttattttgtgcctgctaaataagtactaggagctgttagggaaacaaggctcagagcctcaaggcaagagataaactccaaatagcgagaagtacggcagctgtggtgtaggtaaggtgcaggtgagatagatattaagcaaataattgtaatttaaaaatcttggttgtgatcaggggctctgtgaaggcttttgatacacttagccttgggtgggaagagaggagaggaagttgtggaaagctgcttagagaaagtggcatttaagctgagatggggaggatgagtagttcatagccaggcaaagtggaggaggggagaatgcgtgccacttgggcagagagtgaagctcggtgagagagagatggggccggagagtttagagtctttcagacagcatcagcaactaagggaagccattggatggttctaagcaggggagagtcttggccagatgagcattttacaaaggatgttctgtttggggaacagatgggggagcataagagccgagtgaggaggccaggtaggaagctgttccagcgatgcaggaatagatgatagtagctagcaccaaggggccgtaccgagggagaaaaggctgaatggagaactgtttgggggtgataagactgattatgcgaggtaagaaagtcagttacaatgaggactcgaggttaagatgaaaggactgtcgaattgtttttaatgctgttgggggtcaaatcaggtaaggaatgaaagtgtccaatagacttagggatatggaggtctctggcttttagggagatcgtcttgaacagtgggaggagagggtaggaaggtgattggtgtgagctgaggtgggagtgggagtggagggagcccttaggctggcaacaccccagctcttgcagaccacaccttctgcggcatggggctgggaggggagggcagccgcacctctgggagctcctggtcagcattcctaagtctaactgagtattaaacatctggcatttttctttctgtgtttcctgacagtgggaagccttcagccttccagaactacagaatttcttgcgcatcttggacaaggaagaagatgaacagctgcagaacctgaagaggcgctacacagcctacaggcagaagctggaagaagccctccgtgaggtgtggaagcctgattaaagcggggctccctgcccgtgaggcccggtgcaggaccgatgtacaaaacagcagcaagtgcctctcttctcagagggctgctgtcttgccccactatgctagggtcttcgcctttctatctgtagattttgttccccaaacctggtcacacagcatcctgcaccttagcgtcccatgtaagggactctgcaagcttgttgttcagcaccgcagtgttacctcttggcaagctgtgaacctgtcgcctcatcaggagcattcgagggtgcttggaagcatgaactctgggggtgtttttttttttggttattttaattatgtgatgatgctgttaagcttacagatatgcagttgattttttaaaaagcttaactaggaatctttctgaatacttgtcctattttgaaactacctgtctggttttttgtttggttttgttttctttttttaatgtcagaggaatctatccatgtgaatcgaaaggcacaggaatctaggaactctgaggaatttattgtgaaggattttgttagggggttgacagagaaagcaaagtgtaagtttggaagaaggcatgtgcggtggtggcgagcgctgcgggctatggaaggtgacttggcttttcagttaggggtagtggagaaaggggtagttgcttgtaaacgagttaaaagcattcagtgtggaggtgttaaacccattttaggatcgcttggtttcctggtgggtagaatatgggaacagagccagaggcaggagctaaaccaaaaggagggacccatgaactctgcagctgaccaatcagagaatcaggcaggtgtagcctactgacctgggcagaggtgggcctcacgcagctggatccgaccctttaattctgcccttttggagtggaaggtctgattggtgtagctgctctgcataggcaggacagtgacagttcactaactcttgttaagttacatagtgtatagctttccccccacaggtggttttcaaagttgagacggaatttgggtaggggcagctgtttttcccttgattgttagctaggatatttgtcaagtaaactttggtgacaatcactctcttcccttttattcctcctttccttttcctttcttcccttttttctttccttccctgctgtctcccaccctaccttgttcttttcctccctccctccctccctccctccctccctccctctttccctccctctctctccctctccctttcttttctacattgaaatctgttcttacataatagagaacagggctattgaataaagacccaatcctaccagatctttagttctaaagggcaacttgactgtgagtaggagggcccccaagaaagggaggaaagtccacacccagctaaccacacaacagggcttcattatggaaatattttaacaaaagtacatgttattaccaaccaaagagatgcatgtgcaatagaagccttccttaaaaacaggctaaataacctcattttatgcagcagtttaatctgagaacagagggaaaggtgtgcagtggttccagaggggccttatattctatttttagtctagatattttttgtttataaattcccaaggaattgttaacactttggtgacacctaatggattctttttgaaattccaaggtgcttcagttctttgcccaagtgaactgtgccttttattgcatttctgttcgtctcttggtggctcttctgactttttggagaatacccatcttgttggaggcagacttaagttgttatgctgtgccacacaatttactgagacaatcatatcttcctaagcatttaaggaaagttgaaaaaaatagaattagctataaaatatgtatggcacatcttgtttaattttgcatgtaacttctcttttgtacattgatgaggttttagtgacattgtcatccaacactttacctttattgttcagggaatgccttcgtgattttttgtactggttttattattcagactatggcctggatttgagtatattgttattaccacctggttttttaattattcatcccagtaaacttatattttgtgaagcatttgtttctcagattaagacactgttagaacctaaagtagtagctgatgggtatctgtgaattttttttttttttttttttttacttgaagtagattgtctgaataggcatcctcatctatatttacccaaaacctcgcttactgtcatgtgcactacaaattgcaatttggaaacctactgtattgaaattctgtcagtttatggttcttgaagactgatgtcctttcccaaacactggttactgcagcagcatttttaatgtgtaagtgaagaaaaaaggccactaaggccaaagattttttaagaatcattgtacaaatcattatgttaaactatctaagctttgctgtaatactgttttctcttcaatatgtgatggtacaggaaggatgttaaatgaaggggtggtattgcaggagagcattttaaatggcagaagtaaaaagttataatatttataattttgatgggtttaagtttatttttgtagggaagatttttctcccctaaaatagtttctagaatggcaaaattgtttccattattaaaaattgaagttattagttgtttatgtgtgtttatttatgataatatgctagatttaaaaaggtcacaggagtgcgctgagctgcttttgcacatatacacagggacacatgctggaatgcaacaactttactaggttcgcgtgggtcatatttgttctcccagatatcattttctctttgccttatcctctgaggaaaaataaccctaagctcacacagcatattccaatgtatttaaaacaattgttttaatttttgaaatatacacatttaaaagtatataaagcatgcaaaagaggagggaggccgagagtgaaaaaataaaaataaaaaagcatgcgaacagtttaaaggattattatataaaatggacaccccctgaccattactaaaatagaaccttgtcagttctttagaaatctctccctccacccctgttcttgccctgaggtctcctacccctgaaacataccacttcaacataaagtgagtatttgtatttttttggtcaccatgactgccttacacagatgggatggatagtgtctggggaaccacagggacgatggagtgccaccctctgcgcacctgcacctcggctttgtgccatggtttcagcttccatgcctgctgttgggagtgtttttactactacactgccccctggaggggctgatgaaaggagcaaggctggcaccaggtggtagaggcctttcacgtaccatagctgctccctaaataaaaatactgtgatagaaaattatggctctgtataattttgcttttctactgaaatattcagaggaatcaggtttgggggttctacttgggttactacccaaggtgcgtggagaatgtttgggaatttttatatttttatcctttattttttttggagatggagtctcaatgtgccacccaggctagagtgcagtggcatgatcttggctcactgtaacctccacctcccaggttcaagcgattctcctgcctcagcctccctagtagctgggattacaggtgcctgccaccatacccgactaatttttttttttgtatttttagtagcgacggggtttctccacgttggctaggctggtctcaaactcctgacctcaagtgaccaacacacctcagcctcccaaagtgctgggattacaggtaggacttttttttttaagtcaatttttattactaaaaaaaaacctttttttttgagatagagtttcactctgtctcccaggctggagtgcagtggcacgatctgggctcactgcaacctctacctcctaggttcaagcaattgtcctgcctcagcnnnnnnnnnnnnnnnnnnnnttttaatttttttcctgagatggagccttgctctgttgcccagactggagtgcagtggctcgatcttcgctcactgcaacctccacctcctgggttcaagcagttctccttcctcagcccctcgagtagctgggattgcaggcatgcaccaccgtacccagctaatttttgtatttttagtagagacagagtttcaccatgttggccaggctggtctcaatttcctgacctcgtgatccacctgcctcaccctcccaaaatgttgggattacaggcatgagccatggcacccggcctattttattttttattgtatttattttattttttttttttttttggagacagagtctcacactctgttacccagactggagtgcagtagagctatctcagctcactgcaacctccgcttctggggttcaagcgattctcctgcctcagcctcctgagtagctgggattacaggcatgtgccaccatgcccagctaatttttgtatttttagtaaagacagggtttcaccctgttgcccaaggctggtctcaaactcctgaccttaggtgatccacccacctcggcctcccaaagtgccgggattacaggtgtgagccaccgggcccggctcacatgaatatttattgaaacaacagttatcagttggtgacaaattcggagacactgtcagataacgctaattaggtattttgttttattgaaagaagggggctgggcgcggtggctcatgcctgtaatcccagcattttgggaggccgaggtgggcagatcatgaggtcaggagtttgagaccagcctgaccaaacatggtgaaaccccgtttctactaaaaatacaaaaattagctgggcgtggtggcgcacacctgtaatcccagctactcaggaggctgaggcaggagaattgcttgagccagggaggcggaggttgcagtgagccgagatcgccccattgcaccttagcctgggcgacaaagtgaaactccgtctcaaaaaaaaaaaaaaagaaaaggggccaggcacagtggctcatgcctgtaatcccagcactctgggaggccaaggcgggctgatctcttgaggccaggagttcaagaccaggttggccaacatggcaaaacctcttctctgctaaaaatataaaaattagccaggcgtggtggcacacgactgctgtctcagctactcaagaggctgaggcaggagaattgcttgaacccgggaggcggggttcaagccccgtgattgcgccactgtactccagtgagccgtgagtactgcagtgagccatgattgcgccactgtactccagcctgggcaacagagcaagactctatctcaaaaaaaaaaaaaaaaaaaaaaaagggtggtggtgaaggtctacactatagtagccaatgccaacaaagtgcttaccatgtgctaggcattcttctgaaatgcttaatatgtatcaactcattgactctcctgtgacgttatcacactatttcgtcatatcccttttttcacaaatgtggaaatggacatgttgaggtttagcagcttgctcaaggccactgtgtgagtgagtggcagagccggacactgccccgtttctctaccatcttttcctgtaagtgctctctagtttctcagttaaattgcctattgagtaaaggagcaaaagtctgttaaattgccgtaatggacagtttgcccagaagcgtaactgttttggtgccattggggtttgttgatatcagtgtgttctcatccattttggttcatttatcatttcattcaggtgattatactaagtcacatagaatgaaatgctgacctgtgctttctttttattttttcggatggggtttcaccttgtcatccaggctggaatgtagtggcgtgattacggctcactgcagccttaacctcctgggcttaagagatcctcccatctcagcctctcaagtagctgggacaacaggtgcctgccaccacatccagctaattttttttcatttttataaagatggagtcaggctatattacccacgctggtctcaaactcctgggcttaagtgatcctcctgctttggcctcctaaagggctgggattacaaccaccatgcccagcccagacctgtattttcatttagaggttctgttgcatgggggaaataacacggcaggtaaccaaacttagtggtctcactgtagttggtaagacaattctcctggaaccaccagaagaacagcttcagtactacagagtgctataggagccacaaaacttgtgcaaaggtttgactcatggaaccattcccccaaacaaggctcatcctctgcagagagaaactaggaggtaagtattcaaagtctaaagcatatgcttgtgtggtgtgaatcactacttgcttaattgaatgttcaagaaagaagttttatataaggataaaggtgggggggcaggtgtggtgaaggctggaataggagggagtggggactagctgggttatataccaacaactctgaagctaaatcatttattccatcttcaggcttggatctgggtttgggtttttgttttttgtcttttggggtttttttgcctgttggttttggtttcattttgttttgttttttgacaagtctttccctattccaggagatgagaatagcagggtacaggatagacccctttgatcttaaatagtgtttccaaaggatgattgtggttctcacgtgtctggctgaggctgcatttggcatcaagtgaactctgaaagctcctctcttcttcttgtttctgagaaatgtgagcacctttaagtattatttacgcacaaacaacaaaacatcagggctctttgtaaacctcaaaagaaattgggatttgactttgttttggggagggagttatttcaatcaggagagttcatttttttctctttctaaacgaggagttccgattacaatgggcctgggtcattaagggcatctatctggtttgtgtttgctggcatatgtactgccggctgttgagccacgctttgtggacacgtgggattcattaagccctctgtggttcctgtctctgaagtggctttctagggaggctctgctctacagggtttttccatttacaggtgcaataaaatttgtttaaattctaaaaattctgaagcagcaaactttagtgccttgccaaaacttagaattcttgaattactgctgttgcaggcagggaggcaacagcttaaattcaaaccttttactcagaactataaatggtgtcttcagattcttttaaagatggtgaacatttcaaacatttttcttgcatatgtgatctttgcaaggaaaacattcatagtcaattttgtttaggtcagattgagtatttcgaggccttattaataaaagatgcttgactgagcaggtaaggccaaccatagaaactgaggaacaaaaagaccagctttcagaaaacttccagttctttttttttttttttctgagacagagtctcactcttgcgcccaggctggagtgcagtggctcggtcttggctcactgcagcctgcgcctcccaagttcaagcgattctcctgactcaacctcccaagtagctgggattacaggcacccaccaccacgcccagctaatttttgtatttttagtagagacagggtttcaccatgttggccaggctggtcttgaactgctaacttcaggtgatccacccgcctcggcctcccaaagtgctgcgattacagaggtgagccactgtgcccagccatcagaaaacttccagttctatcgcctttatctagatacagtttgtataggagtttgtgtgtgctggggaaggaagtgggctttaagggtgtagtggtgttggggaggccagaaataatgtcccctttatcatggaaagttatttgttatgaaggtggtagttaggaaaaggcaacgtttaggatctttcggaagatatttcaagacaaaatgaggttaccacactatttcttcacagactgccttcggaactgtggaaggtgctgaattttgttttttcgaggtaggtcttgctctgttacacagtagcatgatcatagctcactgaagcctctagtttctaggctcaagcaatcatcccacctcagcctcccaagtagctgggactagaggggcatgccaccatgcccagcaaattttttaatttttttgtagagatgaggtctggctatgttgcccaggctggtctcgaaatcctggcctcatgatctttctgtcttgacctctcaagacactaggattataggtgtaagccactgcccaggctgattttttaaaggcagatttttctgttcattgactctgaagctacttaatctgaatctctggtactggcccctgagaatctgccattttaataagtgccccctattttttcaaatgctgactgcaaatcctagagctctacagagggtttctggggctgaagggatacatcattgtgcacagagtatttccctcataccccttgttttgaaattttaaataaattacttccaaattgagagtaatgactagcctgcaaagaggctttctgacctgcctcacttagccctggaaaggacaattctatataccctgttcccctggaccatggctaattggatcttagacctctgttgaaaggccattgatcaactagattttctcaaaattttatttatttatttatttatttatttatttatttatttatttagagacagagtctcgctctgttgcccaggctggtgtgcagtggcatgatcttggctcactgcagcctccacctcccgggttcaagtgattcttgggccttaccctcccaattagctgagattacaggtgcccaccaccacacctggcagattttttttttttttttagtagggatggcgtttcgccatgttggccagcctggtctcaaactcctggcctcaggtgatctgctcgcctcggcctcccaaagtgctgggattacatgcatgagccaccgtgccggccatagcgaaacttgtggccagctacttgggagactgagacaggagaatctcttgaacctaggaggcagaggttgcagtgagccgagattttgtcactgtactccagcctgggtgacagagtgggactccctctcaaaaaaaaaaaaaaaaaaaattactcttgttactcttattctgttctctctctctctctacatatatatatnnnnnnnnnnnnnnnnnnnnnnnnnnnnnnnnnnnnnnnnnnnnnnnnnnnnnnnnnnnnnnnnnnnnnnnnnnnnnnnnnnnnnnnnnnnnnnnnnnnnnnnnnnnnnnnnnnnnnnnnnnnnnnnnnnnnnnnnnnnnnnnnnnnnnnnnnnnnnnnnnnnnnnnnnnnnnnnnnnnnnnnnnnnnnnnnnnnnnnnnnnnnnnnnnnnnnnnnnnnnnnnnnnnnnnnnnnnnnnnnnnnnnnnnnnnnnnnnnnnnnnnnnnnnnnnnnnnnnnnnnnnnnnnnnnnnnnnnnnnnnnnnnnnnnnnnnnnnnnnnnnnnnnnnnnnnnnnnnnnnnnnnnnnnnnnnnnnnnnnnnnnnnnnnnnnnnnnnnnnnnnnnnnnnnnnnnnnnnnnnnnnnnnnnnnnnnnnnnnnnnnnnnnnnnnnnnnnnnnnnnnnnnnnnnnnnnnnnnnnnnnnnnnnnnnnnnnnnnnnnnnnnnnnnnnnnnnnnnnnnnnnnnnnnnnnnnnnnnnnnnnnnnnnnnnnnnnnnnnnnnnnnnnnnnnnnnnnnnnnnnnnnnnnnnnnnnnnnnnnnnnnnnnnnnnnnnnnnnnnnnnnnnnnnnnnnnnnnnnnnnnnnnnnnnnnnnnnnnnnnnnnnnnnnnnnnnnnnnnnnnnnnnnnnnnnnnnnnnnnnnnnnnnnnnnnnnctcagcctcccaagtagctgggattacaggcatacatcaccacgcctggctaattttgtatttttagtagagacgggggtttctccatgttggtcaggctgatctcgaactcccgacctcaggtgatctgcccacctcggcctcccaaagtactgggattacaggcatgagccaccacacctggcctgtttttattttttatttttcaagtccgcactgcctggtcccatgacccaccccctagaactgggtagattatgatgagtgagaacatcatgaactctgttatgaaaatcagagtccatgtgtagtgtaaactgttaagtgtcatagagataaaattcagtgtactatgagtgtataacaggaggacagagaaggcgtccttgagaaagtgatttagagctgagatcttgaggaggaggaggaggggttacctagaagaataacttacatgaacatgttctgcatggtggggactggtgtctgaggtctttctttttgacagtgtgttttatcgggattactcttgccggttcgccgcctccccatggcaaaaac

SEQ ID NO: 83 - DNA, 1322 bp, Homo sapiens
gactgcccggggctgcgcgccgggaacctcgcggggctggcgggcgccgcaccccctccctggccgcctgcgccccggggaggccgcccgcgcgcgacgggaccggcagcatgagcagcggctacagcagcctggaggaggacgccgaggacttcttcttcaccgccaggacctccttcttcaggagagcgccccagggcaagccccgctccggccaacaagatgttgagaaagagaaggaaacccacagttacctcagcaaagaggagatcaaagagaaagttcataaatacaacttagcagtcacagacaagttgaagatgaccttgaattcaaatgggatttacactggcttcattaaagtacagatggaactctgcaaacctccacagacttctccaaattctggaaaactctctcccagtagcaatggctgtatgaatacacttcatatcagcagcacaaacactgtcggggaagtgatcgaggccctgctcaaaaagtttctcgtgactgagagccctgccaagtttgcactttataagcgttgtcacagggaagaccaagtctacgcctgcaagctctcagaccgggaacatccactctacctgcgtttggtagcagggcccagaacagacacacttagttttgttcttcgtgaacatgaaattggagagtgggaagccttcagccttccagaactacagaatttcttgcgcatcttggacaaggaagaagatgaacagctgcagaacctgaagaggcgctacacagcctacaggcagaagctggaagaagccctccgtgaggtgtggaagcctgattaaagcggggctccctgcccgtgaggcccggtgcaggaccgatgtacaaaacagcagcaagtgcctctcttctcagagggctgctgtcttgccccactatgctagggtcttcgcctttctatctgtagattttgttccccaaacctggtcacacagcatcctgcaccttagcgtcccatgtaagggactctgcaagcttgttgttcagcaccgcagtgttacctcttggcaagctgtgaacctgtcgcctcatcaggagcattcgagggtgcttggaagcatgaactctgggggtgtttttttttttggttattttaattatgtgatgatgctgttaagcttacagatatgcagttgattttttaaaaagcttaactaggaatctttctgaatacttgtcctattttgaaactacctgtctggttttttgtttggttttgttttctttttttaatgtcagaggaatctatccatgtgaatcgaaaggcacaggaatct

SEQ ID NO: 84 - protein, 236 aa, Homo sapiens
MSSGYSSLEEDAEDFFFTARTSFFRRAPQGKPRSGQQDVEKEKETHSYLSKEEIKEKVHKYNLAVTDKLKMTLNSNGIYTGFIKVQMELCKPPQTSPNSGKLSPSSNGCMNTLHSTNTVGEVIEALLKKFLVTESPAKFALYKRCHREDQVYACKLSDREHPLYLRLVAGPRTDTLSFVLREHEIGEWEAFSLPELQNFLRILDKEEDEQLQNLKRRYTAYRQKLEEALREVWKPD

SEQ ID NO: 85 - DNA, 56840 bp, Mus musculus
  misc_feature (1)...(56840): n = A,T,C or G
ttggaaccagcctaccgccatgattcgatgatctaagtgttggtgtagcagtaactaagagagatatatgaaatcccagctagatggggacagatatgaaaagcctcaagtgtagctgagggtgctaacaggcttcggtccgagacaaagatcaaagatctgattgtcttatcaatagctgatgctctgctatagaagtgggttgtgagagtgtgaggaacagcacgggaggagatcatggcaccagctctgtgtacaaaggtgattggaatgtcaccgcagcaaccaggctcagactgtcctgcagagctctgttgacagctgagtaaatacctcattccttaccacctcggagttggaaagggaagaccagctggtctgacagcaagctcggctttctggctctctccctccaggtttgagaactctttccagaccggtccctttttataccgcatttgcatgcacacacgttcagtaattagaatccacatggctctgtgcagcagggtgtgaaggctttgcacaatgagactccttaggtatatacctcatcaaaggaggatgagaaggctggtgggagtcagactcctgagcttcttccatgcaaggagcttacaggagccttcattactgcggcctccaaggttgctcaacttgtaacctgtgatggtttatatatgcctggcccagggaatggcattattagaaggggtagccctttgagtgggtgtggcattgcgggtgtgggttttaagaaactcattctagctgcctggaagccagtattctgctagcagcctccagatacatgcctacctggatgctgccatgctctcaccttgatgataatgaactgaacctctgaaccggtaagccagccccaattaaatgttctccttataagagttgcataggtcatggtgtctgttcacagcaggaaaaccctaagacacaaccaaaggcaggggactcattcctgccttcacctcctccaagactctacgttcctgttacagatgggaatccatttctatgactatttcttattcttcatgatccacagtctttagaactcatgcctccagcctttgagacctgttgctctagaggtttataggaattgttaacacttaatgccccaaatacttgttggcaagctctcagctagcatcctgttactactaagttcaaatttctcactgttctatttggcactcctgtgtgtggtgacttgctctcccatttaaactgttaatccaaagtttaataaggttctccttgttatttgctctttattgtctgtttacttcgttctcagagaaagcaagacaagaactcttggtagagacagtaaacccactgtcttgttgatgaccgagaatcactttcactggtgtgactaagcctgactatgtggctcttgggcctttggaactggtttatgggaggattttggaaaagtctggagttgtgactctgatggaagttcagaagaccagaaaagaaaagcagacagtggaggccgtgtctgtgagattctaaaaaagcagacagtggaggccgtgtctgtgagattctaactggaaatgccgactctcttgggaactagactccatgatatttatatcacattctgataaggattctatcacattttgctcatgttccgagtgagggggaaatcagaagcaatagaatagtcacattgtagagctacatcagcagtaaaatcactaagttggtggaggggatttccagatgacaatattctgggtgtagtacggttgttgctggctgctttgaggaaggcttacagtgagtatcaggaaaaagcagtgtggaaggattcaaacccttgcagttttcagggacataagtggagtcaatggagatgtactgatggagcaatgaggatattaaagggttagtgtactaaagaaacactgccaattcaagctcccatttccatcatctcagagccaacagccatagtggcctttcatagtggcctgtagcctgtaaactacagactgagctaaatcttccttaagttgtttctgtgaggcaactgaggacagtaaccaatactgtaggagttaggatcagttcttcctcccagccccatgctcccagaaataagacccagactcaaaatatttttctcttattggatcataattttgatcatcccatttattctaacctacattctgtcacatggctgtgctcaggcaccatgtgtccatcttgtcacatatctcccagagtccattctgtccctttttttataccctttactataggtgataggtttctaaattgacgactgatgcatacatacaatacagaagatattttttctatattgcacagcaagactctatttaggaagcaaacccaaacccaacaaggatattgaggtcctctaggagtttttgtttatttaggtttacatactaatattggctttattctagtttatatctatcatcttgaggaaattgaggcagaagaattgccatgagtttgagggcaacctaggctgacagtatttgaaggaagaactggaccttcagttaagaccctgtctcaacaataaaggaacaacaacaaaccaaaaggggcaaaatggaaaaagaaattaaagcacagaagtctttaaaatgtttattaattcattaaaataggtcatcataccaatatagcattgtggtagttggcaactgagaatggctccctcataggctcatatgcttggtccatagttggtggaactatttgggaaggattaagaggtgtggccttgctggaggaggtgtgtcactgggagtgggatctgaggtctcaaatgcccacacagttccagctctctctctgcctcaggcttgtgggttagatgtaagttattttcagctgtagtgagaattttggtttcttcaaaaacccacttatgctatgtgaatatgtttttgttttaatccgaggtgtgggatacggagctgcttcagattgtccacagctgctgactaggatcgtctcatgctttaggagggatgtggttcatgccagctgcagatagtttataattggggttctggggagtctttagagggtacaaattcgagagccccgagaggacctggggcagctgctgctccgcctgctgttgcttttgttacattgctggtttgctcatttgccagattgctgactggagatatcctgacaacagagattggacttgcatcactctacatcactaatcagcaggaagtagtctcaagaggttcaaggctcctttcttctctaaccttctttctgtttcacctagcattgggggttggaaggtattggggtggaataagggttggaagggtggtagataatagaatccccgaaaatagcccaaaaagtatgccaacactcagctgctgctccagttccatgtctgctcacctgctgctgtgctcccatgatggtctcacattcacactctggaactgcaggtctgccctcagttaagtgctttatttaaaaattatcctagacacattgtctcttcatagcagtagaaaagtaactaagacaagttgatgttatcaacatcaataataaatttaaaaaaagctactttcctagacaacaacaacatcaacaataaaaaactacagacagataaggctttgcttgacatgtttttctgcaaataccctttttattgtttggcttcatggaaaatatctgtattctcatatttgcatttaatatgttgttgtgatgtgttgttctgaaacaagaataaaaaagaaatccagtcttgctgagatacatagtcagaaagggacagacatttttacagtcttttcaaatggttgcggacattcttctttgatactgtacaaaatgcacacgtagatttttttagaggttagttacaatgtaaacaaccgaagcataacatagttttacattctgactcatcacaatcaatctgtcttaggctggatatggtgtcacatgcctttaatttcagcacttgggaggcagaagcagatggatctctgtgtgtttgaggccagactggtctatgtagtgagttccaggcccggaaagctcatagtgagaccattaaaaacaccaccaccaccaccaccaaacaaaaaatgaaaaaaaaccaaaaccccaaatcaaacactaccacctaataagaaacaaaaagaaaaatatctgtcttatggaatagaagactcagaaataaaccctcatggctatactacagccagccaggttttgccaaatggatcaaaatcttaccctggaaaatgagacagcctcttaaatgtgtggtgctgggaaagtcgaatatccatctgcacaagaatggcatggaatctgtatctttcagcctgtatacaaaccacgtcgaagggccagggagatggctcagtagttcagaacacttcttgctcttggagaggaaggacccagtttgactcccagcatccacatagtggctcacagccactcagagcctcagttccatgggaatccaacaggcacagagatgcttcacatacacgcaagcaggaaagacattcataaacacaaaaggtaaaataaataaatccaaaaataatctttaaaagaggcttggaaagatggctcagcagttaaaagcatttacccttgcaatggacctgggcccggaaagctcatagtgagatcattaaaaacaccaccaccgcagccaccaccaccaccaccaccaccaccaccaccaccaccaccaccatcaccaccaccaccagtttccagcacccacatggtgtggttcacagacttccatatttgaggggatcagatgccctcttctgatctttgtgggtaccaaccatgcacatggtggtcattcatccatccatccaggcaaaatgttcacataaaaataaaatgaatagatctaataaaaattgtaaaaaagtcaactcagaatggatcaaggactttaacacaaaggcccaaacactgaaagtgctagcgggaaatcatgcagaaaactcttcaagatacagacacaggaaaaacctttttgctaataattttagtagtgtgttacataaaacaaaaaactgacaaatgggattacatgaaattgaaaggctcctgcacacaaaggaaacacttggcagagtgaagagagagagagcctacaggctgggaggaaatatttgctagctgtacttcagacaaggggttaatggctagcatatataaagcaaaacatcccccaaatcttcctatcaataagtgagaataaactgaacagataaatttcaaaaagaaactaaatggtcaataaatatttaaaacgatgtaacatcacttgctgtcagggagactcaattttaaactactctgagtccatctcaagccagtgagaatggtaacatcaaaggagcaggtggcaacaaagaatgctgaggacaggaactcttgttcatagcgggagagcatgcattcttgtattcactatagaaatcagaatggaggtttctcaaacaacaactaaccaaagcctgaaaccaccaccaccatcaccaacacatctaaaaacagaactactagttactagtggtaactagtgggcacagacccaaagactctagttctgttgctctccaacatccatgttcattgctctgcaattcacaaagtaggaattgaggccagcttgaatatcaactgatggacgggtatagaaaatatggcatatatatgcaatgaagttgttaaaaagctttacaaaattgattagcacatgccctgcacacggacaggggtcagagaacagctttggggagtggagtccctcctttctctgtaggatctgagactgatttgaatgagaatggctcacaaatttgaatgtttggaggactgtttaggaaggattaggaggtgtggtcttcctggagtagtaggtgtggccttgttggaggtgtgtcactggggctttgagatttcaaaagctctccccaggcccagtctctgtcattctttatctcaccatcttgtgggtcagttataagccctcagcttctgctccagtgccatgactacctgccaccatgcttcctaccatgatgaccatgaccccactggtgggggctggggctgatgagtgacagagtacttctctagcatccttgctgagcacgtatgcacccactggcttggtttgcactctgaatggaccttcactcacaaataattcctaacaatgtgcatctttcacttagaaaaaaaaacctagtgtgttaatttaagcagaacttccaaattttgccatatcccattataaaacctccatgattccacagcctctaaggcatagactctggattgtaatttggtactaaggagaaattcctgcatgatagaggtataaactataaactatataacaaaggagctggagcgatagctcagcagtagagagcatttgctgttcttgcagcaggtctgagctcatttcccaggatcctcatggtggtttactccagttccgggttgtccaacactgtcttctgccctctgcaggcaccaagcatgtacgtggtacatgcacatacatgcaactcaaacacccaaacaccaaaaaataacataaataaatctaaaaactggaaaatataaaaaatataattcaggcccggtgatagacaactgcagttctaaccctataggagaaagaggtgggaaaattagaagtttagagctagtctgtgttacacagagatttgtcccagaaggagggggggggagaggggagggaggaagggaaagaagaagcaggggatttattccttttaaaaactttcacactacccagaaaagtttcaaggcactgtgcaactgttaaactcacaacctaaagcatcctaactgacaagttttaaacatttctagtgctccacttgaagtcttggatttttatcattggacacaatactgtcagctggcatccttgaaagcgggctcagtctgttcttttttttttttttgagacactgcctgccaaagacctgctctgaagtctgtcagtcactctttgacgacaaatgctgttccaaaaagaaaagagaagaaaagaaaaaaaagccattcggtttgcagctccgagaactgcacacttgcttttcctcgagttccagttctcggtgtgaaagagacttgatttactaattcttccgtctaatcacgtacaaggataacatgccctgctctccagagccaaggggattctgaagtgaggttggccctgtgtcagcgtctgtgcaaagcatggctttggagatgatacctggtgacagcaggccttgccttgagtcttgatgtcacctttgttgatactggcccaactgtcaactcaataaaaaaagaaaatcccacttcagcatcattccagaattatttcttactctgaagattccctgaaagggtgtcagggaccccagtggtccacagaccaagcttctagtggatatcagtcctgggtgcagcctaacttgtgtccaataacccttatattaaaaaaaagtatttatttatttatttactttaatttattgtatatgagtacactgtagctgacttcagacacagcagaatctggcatcagatcccattacagatggttgtgagccaccatgtggttgctgggaattgaactcaggacctctaaaagagcagtcagtgctcttaaccgctgagccatctctccagccccccaacccttgttattaaagctaaagtttgccgttgttgccattttgggccaaatgctttagggactctaatatggggcaatctgtacataagccttagttaattaggaagaatgatagacctaaaggtttcactttactaaaatagtttgacatttatactttctataatctccgtgttctttacgctgatgtcaaataatcacatctacagctcataaattgtggcaaaaagagagaatgccaatattatttttatttatttgtatgtttgtgtgcctgtttctctgtctgcatgcactacctgtgtgcagtgcctagggaggctataggagggcgctggatcacctgaaactagagttagttttgagccacctgatgtgggttctgggaactggaccaaggtcctctgcagcttcatttctctagcccccgttttacagatgttctcagtggccttatcatgcttgcaattgcttccttctctttagatattaaaaacctggtattccccagttaaacccttgctggccaaggtcactcaaccgtcaacttccatcctggttgagaggctttaagttgggaacactttccctctactatacagaactttcctctaactaacaaatttcaaggctgtgacatctgaagcttggggaattatggacgtcacacctagatctttagggaattttctgtgtatattctgatacgaaaacaagacttctccatcaatgtagttcagagctggaatactttaaccataggatttttcttttcctttttcttcttttgggtctggatcttaccatgcagttctggctatctgggaactcactatgtagaccaggatggcatcagactcatagacatctgtctacctctgcctcctcaatgctgggattaacgatgtgctctgtctagcagatgatctttctctctcatccctgtagcatgcttgaaaacacttgatacacaaagtgcttggtgggcaatgacttctgggaatctcaatattgctcaccccacccccacccccagtgtatatggcagacagctgttaggtggccctgatgctcccgcttcctgttatttacgtcattgtgacgccttctttcctgaattgtgaacaaagagtggtggtatgcatctaatgaaccgattcaggagaaagtgtgggggtgtcacatctgtaattaagttttacagaactgtcttctgtccggctccctgaatttattgctaactgggcttgaacacgttgaagatgcaaaacgctctgttggaaattctcaccgttagaacttagggcagcttctgacagacagagatggggaatggaggttcggggctagcagtttgtgaagcgctgaatcagtcagggaaagccagttgagctcggggacagatcagctcccatgtgaaccttttgaggagatctgggggagggggtattagtttgatcttaaacttaacaagataccttaaaacaggacaacccagataatggggattgtggtgacctactaggttttgggataatttgttatggaagcttggttatgtaactatagacaatgaatgcatcgttatatttgtctgtttctctagcaggaccagaaatgagctgatcaaagtctcttggtccttgttctgtatgtttagatatttactgatcattggggagcaccttccagatcatccaaggttctgtaacggttgctccaggaacccactcagcactgtatcaattcctggactcccaagagaatagtctttccccaccccaacattacttagtttatataccagagacagaaccacaataaattactccttggagtttgaaatttaagtctggtctggagaaggagagattacttccaaaggttcaccagctgaagtgcaaagggcttgcaaactctaggtgggaaatctgggttgctgtgagctgactccctgcgtgctaaatcaacaaaccagggcaaaagaatacctgtttccagagagggctgccatactgaaagaaataaatcgcgtgaacagttcatcattctgcctgcccggagcagagtgagccaagcagttaggattcctccatggggtcttaggtcctgatcgggttgggctacccaggggcggagcgcagcggggacccagccgaggtctgccccgcccacgcggggccgaagcccgtcgaatgactctgtgcaacgtgttggtggctgcagcggcggcgcgggttcttccgggctctgcagcttcctgccgagcatcgcgcagccgcctcggcagccggagaccccggcgcaggcctcccgggtgccagcctctggggctcaggcctccggggtgcaagcctccgggacgcagacctccgcaccgtgcgtgcgcatagtgcaccatgagcgccctgccacccccaccgccgccaccgctgctgctgctgctgctcgcgctcctggccgcgcccgccgccctcgctcgcagagccgagtccgcttcggcctcccagcccgaagcagaacaccagcctccgcccggtcccgggaatgctacccagctgggatccggcatggcgggcgggggaagctccaacagcagcgtcgacgcggtggtgacccgcatctccagtctgcttcgtgacctgcctaccctgaaggcgacggtgatcgtggcatgtgccttcagcgcgctgctcatcgcctgtctgctgctgcgcgtcttcaggtgggtcgcgtcgcccaactccttgccctgctggctccatgggcggcgtcaccatgctgctgctgccgctgatgccaccgcgcgtccgccccacctgcgcgcacaggtgctcgctctcggcgcgctctcgccaggcgcgcacctttctgctctctgcctgggtgggatccggagggcgggcacgtgcatttggttcttccagggcacatctcaggaaccgtttccccctttaaggctgtttggtgtgttccaagtcctagattctattgctttcctctgttcacgtttaacaccaactttgagttccgaccaccttccgtggaatgtatttttatgcccacttcacagacaaggaaacattcaaagagagttggcttacacaggtactcagcgcttgagggacaatttggactagggttctcctatcaagaactttgcccctttccccctttggcagctctcctctgttttaccagctcttcgccctctttcacctacagaaagcagaagcagggagcgagggatgccagaggaacctggggacacttgcttcacacacctgatgttggttacaggtttcaggaggtttggtgacccatgatagctttggtgacggccctcattgttcacttggagtcagcgaaagcccagaacggctctgagcttggaggtttgcagcatttagctcaaaatagtcccagcccacacagctgtgtacttttaaaagaaggcatttgaagtattttgccagtctgctccttattacccaagagtgggggagaagacaaagcacatgtggccagatgtgaggggacaaagtaggagatgtggcactcaggcccggaagggagagtccttggcttgggtgtggaaggaaggaaggagaccacttaatgagataaactgcttctgggcatgatctgtaccctcttcctgggaagacaagcttgttagttgagtttcttaggtagacagctgccaatctagattctgatttagataggatgtggagcactttacagcagggactattcccctagtgttcctttgtccatgttgaacaagtaagtattgttggattctaggacacctcacagttctgtgtggctaaaggtggggtggtgcaccttgactctgctgcctggtggtctgttctgtggctgttgtccctggtcatgctccccccgtggacttgattaactagccccagcacgtctgggctgctggccaggggtcctttgtacctgcttgctttccatcttagcttgtaggctccgagtcctagtcatccatcacccagagatcctaacgccatttcctccttgccttcctttccctggtacaggcttccctcccagcaccaggtgagacgaggaaggtgatgggctgcaccaatcttacgaggcctcagtttctcctgtgttctccagtctgctagccattaaccacatggagaactggaaacataacgttctgaactgggaggcactgtaaccatgagcttcacatggaatctattaagggatatttgactctttttctttttccttttggctaaatctttgaagtaactttattattttttttctgaattttgatgtattgggttaaatatattaaaatcaggactgcagatgccacaattccagttccaatctgagactaataatgattcaattctattttgacacaagtttgctatggattcccaattcaaatcactgactgaaaaggaataaataactatgctctctctctgactctctctgtctctgtctctctctgactctctctgtctctgtctctctctgacacacacacacacacacacacacaagcatgcaaaaaggcacaagtgcctgacaggtttaaccgtgtcttcaggtctctgtttcttttattgagccataagactggtctaaagagcaagcaatcctcctgtctcagcattccaagtgctgacattatgggcatgggccaccatgtttagctctaggattttatatctttatgaaggctctggtgttgtgtgaaccacaccacaaactcagaaaggcagagggactgataccatgttggctttttatgctgctgtaacaaaagccccaataaaaacagaaactaagtgggaaaggttgatctgaactcatggttttgtaggtttctgggccccagtgctgtggacctgtggccaggcaggacctcatggccagggggttgggtggagcaaaactgcttacttactggtcactgggaaggagagatggcacacacacatgctgttcccctctgcctcttgcctggattcccccaggacaccaagtctacacaagcagctcattgctgtcctcttttgtgtttataccttggaaagtgccctggtcagccccctcctcctccagttcccaacgcacacttgagtctagaatttcctgtccctctgcatcaccaggccgagggctatgaagggcagggcttctctgtctctctagcacctagtgtcattccaggaataggctggcatttaataaagatatttttagcaaaagaatgttaaactcctgagtattttacattgttgatggctctccaagtgtcgcctttgactagatgcgtggtcatttcggatgcctgcggggtgggaacttgggtggaacctgttcattgtcttagaaatgcagaaaaactgggaagagagtgtggtatcattgcttatacagtaacactcctgcctgtttgttttccctgaagaaatcaccttaccagacaacaggacaaacagggacctaaagaaagagtttagaaaaggaaagatccatatgtgaaatccagcatctctttatcagccagccacaccgctaaggtgtgccggtaaggcagcactgggtggatggagacagggggatcaatgggtttgctgatagccatccctaattgaagaaaaaaaaatgtgaacaccaaatacggtgaaagatcctgtctcagggacatacagagcannnnnnnnnnnnnnnnnnnncccccccaacccccccccccgtgatagtccttttctgatgttaatgactggaagaggaagatgaaatatatgcatgttgggatattcagagaattctgttttcatagtgaaaaaattttaaataacgtacatagggctgagtgtgtggtggtgaatacctgtaatctcaagattgaggaggcagaggcaggaggatcatgagtcggaggctagctgctacacagcatgaccttggtaaaaacaaaacacagaacagatccagccatggacgctgtctaaagatacgaaggccatctgggatgggttatactgattgtcagcttgtcaggatctagaatggtctcgagggcgagcctctaggcatgtctgtgactgtgtttctagattgggttcttgaggtgagaggatacaccttaaatgtggtcagcacccgtggcaggggctggggtctcagacagagtgcaaaggggagaatgagctgaagattggtgttcacatctcttgtttcctgccgctgtggcatccccgccctgctgggtggtaccttcaaaatgtgagctgaaagaaactcttccttctttaagttactatttcaggtattttgttagagcaacaagtaaagaaaaatacagaacgtggactctttaagagctgttaaaagcaatgacacgggaaggcagtgttatgaattaagagagactcagactatgggaaaagtaatgccggtgacagcgtcatccgtgtattgttgaatgcagcagacttcacaacggcatgccatgtgggctcatttcactcagctataaatatatgcatatatgagtgtacaatggaatatattagcatgtgcacaaacttgaaaatatgggccattcttcctgtatgtacttatattcatggcatgattcggtgtcatctggactcctttacagctctgagtcatgtattcatgcacacacactgtatcctgaagaacagtgggaagacatctggggtgtacccctggccatgatccctttatccctcattcttggttttcctggttgggtatcagggtatgctctgtgcagccatgcctctggggtcctctgcttgtacctgacacttaggcttgcctggctttctgatgctttcccatgccctgggtataccatagcatctccctcctctgttcttcatttctttagtttctgcttggcagctgttcacagctgtctctcttcacatatgtgtgctggcatgtgcatatacatgtgtgtgcataccaatgtgcacatgtgtgtggaggccccgggatgattttgggtgtcctcctccactgctctgtatgtccctgagacaggatctttcaccgtatttggtgttcacatttttttttcttcaattagggatggctatcagcaaacccattgatccccctgtctccatccacccagtgctgccttaccggcatccccagccacactcaggctgggttctgggaatctgaactctggcttccatgcttgtataacacatgcttttacccacggagccccaggactcacatttaatctgagttttcctatctgttttagttgctttactttttctgtgataaaatgctgtaaccaaggcaacttataaacgtttaattgggctttggtttttgagggttggagtccaggatgtttctatgtgttaataaatattttgaattttatctattttactttttatcacattttcattcatttatttagtgtgtgtgagtgtgtttatgagagagagtcacacacacacagagatagatagatagatagatagatagaaagaaagaaagatagattaggttagaggacagattgttggaatcagttctctcccttcatcacttggtcctagggatgggtggcaggagccatattcactgagccgccttatgtgcctgatgtattagtattttgccatccaggaaactgatataagagatcaaatctggagagcaatggtgcatgtgagggtcctggaggtccagcaggatgggcacttctggttttgcttcctaatgccattgtggaagggtaggagagagaggggaggaggnnnnnnnnnnnnnnnnnnnnaggaggaggaggaggaggaggaggaggaggaggaggaagaagaagaggagcagcagcagcagcacatgtagaagtagagaaaggattttgcctacttgttttggccttgggagatcctgctgaccatgtgtgcagtcaggggagaccctcagaacagagagtgctgttgtcaggaccttctatcccaggggttcccttacaggacctgtccctttgagctttgggagtcggacttttcctcgctcatggtgtggctgcaggccagggaaactttacaccttgaaaccacagcttcccactctggcttggctgctctcccagttttaccgaacaggtgccgctttttctctcccatctctgttggctgtgtgctcagccccttcttatttcaaaatctctgtgaaatcctctcatctgagagaatttgtttctgtgcttccccagggcttggaaagacagaagtctaggccatttaacaccggctgatgtgagggcaagcaaccaccttgttctagagacggtgacacacatgtcacataccctgtttgcttccctagggtttaaaaaggggataccaattcctacttaccttgaatgtctcaaactttctattattattatttacaacaaggagaaaagttagatataaacagtagctccaggcctggggtggcgtgctttgggaggagccatcaagctcactggcccaccaccctgatggtggttgaactccagcctcagttcgagaacctgtgctgaaaaccaaggtggagagtaacaggaagacaactagtgccaacacacaccacacacacacacacacacacacacacacacacacacacaccatatataatcatcaccatcatgtgaccgcaaacatccaggggctaaacaactctcagacttggtttctggtcggctggttggcattgtgggcagttttctgaaccctactcggtatccattccccattattaattacagtacatgcttctgaggtctggcagggtatttagaataacaccgtgccaaacagggctctgtttccccttcaagcagccaagtgtcctgtggcattgaaaaagtatgattctgaagacagaggtagtatctattcaacctttccttttagtttctgcttgtgagtggggcagccatgtggtcaaaataatcaggcagggggcatgcacctctaagcagtccttttgatgactcagctcccagcaaaggaggcgtcttgtgactgcccttatgaataggccttttaggcctgggcacctgctactggttctttctagcaagttgaaaagggaagaacaaatccctctttaatttaaccctgagcccttggcttacatggcgttcctagactcccagacacacatattcttgctcagtgtaggttctcgtgataccagacttgtataaggctaagggggatgaggcagggtggggtgggtgtgtcccaccagaaaggaaaccctcctggatttgagctgaagcttcccgagttgtgtgtgtagtttcgggtgcatgcttgggtctaaagatttgcaagggggacattctaggagcaggcatttgaaatcgagttcttaaggtatcacttaataaaaagctccaataatgtctcctaatctgagggcgatctgccgggaatccaggcttcatgtttattttctggggctgcagggagaaggaagcccattctgggtaggcaaggcttagacgagagccttgacacagagaactctggtaggattctcccagatctgggaagccttgggctctgtaacctctcaggtgtgagcttttctcacatccagggctctgttggccttcctcccctttctgcattgtctagatgaaaccgaggccccgtagctgggagggatgtaaccccaggtgcttgtatgctcagctgggccctttctgggcctccagcaaatgtggcaggctgtactttggccttgtcaagtgggtctcccaaacactcagcccagtagctaggagagagtctggctgaagagatagcacattcttcctagtgtgtttcaggggtgcctctgtgaacacaggtgctgtgctgaacagggagcaccccagaggcccaggaacatcagtgtagaagggaggattacccccttcattgatcatttggtgggaaggaagccacacatttcaacaggggagccgtaaaccacaagtggctttggctggagatagagtggcctgggaaggcattgtagaagaggagggtgattgtggcttagctgtggaggagggaaagggcttcgtccagggttggaaaggcaaagcaagtataatagttagttctaactgtcagcacactttcgaatcaccagggaagagagtctcgagtcattgtctaggtcagattggcctcacggcaggtctgtaaggggttgtcttgactacattagctgatgtgggaacctagcctgtggtgggtcctgggctatttcaaggttgaaaaggtgagctgggttgtagacttaagtgtattccttcggtctctgctcttgacatgggtgtgagtagatgcttcaggtccttgcctggcctttcccaagtcagtgatggattgtaacctggactgtaacctggactgaaataagccttgctctctgaatacctcattttgtacaaagttctgtgctgaacagtttatgttacctgttccagtgagggacgctttattgaggttcccaactctgacttgggatgaaatagaagtgaatgttgtgaatcctgtgagcagctgggcattgggcctggaactcagggcgtttctccctctgagaggacttgagttcttgaagtgttggagagctaggactgtcacgtctctgaccatggcaatggtgtgtggatgctgacagggtcaatcactgtgtatcctacagcatggtgactccagtctctcagcctcctgtgggccaccaactgtcacttgccagtgttctccaaacacagtgaactctataggttattttctttttctctctgcttgtctccccagcccccagcctcctatacaaacaaaacagactcagccctttgcaaacacacctggtagctggcagaacaggaccaggagccttggttgtggcagcgttccacatgtcagacccagggtgtgctctatttgtcttggagaacaagagacatccttgagactatgggtgacaggttattgggcagttggacggatagctcctagatctgtagttcagctcttaatgggttgtctggattgtgttgtctctccctgtgccttctgtcctggatgcctgtgttggggtttatctatagttggtattatttttccctatcccaagggagtggagacaaagggcagattggtttgttgaccatggcagaattgccatggaattgggagaaggaggggatcctggttgaagtaaatatcattacatctgtcagggttcataggcttttagtagaacgattaaatatcactgttggccatataaaccacagctaaggaactgagacaaactatgccaaccgaaggcctgggaattggaaatttagaccacagacagtttgatctggtactgattttgaaaactgggggatttgaggacacttaatataaagctttgggggcccctcaggtgaggatacttggtggtacagtgtccatgggcctcagcctaggaagggacaggagctggctgctgctgccccctttaggctgagcacgacactgctcttattattttatacatttatgtgtttgttgtgtggatgcacaaatgtgtgtactgtttttacacttatttattgttgtgtttgtttgcacatgtatgtgagcatgtgccgaagtgttatgtgttggaaacttgtgggagttgtaaatcaccttacattatgtgggtcccagagatcaaactcaaataaacaggcacttgagcaagtacctttacaacacctccagttgccaccgctcttcttgtctctgatttgaaggcagcccatgctcaccatttgtcattatgtttgtcccacatttccatcacaccatttccacctcaaggtttccctgtatgtacagggcactgtagtgtttgggttgttgacctgctgctttgagtcactgggctgggtcagtgcggctgcactgaggcagcaacaagaagagagatagcacagtgactgggtgaggagtggggtcagggaagactctcaacatggcactcgggaggctcagtcagagtgtctgaggcagagcccaagttgccagaggttgtcctaaagctattgccgtggtaatgagacacacccatgttccacctgactgcatttagttgacgttgcccatctgcagtggaggaaggtgagattcaaatcatactgactcatggagacacctgacagggtgcttcaggatggagctcagtgggccgtgctcacggcaggttgctggggaacgaggcattgggaacaggtgacgctggcttttctgtcgagatcccagctaaggttggactcaggcacttctgtacaggatatgacagaggccagaactggaaagaaggttctgggttgtgttctaccattctttacgtttaattgcttttctggggaacttagttatctctcatgttgagcagaaggtgcagaacagagctcagaggtcaaagatcagatatgtcctctgaatcctggacacaacctccaggcatcaagactcaccctcagggtgcacacccatcgatgctcaacagctgccttcttggtcgctccagttcccacattctgttttcattttctttgctgtgtgttcctggtgacagaggtgccaccatacttcgcctcaagcggcagcagggctgtgagggcttacggatgagattgctgaggtgcacagatgttgagttgttgattgtgagtcctcaagtcaccaggtcaggggaacacagccacttggatgaggcagcccctgggtggcctccaggggaggcagcctgctccatttcaaatttaatgatctgctttgaacttttaaaagcacagaccttggtctggggatgtatgtagcacagttggtagagtgcttgcttaccgttctcgacaattggttcatgacattgggcaaggttgcccatgcctgtcatctcaaccctcaggacatggaaacaggaggcagacattcagggtcatccttggctatagagcaagttggagaccagcctgagcctctgtctcaaaatgacagcaaaatccaatgtttattcatgtggttcaacatgcacaaggaccaggaggagatactaaacaaaattcacatgtgtcctcagctgtttccttcagtagatgctgtcggtttcttgggaatattttcagagagattatatagaggcattaatgtaataatcatagacacttatctccaccgaggcttatctcacatgctacacagttcacctctttagagcatccaacaccgtttttgtaggttattcatagagttatacatccatcacaaagatcaattttagaacgtggtcatcactgcaggctgaaacccatatccattatggctcactctccgtatggctttccctggcactaggtgaccactaattgacttctgtatcatgtggctggaatcatacaacacgttggctgttttacttagcattttctcagggtttagctgttttgtagcatgaaacactgcttcatttctacccctcccaccaaatagtagcatcctgttttagttaatgtatatctatatttttccaagatggatcttcgttcagaatttatgggtatgtgtgggtgtctatgtagggatattttcatgtgagtgtcaagatcagaggagttgggttccccggacagctggagtgacagtgggttttaagctgctaggtgtgggtgctgggaaccaaacttgggtcttctttgagagtcatagttgtatttaactgttgagccgcctctctagctttgtcaatcacctttcctatatccatatgtggtgtttgaatgagaatgcccccataggctcatacatttgaatgccttgtcccaagttgacagaactgtttgggaaggattgggatgtgtgaccttgttggcagagatgtgtcatggcaatgggccttgagggttcagaagtccacatcgttcccagttagctctctctctgcctcctgcttgtgtatcaggatgtaagctttcaagctactgttgtagtaccgtggctgtctgcctcctgccatgcttcctgccgagatggccatggactcaccttctgaagctgtcagcccccaataacctttttcttctctaagttgctttggctatggtgccttatcacagcagtagaaaagtaacagggaaactgtcttctcagttggtaaagacttgagtcatttctgctctttggctgttatgatcagtgctgcattgaacatttgcatgtaagtgtttgcatggatgtggggttgacttggctttggttccagcactaagagtagcctgcctggctgtttgctaacttctgtgcttaacttttaaaaaagctgatgactgtttagcaagccatcatactattctgtgactcactggacgcatatgagggtcctagattctttatatccttgccaacgttagctactgtctgtcctagagcagtgggtctcaaccttcctaatgttgtggccctttaatacagttcctcacgttgtggtaaccctcaaccataaaattatttcacttgtacttcataactgtgattcactactgttatggattgtaatataatatctactcatatctcatatatgacctcctttgggggttacgacccacaggttgagaaccagtgtgactgtagggagcataaagtagctcattgcagttcagtttgcagtgcatcgattggtaatggtgtgaccttccttggatgcactgatcggtcacttgcgtgttagctttagagaaatgttaagatcttttgcctagggactggggcagatggctcagtgggtaagagcatttgctgctaaagcatgaggacctgaatttgaaccctcagcacctgtgtaaaaagccaagtgtggtcaattgaacatacaactccagtgctgtgcactgtgtgtgagggtcgaggagaggagacaggaggatgtttgggcttgttggctgcaagcctcgtttcaggtttagtgagagaccctgccttgaggaattgggtggacagtgagaggcctcttctgcactctgcacatgcgcatgggtgcatgcactgtaacacacccatgtatatatcacccatccactcaaacatactgtgctggtagtttatgttcagttgacataagctagagtcacctggggagaagggacctcaattgaggaattgcctccattagattggcttatgaccaagcctataggacatttttttttaaattaatgattgatgtgagaggatccagccccttctgggggaggagtgctatccctgggaaggtggtcccaagttgtagaactaagcaagctgtgttagtcatagagagaaagtcagtaaacagcatttctcttggttcctgcctaggcccttgcctgggcatgtgccctgaccagcctcagcaagggactgtgatcaggacagaaagccaagccagtctagtcctctgtaagttgcttttgatcagtgttttatcagaacattagacacctaagtagaaaacacagacaattaaaaaacaatcaaataaagaccttttgcctccttctaaatggaatcaccacttccttattgagatgtaagaatatttttatgttataaatgcaatttcatcctacactatggctgtctttttacttcctgaatggtgttctttgacgcacaacattttttgttttgatgaaatccaatttatctattttgtctgctttagtgtctgctgtcctgcttaaaggccattcattgcctaatccaaggtcaggagaacaaaggcttatcctgtgcttgcttttgggaaatttatagctttagctctgagatatgtcttatatatttgcatacttcttcagaaaatactctgtgaggtaatttttgtgtatgaaggcttgatgttttacattttctatgggggaagtggcttcagaacttatttttttgcatgtgggtatcttccctttctttcacacatatactatgtgtctcatcttggattatataaatgccaatcttgcatatatgcatatatgagaggtcagcagctccataacgatgcagaggcatcatacttcatgggggttggtctcttgctaatgtaatatgtaagttgaagcatgtgattacgacaaaatcccaaaagggaaagtcttgatggggtttgtacccttataacccgacagactgtcccctgtgtgggacagtgtgtgcattcagtcatataacgagaggacctgtctcttgtggtcttgtctttgtgtatcgtcagccactttgacgcttgttaaatgtacagatggttaatgggctctctttagaggctgactttggatttatcttactgtgaggttgtagaatgcaaagccatttgtttgctttttccgctgtctgtgacctgccggtttttatatcctttgacaaatttttcaattagatgattggtcttttttattgatttgtaggtactccttacatccattaacgaggttagtttacacctgtactgcaaattggatgttttcccaagtggatcgtttatcttgacttatattattattatttcccccatgttccccactgacttacgttatttttctatgtttgaattcaccattcttttcttttcatggcttttggatctcttccatggtttctagcaatagttttatttcctgcaattgagcctatctatcttatttgttgtgatacaaagtggggtcattataaacaaaacattggatagggaagccttttccagagtcatttaaatgctacctttattctgtgtcgggtttcgggaggcagtggggcctgtgtctgtgctcgctagcgctctttgttgatgtggaagcatagcttagcattggtagctcagcactgtgactgtggctttactgtctggagaaatcagctcccttcatcaagcttctggctctgggcccacttctgtgttttgttttgtctttttttgagatggtgtcaccctatgtagctcaggttagccttcttaactaattttgcttctattgtgaatcataatgtaaatatgataggatatttgatatatgacacctcccccccccccaaagcagtcacaacccacaggttgagaaccactggtatagaagaccaggcttgtaagtcacaggtggtctttgtccctcagcggggttactgacaggagtcagcacaagaaccttaatgacctcaggaaaaaaaaatggggaaaacttaaggtcccgtggagtaggttggctgctactaccaccaccagaaccctagaactgcctggacagaaacagaggccaatgaggaagtttgcattcaggatgggcagctggctcacaggcacaaggataaaggctaagcttcagacctccatctctggactccttggtctgtctctgatggccatactccaaactgagcccacccactggggctcagtgaaggtttctttccatgtcgctctgctagtcttggagcttgctcccccagcctccttgtttgtctaagtggggcctgcaggctcactggaaacttgattctggccagctgttgaagagccctctgggtcaataaatcctcaacctggggatgacattccagagtggaagaatttaaaacatgtatttattttgtaatacctctctcttagcttttcattaatttttctttattcttgaggattttgtacatgtatacaacatgatcaaatatactccccatttctgctctccaactctcctcatatttccataatgccccccatcatattcatgtctttttaaaattaaaaaaaaaaaacaactagtaactccagctagtgctgccccatatgtgcatgggtgtggagccatctactggaataccagaatcctatcaatgtccatagtctcaaaagagaatggtgttcctaccagcaactccctactgctagtagctccccaggaaaaggtgggacctggaaatcacctaccacttctaaactggcctgttgtttcacttgatcttgtgtaggtgttgtgcaggtagccccagttgctgtgagttcatgggtgtgatggtcgcctgtggccaaaacacaggaatttacagcacctccctacattctctagctattacattctttctgcgtcttccaaggtagtctccgagccttagtgggggtagggtagggttgatatagatgccccattgaggactgagacctcagtctcttattcttagtactttgaccagttatgtatctctctgttgactactgcccactgtaaaaaggagcttctctaaccaagactgagaacaacccaggtatggatggatataaatatatgtatttaggagacactttgaatacatggccatttagcagaataacagtagaaggctctaccgaaggctctgtgatttccctagccataggcttttggtcaggtttatagtatcaggcatgaaatctgtcctgtggagcagaccttataaccaacctgaaagtggtgggttgtctccacaacagccatgccactattacaccattgggcatatcttgccgggcaggctactattagagcaagcagggtccaactctgggtaagacaattggtgccttttctccaggagctcctgtaactccttgctgcactgtgacagttagccagccatatatatatatctccttcctgaccaataaataacttagctcaaaaagagagaggcaaatagctagaaaacacttgaaaatgttctacatcttcagccatcaggcaaaaggcagattaaaattactctaagagtccatctgtcttaggtagggttactagtgatgtgagaaaacaccatgaccaagagcagtttggggaggaaagggtttgttttgcttatacgtctgcatcgttgtcaataattgaaggcaggcagggcagaaacctgggggcaggaactgaagcaaaacccataaaagggtgctgcatactgccttgctcataatggcttgctgagcctgctttcttacagcctggggggtggcaccacctacaatgggctaggccctcccatatcaatcagtaactaagaaaatgctaccggcttgcctacaatgcgatctttaagagctattttctccactgaggttcccttcctctcagatgactctagcttgtgtcaaattgacgtaaaaactctctggctggccacctcacctcagtcagaatgggcatcatcagtggtctaagtggtaacaaatatcaaagggtctgtagcaaaaggggagcttctacgtgatgttggtgggaaggaaaatcagttcaactattctggaaatcagtctagaagtttctaaaagatctagaaactcaaccgccatttgacagcaatactgcttctgggcacatgcctagtggacttaatgtcctactacagagacacctccacgcacatgctcattgtggtgatattcacaatagctgtgaaatgggctcaaacaaggtatccatcagaaagagatgagcgcataagaacagatgagtgagtttatacacagtggaataatgtcacacagctatgaccaagaagcaaatcatgagaatttcaggtaaatggatagacctgaaaacacaaacaaacaacatactgaatgatttaactcagggcacaaaaggcaaacaccttcccctctctcccatatgtagatcccattttcaaatgtctttatttgtgtttaatctggagtacaagaggaagctgggagatgacaatggtgctttttgggttagtgcacattacgggaaggggatgataggttataggttaaagtgaaggagaaaggaggaatactgggagcaaaggcttaagtagggtgggcacaggcaaaaccatatggactttctatgctggcctgtgatggtttgcatatacttggctcagggagtagcactattaggagctgtgcccctgttggagtaggtgtgtcactgtgggtgtgggctttaagaccctcatcctagctgtctggaagtcagtattctgctagcagccttcagacgaagatgtagaactcttagctcctcctgcactgtatctgtctggatgctgccatgctccctgccttgatgataatggactgaatctttgaacctgtaaggcagccccaattaaatgttatcctttataagacttgccttggtcatggtgtctgttcacagcagtaaaaccctttctaagacacctccccgactctaaataaagacaaggagacatatttattataatatctttaagtcttaatcacttacacttattctcaactagcttgtgacttaattaacctgtttatactgatctacattcctccatgtgactcattagttgcccctcctgcagtcccagcctgcttcttcctctgagtctggctctttagtatctcagggcctgacttccctcaccaccccccccctccccaggttctatctctccccagaagtcccatcttctaactttgtgcccagcaattggccattcagctctttgttaaacctattaggggggtgtttataaaatattatgcagccatatgaataacaataccaaaattgggtctgtactcaattctctgctggcatagaagccagcatttgaataacacaaagataatctttacacagtgcacaaaaggatccccccagcgcacaggggcatgggagaagccaggtgacagaggggcagctaactgaaaggaagggtccatgaaaactcacaaggtatcctattacctcccaatgcaattgaaagaaaaaataattggcaggatagtagactacatgagaaagaagaaaggggagaaacatcaagggttaaatgattaagcatgggtgggagaggccatgggggtgaggtggggtggggtggggaagggaattaccctgagtcgctggacagttactcccagtattcttgggttagtaaataaaaatctccacataagggagagtggaagagttttgaatgactcctctgtcttgttggaaataaatgttaaagtgttctggagatggctcactgtgtaaagtgcttgcttgcaaacatgttcagatctttagcatctgaataaaaagtctggtgtgttgggctctagctgtagtctccgttctgggatgggaagggggtgagtggaggcagatctagtcttggagatcactaactggtcagcctagctaatggatgagctctggannnnnnnnnnnnnnnnnnnngatacagggagagggattgaggacagatgatgctgatctctggtttcccatggatgcatacctgagcccactagcagaagcacagaaagtcacataaaataggcagtgagtttggggtttgaagggaagagtgacatctcttctccacctcaaattttcttaggggatgcactctctgctttgctctcaagccacggagctggctaatagccctgtgtggctgtgtgcttaccttctggaaaacccactctcaggtctgcctgagcagaaagcctcaagctcctgccactaagtgactctttagggctttaaaaagggttatagcaaatgggaaaattgcactgatcgtggaagccttactgttaaaatgttaaagaacctcaaggtggcatttattataatattggttttcgttcgctctgtgtcttccttttgaggccccctggcattggtactctaggtcaagtgggaccgaaagcccaggcagaaccagctctgtggagagagcagggctgtagggttcaaagcagagttaagacttagcttgttccctctgatctcgctaacctctctctcctcagcctctcttctgtcaagtggtaagacagcttatactacctgggtctcagggactagtgagcaggacacttagtggtcggctctgattggttgtgattgctgtgtgctgactagctttcacctactggatactggatactggatagagccagatgtggaggatagagaagccgaaaaaaggtcagtggtgggtgctggcctcccgcaaagcagtgcatgtcctaggagagcctcactgcaacaagagtttgttaggggtttgtctggatccttgtgaggtaggaatgtgtgagttgtgttcgatgatacctttccagaaaatgagaggggaacaaagagggattgggcattgaagtcaaggggaggtgatattctctctgtctctctctgtctctctgtctctgtctctgtctctgtctctgtctctctctctctctctctctgtgtgtgtgtgtgtaatgcgactctttggtgggagtgtaaggcacaggtgtgtggagtggtggttcagtaatggcagcatcaaggcagcttttggctctctgagaccttcctgagctgatccatactctttttttttctttgtggcatgtttcaaatcctgagtagcatctagggaggaggcagctgtgcagttctgaggtctttggttccttgaacttcaaatacaaccctacttcttattagctacatgactgtgggcaaaatgatctttctggacctcagtttcctcacctggaagacagaattgtcagtgacattgctttatggattatttagatgttgtacctacgggagctggggagatggtttggtcagtaaagcacctgccactgcagcatgagaacctgcatttggatccacagcagccacatggaaagttaggtgtggggctggagagatggctcaagagttaagaatactagatgctcttccagaggactgggattcaattgccagtgtccacatagcacatcaaagctatctctacttccaggggacgcaaaactctattctggcctccactggcatcaggtgtgtacatgatgcacagacatacatgtaggcaaatcacccatatacaacaaataatataatagtaacaaaaaaagctagctggctagtgcagagacgattggatccctggccaaccaatctagccaatcagtgagctccaggctgtgtggcggagagggtacacaacactgtctactcacccacatacacgcgagcacataccacacactcacacagatgcaaggaaagttgtatgtgtgaacacacttgagagttgcttagcatcattggatgcaactgcagcttctaggcatactgtttccaggtttctcacattccctctctctgatgcaggatgtccaggttctctgcacctctcactgatgcaggacgtccaggttctctgcacctctcactgatgcaggatgtccaggttctctgcacctctcactgatgcaggacgtccaggttctctgcacctctcactgatgtaggatgtccaggttctctgcacctctcactgatgtaagatgtccaggttctctgcacctctcactgatgcaggatgtccaggttctctgcacctctcactgannnnnnnnnnnnnnnnnnnntgatgtaggatgtccaggttctctgcacctctcactgatgcaggatgtccaggttctctgcacctctcactgatgtaggatgtccaggttctctgtacacaggacagctagactccagagtctgaacgtctgagaagcactgatccatcctgtttctaatatttcctgcttctgccttgtgcacagctggtaaaggtcctcttcagaagaagtgtgagactcctactctctgcccactctgtacactgcagtgtccttcctattgcatgatgtgatgtgagctctgcccagaatctccccaagtggatcaccttttcatgggtctcagctctgtctgattaacatgcctgacaacgaaagaacaaggcttgtgcgttcctggcaaagggtaatctgtgtcagagggttgagtgtctgaaatgcactttctctggttcacagcgtcagagctggtgtctgaagtacacatgagcacccttactgatggcctgatgtatttgtgagagctctccacagaaacagcagctagtgcgctcactcgccctccctctctccctccctccccctctctcgtgtttgtgtgtgtttgaaagaggaagggtaagagaggtgggtcatatacttataggaagttgctcatgaagatccgacaacacaggttctgttttttttttaactttgtattgattctttgtgaatttcccatcatgcaccccaatcccacccgtctccatgtgccttccatattcaccctccagcctcacaacctccctccctcacaaaacgaaacataaacatcttagcatggaagctggagtgtgggacactgtgtcacacaggacacccttttgtccacacatctttacttgcaaatgttcactgccatgagtcattggtctggttcaaggcctctggcttctgctacacactaccaatattggatcctcaccgggacttctctcagatatcctgttgttgccctgtgtcatggagatcctgcaactttggctctgtaggaccagccccttcacaacctccagcagctcatagatgttgggcgggtcaatcaactcaaatccttgatctgagcctgggtggtagctgagttggtcagctcaccagccctcccacacccaagccactggggccagctctcctgctttgtttgcccaggcaaggttcagggccacctctcctgaatgccaaagccagtgaggggtggggccagctcagctcagaccttgggtatcaacatggcccccaatcagcccagatgaccaaatgtctgcatggcctttgatggtaacatgggccacagatagcgactcagactcctgcagcacaggctcagatagtaccatgacctcagatgccagggcaggctttggatacctggagccataaagctctcgctctgtggggggtgggggagcggtagagcaacaagctagtgggttttcaagcccagcctacaagcttctggtactcaggctgttatttgtggcaagatagctatctgtgtccctttggttaagtgtcttgctaccaagatctaggtagccccacccctgtgcgtgtgagcctacctgtgaggagagctgggggagaaattactctgtagcaaggcttcagattttattgctgggttcttatttgccatgctcttctcgctgtctgtgccgttgcaaggctgcttgtgaggagatgtggaaaaatacccacccgttcaccccagatagggcctcagtgacagaccaaagctatgatttcatgcaagtctaccttggtaagttatgtatagggacatgggtgacttagaggtagcttatcttagttaaggttcctattgctgtgaagagagaccatgaccattgcaactcttatacaggaaaatatttaattggggttggctcacagtttcagaggtttagtccattatcattatgatgggaagcctgggagtgtgcaggcagacatggtgctaaagaaggagctgagagctctacatttaatgcgaaggcaggaaggagagactgcaccatgccgggtggaagttgagcataagagaccttaaagtccagccccacaatgacactctttcttcaacaaggctacaaactccaacaagaccacatcttcaaacacatcatctatgggggccaaatctatccaaatcaccacacagctgcgccactgaaggggccattccactatgcacaactggtgttccctatagcttgtaggcatcaacactacagatgtctcccctacctccagcaattgttcaatgcttgtgtaattttggggagggagcctctggaatcttttaactctttagctgcttgcgggttttctgagccatcctcctttcctccttaagaaatgtttctattatttattttgttattgaagatcagccttagtccatggtgatctgataggatgcatgggacaatttcaatatttttgtatatgttgaggcttgttttgtgaccaattatgtggtcaattttggagaaggtaccatgaggtgctgagaagaaggtatatccttttgttttaggataaaatgtcctgtagatatctattaagtccatttgtttcatcacttctgttagtttcactgtgtccctgtttagtttctgtttccatgatctgtccattggtgaaagtggtgtgttgaagtctcccactattattgtgtgaggtgcaatgtgtgctttgagctttactaaagtttctttaatgaatgtggctgcccttttatttggagcatagatattcagaattgagagttcctcttggaggattttacctttgatgagtatgaagtgcccctccttgtcttttttgattattttgggttggaagtcgattttgttagatattagaatggctactccagcttgtttcttcataccatttgcttggaaaattgttttccagcctttcatgctgaaaggacccagatatagctctctcttgtgagactatgccggggcctagcaaacacagaagtggatgatcacagtcagctattggatgggtcacagggcccccaatggaggagctagagaaattacccaaggagctaaagggaactgcaaccctataggtggaacaacaatatgaactaaccagtaccccggagttcttgtctctagctgcatatgtatcaaaagatggcctagtcggccatcactgcaaagagaggcccattggacttgcaaactttatatgccccagtacaggggaatgccagggccaaaaagggggagtgggtgggtaggggattgggggtgtgggtatgggggacctttgggatagcattgaaaatgtaaatgaggaaaatacctaattaaaaaaaaaagaaatgtttcaatctagaggaaacagcttcatatctgaaaggcctggaagagcaggcgctgtagatagtacaggttgatttatgctagagacagggtgctgacatttgctatgtaaatgacatgacggtttggtaagtcctgtttttggtagtttatggtacgcaagccaggagcatgttgccgtttgtaagacatttttgaggacctaaaagtgaggctgtgttgatgcttcatgaaaacttgagacagcttctcttggtaagaggtacgaagacctgctggtgtctttgacaagtggtttcaggaacagcttgccgtctgcaggaaggctcttcagggccccacttaggatgttttggattggttgctttttcatagagaacatccagttttcttctgaggagcctggcagagaatacaaagcaattgagaccagatctagcatcacagagggacaggctcagagttttagtggtcatcggaagaagcctttccttgggtggccttgtgtgttttgcagacacccctgagaagtatggcagttcccatgcagggagtcatatgataggggctcgtgtcagctcatttcctgtggcccacagcgtccctctgcatactgttctaatctacaccctggaaacaataccgatcttttttcacaagtcctgatcttagcggggagagaggctagagcatgtgtgactttgctgttgtcatcttcaactcaagatgactttctgccaagagcctcctcctgtctccaggcttgtcaaaggcatcagccacctcagcagtcatccctcaccttcaaggaagactgctcctgtcccactttatctatgaggagactgggggaacctcacttaagtagaacttgactgggctttgacccggatcccattagtcagcacttgcccctccagcctggctgtccttatcttgttcaccagacattgttttgcaagcttttttttttatcttactgcatttgtgtattatctctctgttattgagctgttggcgctcacagggctctgcttctggaagatggggaagattaggaagttgataactcactcagtcctgtggcctctgggtctcccatcagtatgtatgtatgtatgtatgtatgtatgtatgtatgtatgtatctgtggcatatgtgtgtgcatatgtgtgcgtgcgtgcttgtgtgtgtgtgtatgtgaacatgtgcctgcatatgtgtattatgcatgtgtgcttgcatgagtatcttttgtggcttcttccttgattgctttctagtttatgaagcagagtttattgctgatctggaagcttgcctattgtgctagtctacctatcccctctctgtttcctgagtgttttaattacagaagggccattttacccatcttaacattggatctttctcttgggggtggaggataagtgctggagattcagcctccagttttggtgcttgcataacaagtgctttaccctgaattatctttccagccctcagcttctgggtaccaagtcttctgggtaccgctgcagcatcctggctggaggtggcagcaaactttgtctccagatgtcaggaagtaaccttgaactcgccacaagctgctccatctctctggaggcttggcctcgtcagcatctcgcccaggcatggtctcacgtgtgtgcttctcctcctccaggttgggaaaaaggttgaagaagactcgcaagtatgacatcatcaccacccctgcggaacgtgtggaaatggccccactgaatgaggaggacgatgaggatgaagactctacagtatttgacatcaaatataggtgtgttggggacagaagcttcctcctgggctgagtggtagatgctttggccacagcatctttgtgctcttgttcctatcatggtgggacctgttcctatcactaccttggcagcagcactcaggaatccagaagagcagggccgacggttaaatgcttatttgtaggtgaggggaaagaaaaagaaaaaaagaaagcctgcactgttttggttgctttctgtcacattagctttagaaaagagtttgttaaggcttgacatttaaattttatttactttgtatgtgtgtgtgtgtgtgtgtgtggggggcgtttctctgtaatcttggctgtcctggagcttgctttgtagaccaggatggccttgaactcagagatcctcctgcctctgcctcccaggtgctgggatttaaggtatgtgtcaccacacctggcacacttgattttacaaagaacagctagacactggatatagcaataccaagtagcaatattcagttatatcacaaagtaatgcatgcatagcattattagtgattatattggttttttcactaagccactttgtttcacatttggtacatagacacagaatatagcatgagaaaattatgtcattttaaaaggtattcccatttctacttcaatatatatgtgtgtgtgtgtgtgtgtgtgtgtgtgtgtgtgtgtgtgtgtgtgtaccatatattccctccttccaccatgtggatcctgagaatcaaactcagtttgtcagggttggcagccagtgcctgtacccactgagccatcatgccagctcctgtactctcttgattcagggccactacgagaatcttgttcatactaggtgtggttgttactattgattgttacctggacaagatctagaatcatctaggacactaatctcctacccagtctgtgagtgagtttctaggttgaattacaagagaagaccttccgcaaatgtgctcagcatcatctcgtgggcaaggggtactggactggagacaaaggagaaagggagctgagtgccagccttcgcctctctttccctcttgactgggactgactgccttatggtcctactgctatgcccaaactgtgaactaaagcaacttttttttctttttttttttaaatattttttattacatattttcctcaattacatttccaatgctataccaaaagtcccccataccctcgcccccacttccctacccacccattcccatttttttggccctggcgttcccctgtattggggcatatacagtttgcgtgtccaatgggcctctctttccagtgatggccaacaaggccatcttttgatacatatgcagctagagtcaagagctccagggtactggttagttcataatgttgttccacctatagggttgcagatccctttagctccttgggtactttctcttgctcctccattgggagccctgtgatccatccaatagctgactgtgagcatccacttctgtgtttgctaggccccggcatagtctcacaagagacagctacatctgggttctttcaataaaatcttgctagtgtattcaatggtgtcagcgtttagaagctgattatgggatggatccctggatatggcagtctctagatggtccatcctttcgtctcagctccaaactttgtctctgtaactccttccatgggtgttttgttcccaattctaaggaggggcatagtgtccacacttcagtcttcattcttcttgagtttcatgtgtttaggaaattgtatcttatatcttgggtatcctaggttttgggctaatatccacttatcagtgagtacatattgtgtgagttcctttgtgaatgtgttacctcactcaggatgatgccctccaggtccatccatttggctaggtatttcataaattcattctttttaatagctgagtagtactccattgtgtaaatgtaccacattttctgtatccattcctctgttgaggggaactctttttttcttaggtcactgtctcagccagggtttctattgctgtgaccaaacaaccaggaggaggaaagggtttccttcattacacaacacatggttcattatttagggaagccagggcaggaactaaagcagaaaccatggagggatgttgcttaatggcttgctccctatggtttacttagcctgctttcttatagtacccaagaccaccagcccagaggtgacactttctgcagtgatctgggccttaccgtatcgatcatcaatgacccttcaggaagatgtgctgcaggcaaaggccagtttggtgtgggcatctcctcaatggagagtcccctcttcccagatgactctagcttgtgtcaaggtgatgtaacactagctagcacagttgcttttgctaagtgttttcttattattacaattgagagcaagtagctagtaaatacactgggtgaccaaactgattctgtgagagacgtgataggatggtctgttttttattctattttatttgtgattaaataagaaaactccctgatctgggtgtggaaggtcaggcctcttgttccaatactcaagaggctaaagcaggtggttggttttttgttttttgtttttttttgtctagaacataagatgggaagggggtgtgttctctgatggtctgaacgccagtgcaatgtagcctgagagacttccacacttgtctcagtccttcaaactggaacatgtttcctttttgggctgactgtcagtcctggattggcacggctgctagctctgaaacttaccaagcactgaaagcagtggatgaagtgagccacttgggagctgttcaagtgctagaaatacttctggtctctgaaaggccaagttctctccatggccttgacgcaagagtgagaaccaagggtgagagaaaccaggaacccatgcaggagcatttcacaggcattcccccgtgtgtggcacagctatggcatggggcccctcagcactggtacaggatctgggtttgctccctctagttccttggtatccttcatttcttctagtctaggcagaaactcaggacccagaaaattcacttgtattaatcctgtactctgagctatctggcaatagtgagcctgagtcccacgggctcagtcttcatgctgagtgactgttcttcagcagcctggctcttctctgttgtcactttggggacaacttcaaaaccaggttcctatatatactatggtcactttatttatttgtgtaggtgtgtgcacatgtatgtgtgtatatgagcatatatgcatacatactatggcatgtatgtggtggtggtttggcaacttgcaggagtcaggcctctaattctactatgtgagtctgtttggtttgaatgagcatggccaccgtacattcatatatgtgaatacttgatccctaattggtggaactgtttgggaagattgaggaggtgtggccttgctggaggaggtgtgtcactgggggtcaactttgagatcaccaggcccagtcagctttcttcctgcctctgtttatggatcagaagggatggtagcagccttaacttctggtcaatagctgactactgagtggagttggctggtgggttttgctgtatggagtttcccctcggtctctgagtgttcgttacctttgaattttctttctttcccttgctctgttaggcaggacatgccttctcctttaaccgattaaagtggtaaatctgtatttattaaatttctaatatttctccagttcaggattctggagagggagacagcttggtcatgtgttatctttctgcgtgaactgtcttatacaaggctttccttctctctagggagtggtaactggctgtttgttttttttctgtctcgttattagtttgtcaggctttgttaaaagttatggtggcctcataaaacgagtagggcaggcttccttattttccttttctggactagtttggatcagatcggaatcacttgttttctaagtgtttagtagagcatatcaaaaaactggctggacctgagcagcctgtgtggagtttttagggtcagtgacattcatttccttgaatagtttttagaatattcagtctttacttcttcctgggtcagttttgatcagaagcagttttagggcattttgtctattccctttaaagtttacaaacctgttgttgttgtgtagttgttcccaacatcattctttaatcttgtaaacatttgtaatgtgagcagctatggtctttcttttcctctttgaaagagagggtctttgtgtagccctggctggcccggaacttgcagagatccacttgtctcttcctcccaaatgctgggatgacttaatcccttggtgtgtgccactatgtctccctctctcgtatttttaaaaaatatttattttatgtatatgagtataccatagctgtcttcagacacaccagaagagggcatcagttcctattacagatggttgtgagccaccatgtggttgctgggaattgaactcaggacctctggaagagcagtcagtgctcttaaccactgagccatctctccagcccccctctcttgtatttttaatactattttcccccctttcccccttgctcagtcttgcaggaagtttcacttcgtcaccggtgcacgggattcatcttcgagcctctccgatagcctcggtgatggtcggttttgagttggtgtctgtatctggtcccccagctttctttgagcacattccattcctccacttcttcctctgagtgcatagccccttctgtcgttgtcagcctccccagctggaatcagcatttgttctgtggtagcctgtgtcagagcctcccgcagacattcaggacgactgccagaccctgcttgccctgcctccccttggtgtccaggaaggactgaacttcgggggctccccacgggaagctcctgctgtttgtggttgaaatgaggatgtgaatgaacttggagcgagtcagtcaggcacaaggccagtccagtccagagaagactgactgctgcgaggctcagaagtgttccctaatgtacaggtgtatagaaactagagatgagaaagcaggggtaagcgcgggggtgggggatgagatggctgtcatctcactacttagcagtagccactagagagagtgcgagtacacatctgtgggcgttgctttctctgttgaaaaaggcccaagttacaaaggccgatttatggcactttctcccctgaatgtcatattgtgaacagcttttttttttttttaaatgtcaataagtatgaaagaatgaaggttttaaggtcaccttttatttctacataagttttttttttttttttttttttttttttttttttggcggacccgtctgcacactgataacttattcacagagtctaggttttcctgtccaccaaatgtttctggcttcccccaggaagcacacaaattgaactcggatgtgaatgattcctgcctttgggttattttatgacggagtggaaagaggaacatcgagcttggccccagggtggtgaggtgggtcccgatattggtctcttattggacgtgtaactttctgatcacaattcgtgaactggaacccgtgcgggttggccaggcttgtttccagtcaggtagaggagacatcacaggccagaaaggcttctgtgtacagcaccccgaccacaatactgtatcaaacctaggacctcaagcattctggccacgccctctgctgctgagctccgcccccagctcaacagccttcaccttttctatttcttactgctgggatgctttggtttgggaaaaaacgactgcacggagcgcagagagccctggagttttggaatggttccagattttgggaggcgtttggatttcatgtgtgttttgagcttggttggctcagcgcacagttgcagtcagcgttttgggtctatgcaaacccctagtttatcacgggagacttttgttccctcgaggcatctctggaggacaagcacacatgagctttcctgcttgtatggcaggcagcctggcagctgtgttgagtgcagcccaaggtacccagctgctggaaaaagcaaccaagacacccagctgctgctgcccctgccagccccacatcctgctgagatgtgtgtgcaaacagtgtggcccttccagggtgtggactggctttctcagcaggcttgtttgcccctcttttgtggctagagcttcctgtaggaatattagacaccaatggcatcaacatggcataggagactgtgcctactttaatctcttgaacagtcaggccgatgtagagtcggtttgaagtggaagcagagctgaccccctcatctgaggttgaggtctggactctgagtgctcctcaattgaaggttacatagctttccggtggcaatagcttatggctgcttttccttgctaaggagcttgggatgggtaggttcagggggctcctctgccggcctcatgttccccagggtttagctttgctgttaaagcagatggggggctcgggtttccccctgctcagcatcacgcctgtgtatacctgtggctgtctattcctatagctatgggggttgggcgtaatcatggggtgtaggtataggccttccagaggtttcctgtgcttctgtgacacttgtaagatgaggggccacctgggcaactgcacttaaacacccaggcaggcgactgtgccacacgttggttgttcaaattgtattccagtgctgtgatggtgttcatccatcagctcttcctggggtccacaggccactgtcactggctgtcatttgtggacattttgttttggtgtagctgtggagatcggctcccattgtttgctctctgacaccatcagcagtccttagatatgttttggtttttcaagtatggttatgtaaagttcacaatccaatactaatggaggaggtaactttaacaggtctatctattcccctgccccctcctaagctcctacgatgcagctgtaacctttcacccatggtaaaaatctctcttgtgtccctggtgttgtcagccctgtgttagagctggagttctagatgagcaggctcacacatggatcctgcctatgcagccagtcttagcaggagagagacagcggtcatatgcttacatagacccaactcttcaaagtgtggccggtgcactcaccaggtcaaaattactataacaaaacacccaagacatcttcaagatttattttggctcacaggatcagaggtttcagtcgctggttggtttgccctgctatggtaaggcaacccatctcagcaggtgtggtagaacaaagcctctgagccagggaacaaaagggagggggagattggagtcctataattcccactcttgacctggaggtcttccaccaggcctcacctcacaacagcgcctatcctgctaattcagtgggcggaaggggagacactgtggctcccagactgtaaaagtagcttgagagccgagtgcaagccctacctttggtttatgtgcgccccagtctcacctgctcaacccgggcttcactcacactcagtcttcttgccttcccctcccaactgctgggattgtaggtctgtgccagcacgcctaaccctgatttctgcattttaatgtttgaaaagagaaccaaaaggatatttcaggatgcataaaagttgatgacagatcatcaagtttgaacacagccatcctcagacgttctgtgctgtgtctggcttttttttttttttttgtcatgacaacagggttcatagttgacacagagactgcaggctctacaaggttttaaaatagttacctttggatgctttggcctgaaaacttgtaggaggactaggaaagagggacttgagggaaaaagagcatgtgttctaagagaggcgggggctgtgtgtgagagggagggatcctggaagccttgtgtgtgagccaaaggacagttacacgaagaatggaatgtgccttgcagacagctcggttttcaaaagctccatgattgaagaaagtcccttcttcaggactgtagagaccacaatggtgatgaacaagactgctcacacagcaggagtggggaaggggacagagtgacagtgtggccggcctaaggggtggcttcagtgctctggcagaagtgatgattctcctccttccttctctttcaggtaaaacttcgctggcttgtcagcgtcctgtggggaagctggtcagctgcagcctgggctgtcaaggtctgggcaccgtctctcacctgaggtgataagacccaaaccaatgttatttatggaactctggcttcaccctccatgtccagcgtctgcctggaatgtcactgtcacgctcgttctcagctgccagaaaaaagagtcaccttagccggccctcggatgaccctttgaaattctctttccacccttgtcttgaggggttttctgccttcctaagagatgaagatgggaacatcgatttcaaagaattttctaaaacaactgtagataatagtaaagccacaattgggagatcaagagttttaaaaagctgggctggggagatagcttatggggtgacaacctgatcacctcacaagcggggggcatgagtttggtccctagtgctcacattaaagcaaaactagtctggtagcccacaactggaatcttagcacgagaggcagctagatccttggggttgactgtccagccagcctagcctaatgagcgggttccaatgaagacacctggtcacagaaaagtgggttggctccagaggcataatagccaagcttcatttctgcctctatatatgtgtatgtttgccaacacacacacacacacacacacacacccctcaggaccttcagatatacctgggagaatcctgacatttttgttctcccaaatcatttcagcttcttcaggtctggctttatttagggaaaaattgtatatttcaggatggatgtatacgtttcccatccgatctaccctgtctaagaggttccccacaataggccccagaagaatttaaaattatcagggatcagaccacatggggtgagtgagtggatgggtgtgtacacctatcagataatttctcttctcttgggaagggaaagtgccaggtggctctcagagactttcttgtgtgctgtaaaaacatttgtcctgccttagtgctgtggtgtctgtcttaggaatgtactgctaagaaatcactgtggcaaatgaatggaagaagaagaggaggaggaagaggaagaggaagaggacactgttagggactctgttggaagttagtccaggctaggttggacagaactggactggaaactctccagggcccaccgctgtttatgaggagttcaggtgggcacctaccctgggagctgggtacccaggggagccctgaggaaacaggctctggactaactgctcaggttaatggaggcctcccacttggccttctcccatattgctgtagcaggaatgcttctgtgcaaatctaatagcagtgcctttgggaccctgggagtgcatcacgtctgggaaggtgacccttgttatctcagttccttttcatctttgtcctagggtttgtttgtgtatttgcctgtctaatgccctgctccattgctttggatgaaaactcgtaccttggccagctccaccactgtcaggttctccagttctgactggggttgtggtgatggcggtaggtgggaagatccaccctggctcaggagcctgacttgacactggttctttcagccctaagccagcatctgaggtgtgctgtgctcctgggatccattaatttcaccttttcggctggcttctctcatccttctgccattagccagaggggcgggttgtgaactggagccggtgactgtcctctcaccatggactgaagcacagtggtgactctaggaagctggccacctcgaagctgtacatcctctcagccttggagccgggactcgagggtcccagaactgcagctgaaccatctggaaaagctggattctctattctcctgccttatgtatgaacaccacggatccggctgccagccactcatcactgactggcaggagtggtgggacagtgaccttccaaatccttgatggaacttcaacaccgtaggcacttaaataaagatccttaaagcaaacaaaaaataaccttcagattgagtcacgagtgtgctgggtttggatattttctgatggagcaagtgagctgactcgctggttaagaacatgaacacgtgtttaccttaggaacagcttccggggggtgagcaggggtttctggggagggggttgtctgtgcccttgtgatttagaaagaggcatataaatggaatggggccgggaaaacaggcccagccctgccctccccccccggtccgtccacccccccccatgctgcatttgttcttgatttagaaactgtttcgggttgggaagcattgagtccccatttgtttggagactcttgaggtgtccagggcccatcatgtcagagctgcttacccttgcctcatacctgtttcagtagaagatttcagtgacagccaggtgtgatggcacacacctgtcatcccagtgctagagaggccagccccggatacagagcaagactttgtctcaacaaacagaaaagcacccccccaaaagtgagttaaacatgtccaggctggattaatccctgagtggataaaagccaaagagagagagagagagagagagagagagagagagagagagagagagagagagagagagagagagagagagtgggggagccaggcttacttatattcacgtgaacatgcagcgtttgatgtcaccaagatgggtgtggtctgctcaactctcccagtggttcactgatcttcttgtagtcaaacacttaactgccagtcttgttcctcccgacacccagggatgagccagcccgatgaggaaagaggtactctgaatccagcggtacccctttcggtggagggctggccatgagtgtagcttgttttttggttttaggggtttatttgtggctggtccatctaaatcctggtctcctcttcacaaagaaagcctttcttcccccatgtgttccgtaagagctaccagagtctagtaggaagagataggtggtccatggctctccccaagcctgcctcctccttgcctacatttcctaccaaaagtgctgacacagcaggcaagaggggaaatctctcaaaatgctactttctaaggtcgtgggagcccctatggaagtcttaagactataatgtgtgcctttacccgcccttttcagcaaaatgctggctttagggacttttcaaatggagttgggaaagaaccagaagagacttttctatagggtgggtaaacacatgccctatgttgctaatgaggcttttactaccaaagtaactttagatttgattggctccttagcactgttagctctgggagaggggatggactagcctaggaacaacagcaaagagctttatggagcctcgatgaagacgatgaagacagtgggaagagtcagatgacgactccatctgctttgcagaagcacagatctgctcccctaaagcctgccagtggcccccccatcataggtgggagccagtgcctgtttcgagcccacctatggtagaactcttgtgagacttcaggaaaccttattggggactctgtataagtacacagcaaacagcttggtgagatcactgtatttcctgttcttgttgggaaccaaataacataagcgtttcaggaagggaagaagcaaacgacagagaagccggtgtgattctcggcttgccgctcacagaaacagggctaactttcgccattagcccttgtgatcatttaaagattagatctagtttattgttgctctgagacaagtatctctctgacaggcaccaagccacaaaaccttgtagcttccaccctgaaagtctttttcagctactggagtcaaaaccagtcacccccaggctcctcccccactgacagaaacttcagatgttagagagctcttacagcttccacagccccatgtacctcatcagacacaaagtcatcaacaagggcagtgagactccacaggggtgggtggggtggggtggggggtgttgccaatgtgcagcacaggctcatgtttgagaaaaatagagtgagccacagagtcaagagcaggtcactgggcctgggaagaagggtccggaggtgactggtgaggcatgaagtgtgggagaaggacccaggctaggacttagaacccaggcaggaacaacatcatcaacaacaacaaagaattggggtatgagctataggtgtctgggaatggtcaccattattattaacttttggggtccttcatgtgcctggagccttggcatataatttcttattcagttctcaaccggtcttttaggtgggtattatctgtggaatatgctctggggttgtgtgatcattaccatagatcagggtctgtttcttctcagctatatcctcctccattgctctccctcagaaaaatcaacttactgcattcctgatatttgaacattctctgagtcccagcaccaggtaatggggttggcaattctttgtcttcatgggaactgacctaggaaagtcagttatcactctggcgtacaggtttgtaaggggtaggtcttagaccacaagcctcttagcctctccaacatgtttacttggaatggagagatgggagacacctttttaggaccttaagagttttttttaggaccatttggggtggcggaggatgcccgagctctgggctgatgggaattaaggtcacatatcccaagaggtaccctacttaggtggtagctcccccaatgagtaaaagagtctgtttgctagacaaagagtctgtatgcccaggaactcctggccatgactttatgagtactaccagggtgcctaggtctttggagtgcccggtctggttgcaccaagctgggcttagggatattctgggattatccttcttaagagcacttgcatgtctaaattgttggggaacttttgtcttgtgagcatactgtggctgtcactatgtgactcagaacagctctgactacccacaggagatctgcataaggcagcctgttggcagtccttcgtggaaggtggcagtattggcagtcattagatcctcaccttagattctaggcacttcctcctgcccaagctgtgtgcagcggtgtcatttctatgcaagtttaccccagctgtatgtagtctagagtatagaggaggtagaaggttaattgagtggtatactccatctatagtgtggtatggggccaggccttgtacacagcaataattaggaatagctgggtggacagcgtcctgacttggactgtgctctggacaaacagttccctgcaccttgcctttctaaattctcccagggcacccggggctttgcagtaccatttccagttgccccaagctgggttcaggggtatcctggagctgttccccataggcgctcttgaaaaagttcccttttatttctgatctcatcatggtgttaatgactaagcaagccaagcacctttggcgctggttcctggttaatgccttcaaaggcatcatttctttctaacctgtgggctgacccaaatccacagtcaaacaggaacactcaacagtttgcatgagaacaccccccaccccccactccccaccccccactccccacccccggcttttgagtttttggccagggctccctaagagactcccaaaatattgctggttgtggctaggggtagaaagtaagcccctattgctaaagatgctgtgaatttcagacacaggacccagagggcttggactggggatctgacctgaaaggaccaagcataaacttttccaaggaagggaagcaagcagtcaatggtcctacctagctattgttgcttataaactacaacaatgactagtgtggtgtcgtaaccttaaagatgtaacagtggcatgaatgccttgatgcatatgttctctacttggtcttagcaagagggaaatcatgactggtatgggtaacttagccaacttacatgggcttagataagtcatggaccttggaggaaaagctataaccatcaccaagccagcataacccctagctacgttctaaatgtttatacttgccctcacagataagcatatttcttggtccttatcaaggaaatgtctctttgcaacagaccattacagaaaatcacaactggtcagaatgcagagaagagatggtgcagagtcccagctccaactggtagacctatgacaaactcctgcacacatctaaagcccgctgcgtctcatggaataggacatgggaagactgtgagagccacagagtcagggagttaccatgagactgtgcctcctcgaaactaaattagagaagctacactcatgaagtttcaccagcatgcgtgcctaaacaacacctaaacaaggatgccaacaatagaatgctggcatcttatggggccccaaccctagatgaagaattgcaggcaactaaggtatgccatgattaggaagaacttccccagttgttcattcaattcagcactgaaatcatatacatacaggtaacattatatgaactgagaaggtatatttaggtatgtatacacacatatatacacacaattaaaaagaggcaatgagttttgaggaggaaaatacataaaaggggttggatgaaggaaacagaagtgggaaatgatgtaatttcaaaaggtaagatcaaaacaaagtgctttgaaattgttgtaggatatctgccagagaagactctttttggacacaggttttaagcagtagaaagtcttcattagctggccggcaggatcccagtgtagccctctgcctttctcagggtaaagttttaaaaaacaaaaccatatcctcacttagcaagaacagctagccagaagtggaactacagaaggcaaaagagcaaggttagtacatttagagactttcccagaactatggactttgataaaaatggggttttatccttgtcttggcatgtgttactgctgcctgtgtgttggttccatgacctgaaggaagggtactcccatcacgatgtcagttgtgtgaaggtctgagatctactgaaaaaaacaaaacaaaacaagactttatggtgcaaactgagcatgcccagagacatccctgtttatcattttaattttctacatatctaccagaagtactccatgactttgagctaagcatgcctccaaatgtttgtctgctctttttgagattttgacttttaaactgagcacactcacgaatgggctgatccctacatgaatatatatatattgcccctccacaatagaatcctatgcttcctctgtttgggaaaggtctgacttttagaatcatgtcttcacatgacttgatactggcaatgtatttttctctgctctttcacatctcatctgtgcttattttgcactcaccaagatgtaaacctaatgtgttgactttaaaataataaggccacatggtgcttgtgacatgagcttttgccttttgcctggaggagtctggtttgtgagacttgtcggtgtcttcttttccccctattgagggtgtgtggatgagtgttgggattgccgcgccttcaaaactgggtgctttcctcgacgatgctcatttctcccagttacaagagctcgaggatgttactgattctgcctgccttgacatctatgccattatctgaagttcttctccctcctcatccccccaaggcttcggtaaagcaccaaagtcctcttcttgccttactttaaccggaatcactgtgcatgggacaccattactggaaatgttttggaaatgaaagtgacgaacagtataagcactgcataaagcagctaatgaaatggaataatcttttcatttggaagctgagccaggggcatagaatattgctaagaattaaggctccctctggactgtccatctacccgatacattgctgagatattgaagttctcagctctcacaaggcagggaggagtgagcagcccatgttgtgaggatgtgaggcagttaataattgaggtgtgctctgttccgtgttctacaggtgttcactggcctctgggcacagtgtgggggcctgctgggctatccagatggacagtgcattcactagatttaaggctactggagttggaaggaaatgagcctctattcaagagccctgtcacgacgggtgtccgcttcactcaggcacctgcatcctggcatatgctagcctctatttattgagcttctactgtgtttcaggcaatgcaggaagaactttacatgggttagagagaaactcatttcgcacagtaagctgacccagggactgtgaagatagactccctaggtaagactctacagactctacagctttccaccttgtgtgattttagatgcatctcttgacctctgtgagagtttgtcttgcctgggtattgtgaactggatctgttaatgacttttaaggtacttcttgacgctgccaggcatgcagtagtgttactgtgtatggcagccaggataaagtagtgcctgtgttatcatgtctactttcaaatgaggaaatctaggctttggtaatgagtgtgcccagatcacctactagcagagttaggtgcctgcctttgaaggcctgggtgctatgcacagttttgtgtccctactaagcactagattctgtccaaggccaggatccggacattcggaggggtggctggtgatctcaaccaggtctgtagattggccccagaggtgcagagaacattggctaagtaaggggcaggagtgtgtcctgaggcagtgctctttctgcgaagcacgagtttgaagttgatagtgaatattgcttgggagagtgggggccctggataaagggaatgtagggagcgggaggtagagaggactctgcagttcatgccctgcttctggaaagagcagagtgggcacaggccaagcatctttttcttgcacagatctctattttccttattgcaggaactctcagaagactgcctttgttggggaaagcagcccatgacaccagctctgccatcttcttctcacaggagatcaggcagtatgtcccagtgttgtgctggaagttgtgtagtgaccactattgcagacaccatcgagtcctggtgctctctggattcgtgacatagaagtcagcttgaagtcaggagaaaacatttgaggctactttacatagtagatttttttggtcaaaaagttctgaaattaaaagtaacattttgtctaagaatttcataaatccattgtttttaatggctgaatagtactccattgtgtaaatgtaccacattttctgtatccattcttatgttgagggacatctgggttctttccagcttctggctattataaataaggctgctatgaacatagtggagcatgtatccttcttaccgattggagcatcttctgggtatatgcccatgagaggtattgctggataccatctttagtgaggtaacccaatcacaaaagaagtcattagatatgcactcactgataagtggatattagcccagaaacatagaacacccaagatacaatttgcaaaacacaagaaaaatcaagaagagggaagaccaatagttggatacttcattcctccttagaatagggaacaatatctctagctgcatttgtagcagaagatggcctagtcggccatcacagggaagagaggccccttggtattgcaaactttatatgccccagtagaggggaatgccagggccaagaagcgggagtgggtgggtaggggagcagggtggaggagggagggtacagggaactttcaggatagcatttgaagtgtatataagaaaatatctaataaaaaaaaagtaatcttttggaccaaattttggataatgaatagtatataaaggcaaaacagttattcttggtggtgtctgggtgactttttccctcccatggctttgtcctcctctcacccatcatttaaaaacacttatggaatgctcacttgtgtcaggtggccccgttccaatgggcaggctcgaggaaccgacttggcctggggtggtggtggtgggcaggggaagtggagaagagacaccaaaagtttcactgccagagacaacagaggatgaagtgctaggagggagacatgaggcctcagtgcctgagcagtgagtgaccagcttcccctcaacaaatgacctctggggctttttgtaatttttccttggcatcttttttcctcttgagtattggaccatataacttttttttcctcctcctccctcttcacctcacatagcatgcattcttccatgtccataaatatttaaacaggagccttccaactgtactttgagggccaggtctatcctatgtcaccaaaagctaaggctgagagaggcctcctgtaggagtaagaggggtgaggacctgggttatggctcccaagaagagcacatgccaaatagccttctttcttcctcctcactcccttttacatttccagtctgaaaaacgatggaggtaagatatatgtaggatgatcattcaccttaatgtttgttgcacaactgggaacatgggcacacatccccgcaagcccactcatccagatggaacagcgtaccaactctgaacctactctcctgtctcccctggcagagagcagctcagtgaatatacttcgacactgggcgaggccaatgagaggcagctgctgcccatgcagaaactgtcagataaggcctccaagaggagatggggcaggagcgtctcactcaagacccacctatcaaccccaccgcctgtctttctctcagccatcacaccccctggtgaccctgatgctccttatcctgtctcgaaaacagctgtcgtgtgagctttggatccagtttggtttgtgcccaggtgtctatctaatattcccggtcagaggctacattctatcaggattgtgtctcaggcttctggatctcttctctaacatgttagtagttttccttgggatgagttccttgaatgcagaaaggtctaccttgtagtgtctgcctgaggactgcaccccgctggaaagctatggcatcctgggaatctgtagtgtaggtgtttgagatataggcactccagagactgcagagttctgtgtactcattctgccccaggggacactggggctcagagagtttatgtgaattccaactgtttccaccccaggaaagaaaacttctctgcgtctgggccacctggactgggggtctgagcaagactcaccctgggggcccgtgctcctcttcatgctccctggggtacctgggtcttaggactccccttctgatacaaagaggaggatatgaggtgggccagcagacactcatctgtgcaccgactgaaggagtgtgtgattagcttcatgcatcagggaggaatatggttttgggttcacaggtatagaaatctttttaggttcaaaacatagtgaacttttaaatgaatgaatgtatctttggcctagcgaccaagagtcccaggagtctgaaagccttaaggggccagggagcactgtttgtgctggagtagttgaccccaactagatggtcaggccaaccaactgcaacttctgctggagttaagggtagggggcatgtgtgtcatgtttcccagtctggggagcctagaaaagcaggcactctggagctgggagaataggctgatgcatcatctgcccaacgagtggaaatgagaggctatcgggagaggagctaggtccatggacaccaacattcaagcttagcggggcttccaggagaatgcaaccctcccacctccacaatgacaaaggtcgcaacatcataggaagactcctcagctctctccacaggagccttccctgtcctgcggtatgctctttcagggtgtgtgtagtcccaaagacagtattctatcaaacttccaggtggccctggcggttggttgtggaggccctggcggttgtgatctgaggaccccgtcttgcctttac

SEQ ID NO: 86 - DNA, 2676 bp, Mus musculus
gcaacgtgttggtggctgcagcggcggcgcgggttcttccgggctctgcagcttcctgccgagcatcgcgcagccgcctcggcagccggagaccccggcgcaggcctcccgggtgccagcctctggggctcaggcctccggggtgcaagcctccgggacgcagacctccgcaccgtgcgtgcgcatagtgcaccatgagcgccctgccacccccaccgccgccaccgctgctgctgctgctgctcgcgctcctggccgcgcccgccgccctcgctcgcagagccgagtccgcttcggcctcccagcccgaagcagaacaccagcctccgcccggtcccgggaatgctacccagctgggatccggcatggcgggcgggggaagctccaacagcagcgtcgacgcggtggtgacccgcatctccagtctgcttcgtgacctgcctaccctgaaggcgacggtgatcgtggcatgtgccttcagcgcgctgctcatcgcctgtctgctgctgcgcgtcttcaggttgggaaaaaggttgaagaagactcgcaagtatgacatcatcaccacccctgcggaacgtgtggaaatggccccactgaatgaggaggacgatgaggatgaagactctacagtatttgacatcaaatataggtaaaacttcgctggcttgtcagcgtcctgtggggaagctggtcagctgcagcctgggctgtcaaggtctgggcaccgtctctcacctgaggtgataagacccaaaccaatgttatttatggaactctggcttcaccctccatgtccagcgtctgcctggaatgtcactgtcacgctcgttctcagctgccagaaaaaagagtcaccttagccggccctcggatgaccctttgaaattctctttccacccttgtcttgaggggttttctgccttcctaagagatgaagatgggaacatcgatttcaaagaattttctaaaacaactgtagataatagtaaagccacaattgggagatcaagagttttaaaaagctgggctggggagatagcttatggggtgacaacctgatcacctcacaagcggggggcatgagtttggtccctagtgctcacattaaagcaaaactagtctggtagcccacaactggaatcttagcacgagaggcagctagatccttggggttgactgtccagccagcctagcctaatgagcgggttccaatgaagacacctggtcacagaaaagtgggttggctccagaggcataatagccaagcttcatttctgcctctatatatgtgtatgtttgccaacacacacacacacacacacacacacccctcaggaccttcagatatacctgggagaatcctgacatttttgttctcccaaatcatttcagcttcttcaggtctggctttatttagggaaaaattgtatatttcaggatggatgtatacgtttcccatccgatctaccctgtctaagaggttccccacaataggccccagaagaatttaaaattatcagggatcagaccacatggggtgagtgagtggatgggtgtgtacacctatcagataatttctcttctcttgggaagggaaagtgccaggtggctctcagagactttcttgtgtgctgtaaaaacatttgtcctgccttagtgctgtggtgtctgtcttaggaatgtactgctaagaaatcactgtggcaaatgaatggaagaagaagaggaggaggaagaggaagaggaagaggacactgttagggactctgttggaagttagtccaggctaggttggacagaactggactggaaactctccagggcccaccgctgtttatgaggagttcaggtgggcacctaccctgggagctgggtacccaggggagccctgaggaaacaggctctggactaactgctcaggttaatggaggcctcccacttggccttctcccatattgctgtagcaggaatgcttctgtgcaaatctaatagcagtgcctttgggaccctgggagtgcatcacgtctgggaaggtgacccttgttatctcagttccttttcatctttgtcctagggtttgtttgtgtatttgcctgtctaatgccctgctccattgctttggatgaaaactcgtaccttggccagctccaccactgtcaggttctccagttctgactggggttgtggtgatggcggtaggtgggaagatccaccctggctcaggagcctgacttgacactggttctttcagccctaagccagcatctgaggtgtgctgtgctcctgggatccattaatttcaccttttcggctggcttctctcatccttctgccattagccagaggggcgggttgtgaactggagccggtgactgtcctctcaccatggactgaagcacagtggtgactctaggaagctggccacctcgaagctgtacatcctctcagccttggagccgggactcgagggtcccagaactgcagctgaaccatctggaaaagctggattctctattctcctgccttatgtatgaacaccacggatccggctgccagccactcatcactgactggcaggagtggtgggacagtgaccttccaaatccttgatggaacttcaacaccgtaggcacttaaataaagatccttaaagcaaacaaaaaataaccttca

SEQ ID NO: 87 - protein, 153 aa, Mus musculus
CTMSALPPPPPPPLLLLLLALLAAPAARRAESASASQPEAEHQPPPGPGNATQLGSGMAGGGSSNSSVDAVVTRISSLLRDLPTLKATVIVACAFSALLIACLLLRVFRLGKRLKKTRKYDIITTPAERVEMAPLNEEDDEDEDSTVFDIKYR

SEQ ID NO: 88 - DNA, 58320 bp, Homo sapiens
agaattgctatccttctgcaaaggaaaactccctctcagtcttgggaaaaagactcctgtaaacgttaacaatctgtggccccatttctcatagccgtggttgaccgtagactccattatccatttgtttataatttatttttgtggagttaaaaaaagcatttgtgtacttgggatttggatttcataagtatgcttatttggcaagttatcttttagatttccctgtgcaaatgtagctgatttgggaaagccccatttcagagaaagcataacacagcccttatcacgtgtgaactgagaaagacatcggaaagccttttccaggctaaaaatagacctagaacgaggtgtattttagcttcgggactttcgcacactttctggcaaactagcactttattgtttatgtataaggggctgacgttccttttaaatgttctagcttcaggctatcttacttttgtgcaaaaaaggatgaattatttataaaaagaggcaaaaatatcacatgataacaccctcgtttctggcggggagtaaaatgagctgcagctggtgctgtgtcagctccacaggcgaggtgcagagagcaagcggaggatgggcttgatcctctgatcccttgagagggcctgatgtctgagatgcagcctgtccccctccaggatggagggagagacctttaattctcattctctctctcactcatcactcattttctctctctctctttttctgtctccctctctctggcaaacttgggaaggcaaagtatggagaccttttataagctcaagtgtgcgcagaagctggttttatggaattatttgtatacactaattctgccagcctcagtttcttcatctgtgacaggaggtgataaccgtattttctccttaggcctgatgtaaagcgcctgacgctaagtaaatgctcaataaatattagctagtattcaagcttgcctggctgctcagagacacagaggggcggggtgagcgtgtgggctgaggaaggactggagaatataaaggcaaggggctgcattacctgagggtagagaggtcagctgagctgaccggctcttcctggtttgtctgggactaacctgcttttaaaaacacagtcctgcatccttggaaatctctcagacccaggcaaaaccagagggttggccgctgtcctgagttaggttaggatgaattgtccctcgtttatttttcctcggtctcaactgaatgctgtgttactgtaccagggttccatcatgtgtgtgcacaggcagggacaagagagccacctgacacaccctgtgtcgctctgcctgactctggccaccccacctgtctgtgttgtgacacagtattgtaacaaaactgccaggcccagggttcccctgcctactctgccttccacccagtggggttgtgcggagcctcccagcaggcccaggaaaggtgggaggaaattgtgcaaagacttaagacaaacgagggaaatccaattccttttattatgtggatgataacaactgtgtgtaaaggagtctgtctgagaagtggatttgatcatgacatttactagtatttggggcctgcgttttacacgagtgcttgcggcctgcacgcaggaggtttcactggggttgcagagggttctcccactactcagctctacttttccaaacgtactctctgatattcccagcaccgtggagcgagacggggtatttctaatggagcaatgcctcactgtctttggagacaaccccagtctcgcttaggagttggaaagactgagctcggggtctgtgccctggtgctggtgtggccccagacactgtaggaccccgcaggtcttcatttccttgcatgtcaaccggggaggctatgatggggtacagagggttgctgtgaggactaatgagacacatgtgaggtgagtgtggcacacagtgggcatgcaaccaacatgagttcttgcatctgaacgtctctagcaatgattgtggaatatactcaggacggatcctctactccttctcatccttttctcttgggtctggaaattttatttactagtgattagctcaacagtcaacatgtcttgtctgcaaatcagaatggctgtgcttaaggctaaaggccacatgcaatatatttattcctttcccgaaagtgtccagcccgtaacaggggcacaaaacgtatctgttgctgtgggaagaaaccttccagatgacgagtgctggtgacgtctaggaagaaatgaaagatgggctggaacactccgtggggttgctcgctgggtttctggctgagtcgtcttggacttcccctccactcctttgctgtgggtccccctcaggtagatgtgtagtcagcagcttctccaaattggaacagaaataactctccaagggctgaaggggatttccttaccaggccagacctttcttccactgcccatgcacatgtgcctctctcaggtccctaaattgacaagcctctgtttccccctctgtaaaatagagatgctaatgcctatttcccatagggttgaaaggtatgtgtgattatgcctgcaaagctcaatgcatggtggacgttgttatctggaatttccttacccctcttcagtctacccttaaaaattattttccctacactgtgtcagcagtatggggtgcagcgggaactgagagtctgcctctcacattctccttacgcatgctccagagtttgatctctggtcatctttgtaagccctttgcctgagggtatgttaaaaacaaaggtgagtcatgtcatattcattttaggaaataaaatagttaagattaatatatgtactgcatgtaagaaaactgccaaattagtacatatttattacagagcctagagtctgttgcagtaaagtctgatgcagtaaagacaacacaaatgccccatgatcacacatctagcgataattgctattaacatgttgttatatttccggggctgggcactgtggctcatgcctgtaatcccagcactttgggaggcctaagtgggcggatcacttgagcctagaaattcaagaccagcctggccaacatggtgaaagcccgtctgtactaaaaatacaaaaaattagccaagtgtggtggtgcgtgcctgtaatctcagctacctgggaggctgaggcacgaggatggcttgaacctgggaggtggaggtagcaatgagccacgatcggccactgcactccagcctgggcgacagtgagagactccgtctcaaaccaaaccaaaccaaaccgaaccatgttggtatattttcttccaatatattttcttgtgtccttctgttttaagtcagctgctagtcacagagaatggagaatgtctgtcttccaaacagttaggttacttcactgagacctatttcctctgggctacatatgtataaaacagcaaataggtgagaggtgtccaaagggtgttcctgctctgaattccaaggtggtttaggcactattaactcagggatctggttttgctccatagctgttgtctcctggaggtgtcccagccagggcatcagaaactccctccctcagatattggtgaaccttgaaggctggaaaagtgatttatagttaaatgccatttcagtgatccttcttcattgctctgatattttattaataattaacatttgctgagcacttaaccattgtttagatattttgctaagcatgttccaagtattaacttatttggtccttgaaatactctcatgagataggttctcttattagccctattttacagatgaggaaactgaggcataaggtttaaacaagatcacacagttagtggtgtactggaattaaatgacttgtatttattgtgcatataaaaatatgtgcatacatgaatgtatgtacagtatatagaaaatatgtataaatttctctcttctacctatatgcccatctatcacctctctatcgtttatctctaacatctatctatctatctttatatctctctcatcaatatctacccaccttggctgggcatggtggctcatccctgtaatcccagcactttgggaggccaagacaggaggatcacttgagtccaggagttcaagaccagcctgggcaacacagcgagaccctgtcttgtatttatgtatttatttttaagaaactatctacttccttttttgatctaattatttctgaagaattttcctctgtgtttgaagtggccgtttactagttttggctttggctacccgcatccagatgtccttattgtggtggactcctcagtggtgtgatccttggtggaggaggacccctgctcttcccgtttggaagatgaagagggtgggatatgccctctccccttctcggacagtgccacgtgactggggtagccaatcaggtgctgcgttttaggacctttaatttcaagccagtgatgcaactcacaggaagttaaggagacactcttccagccccggcgccgtggctcacgcttgtaatcccagcactttgggaggcccaggcgggcagatcacttgaggtcacgagtttgagaccagtctggccaacatggtgaaaccctctctctaccaaaaaatacaaaaagtggtggcacgtgcctgtagtcccagctactcaggaagctgatctgaggtgggagaatcgcttgaacctgggaggcagaggttgcagtgagccgagatccgagatcatgccactgcactccagcctggacaacagagtgagtgagacgttgtctcaaaaaaataaaataaaataaataaataaataaataaataaataaaaattcactctttgagccgtggtcacagcagtggcatctactgtctggtggctttaggagtcagtggtaatggcggagcccacgagacatctgctggacagtgctgtttcctaaccagatccttcctgggtctgatttgggctttgattctacaaatccagacagactcagttccttgtttcttgcttgttggaatgggcgttgtagcctattcagtatctatgtcttccccttccttgttcctaacacaaccttttctttttctttaattttcctaggggggcgccccaaccctagttccaaggcaggtctagtccaatcagggcatgatagccccctggctgtaactcaagatggacccatcagactgagaggagggtttatgttccatagttggaaaaagtattttcctctctcacctgctatatgtgagcaagaaagcattccaccctgattgccactccagccatccttgtggatcttgtgaccaggcggccacccttctaaggttgaagtcagtgctgtggccagcagtggagagatggaaagatccaggacccttgacatcatgcacatggctgaatcaaccaatcctaaacctctcctcccaggcgcttcctttatgtgcaagaagatatttcatttttattttttatttttggtacaatgtgatttaaaaaaacattttatgtaaacaatttcaaaatattatgggtacatcatattcatgtgtatattcatggggtacatgtgatgttctcatcacatgtgtaataatcacatcagagtaattggggtgaaatgtccttttttatttaagtcagttcaagtgagttttctgtttcttatagcagaaaatatcctaattggtttgcttgtttggtttggttttgtttccctaagcctgtttctctgaagtcagcatttcttagataactttttggtctcaggaatcctttccatgctaagaaatattgaggacctcgaagagcttttgtttattttgttttatatcaataaacatattgatatttgctgcattataaattaaactgaagtctaaaatatttaaaaacaaaaataacacattaacatcaataagatattttttggctgggtgcagtggctcatgcctgtaaccccagtgctttggggggctgaggccaaaggatggcttaaggccaggaatccaagaccagcctgggcaacatagcaagaccctgtttctaccaaaaaagaatgagagatattttaatgaaaaataactaattttctaaaacaaaaatgttagagaaaagcatgcctttctttaacatttttttgcaaatctctctaatgtctggcttaatagaaaatagctggattctcacatctgcttttgcattcaatctgttgcagtttgttgttttggttgaagaacatgaagaaaatccagcctcaccttgatatttagtcagaaaagggaggaaaattttagtagccttttcaggtagttgtggagattcttctttgatactataccaaaatttgcaggttgtagtttcttaaagattatttgcaatgtggaatatgaaaccatagtaatgaatattttatattttgtttcatcagagtctattggtctgtcttatactttgagtggatcatttactcagaaatgattttgtaacactgtgcattggccatttggaaaaatttatgcagatatgtcaaattttgatatgtttcattacataatataaaaaacccatacttttaaatatcgccaccaagatcatcagaaaaattttgaagcattgggaagctgtcaagctcatagcaaaaacatcccaattgacaagttttcttaaatattccaattttcacctgaaggcttgtattttatcattggctacaatactggcagtgggtgtccttgaaatgacagcctcattttgctcatttttgagaaaatgcctgccaaagaccaagtgtaaagtttgtcagtcactctcttgattaaaaatggtcttccgtgaaaaaagtggctagttcagtttgcaactctaggaattgtaaacatgctttttcttgagtcaatcattatgcatgaatgtacagcagaagtgatttattcctatttcccattttatcatgtataatattaaaatgatcttaaggtcaagatttaataatttaatggctacctcaagggcattctaaagtgaaactgattttttttttcctatagtgtatagttgtgaagaatacaacgactatgaatattgtgtacctcgatttgtgctaaggcaccatcagttttcctcactgttgcttttgcactattagtgcaaatgtcaacatagtgaaaaagacacataacatcttattatcattattgaattagttttcactttgaagattccctgaaagggtctcagagaccccaggagtccacaaatcccactgttagaacttctgctttggcttacagtcaattctggaagcaacatgacatgcttccaataatctccccttctctgaaatcaaccagatttggttttgttgcccgtttaccatgttaaaaatgtccttgtttatggttatttgaattaaaatgtttttaaagaactctaattgagggcaatttttaagtaagcaaatgattagaaggaaagattctaaagtttcacgttatgaaaaaagtctaacatttatgctttcattcttgatgttagcattaaacaatcaagcattgtttaatgactgatgtagaccatcagtccacaaattgtggcaaaataaggaaaacagcactaatattttctctgtcctatggaagcttccagtggccttgagctgggtactatttgtccctacttcagattttttttttttttttgagacagagttttgcttttgttgcccagattggagtgcaatggcgcgatcttggctcaccgcaacctctgcctcccgggttcaagcgattctcctgcctcagcctcccgaatagctgggaatacagatatgcaccaccacacccagctaatttttatttttagtagagacggggtttcaccatggtctcgaactcctgacctcaggtgatccacttaccttggcctcccaaagtgctgggattacaggcgtagccaccacgcccagcctatttcagatattaaaaacctggtattcagtggttaaatacttggccaaggccattcagtggtcaaacctttcatcctggctaagaggctcaaagcccaggacctctttgctgtatcgtgcaggaatttctgataagtacaaaaataagaggctgtgatagctgaggtttatgccttggagaacagttctccaaaatcatggaatcagaggtgtttctttaaaaacttacttttatatattctatcatactgatatgatgatgttgactctctactaatgcaacatttttaacataccagaaggtgatatttcagagttagaagagacctaaatcatgtgatctatccatatctcttatcactggggcatatttaacatggaatgcatatttaacatgcatttcagaagtaccttctggatgatgacttctgataatctgattgttgtccatccccccagatcaaaatgaattacactgtaggtggcaggcagcttctaggatggccccaatgatccctgcttcctgatattcataccgttgtgtaattccttctccttgagtgtggataaaacctgtgacttgcttctaaccgatagaatatgacaaaggtgtgagaatgtcacttctgtgatgaggtttcataagacagtgacttctgtcttggtaggtgactctttctattgctatcttgacttgcatactttgatgaagcaagttgctatgttggaagggccccatgccaaggaactgagggcaacctctggccaactgccccaaggaaactgaggctccagtccaacagccagtgcagggctgaatctggccaaaaaatgctgattgagcttggaagcagatccttccccagttgagccttcagaggagaccccagccccagctgacaccttgattgcacctttgggagaggctctgaagcagagaacccaggtaacctatggtcagtttcctgacccacagactgtgagatactaaatgcatgttgttttaagctgctaggttttagggcaatttgttatgctgcagtagacaactaatacactgtactatatttgtctctttttccagcaggaccagaaatgggctgtttaaggtccctgggaccttgtcatgtgtatttaactgtttacccaccaccgaaaagcttcctgccaggacccatctgcagtgtaaaaggggaaccctgaagccctgggaatggctcctagtacttcaggtaggggctctgtgtccccatcagtttccacctttgggcctcccactagaacttccttaattgtctttctccacctaagcatcatttagcttacaaaccagaggcagcaagccaattattccccggagaaacttcagccaggcaggggggcattaaccacaccaactggtgttccacaacaaaggtatgagaggcagagattcacatcccagtccggttcgtaagcagaggcgcatgaaataagaaaccccttttgagaaagagggaaattaggggagatactgaaattatgcgttgcataggacatcaggcaaccacttcactgtcggcttcagtttttgatctgcaagatgggagtctacttctaggtcccatagtttttgattcttagtctgacacaatatgggttgctgtgagctggctctttgggtgccaagtcagctatcaaatgtgggtaacagaatacctgtcttcaaagggggttgtagaattaaatgaaataaataaaacacgtgaaacgtgtaacacagggccagcccaagtgtcatcgtggcagttgctgcttcaccacggggtctcaagtcccgaggaattggggtcgcgggcgagcggagcgcagccgggacccaggccgggtggcctgccccgcccacgtggggccgcggcccgtcgaatgactccttgcaacgtgttggtggtggcggcggcggtggcgcgggctcttccgggcgccgcagcttcctgccaagcaccgcgcagccgcctccgccgcaggatcccccggtgcaggcctccgtgctggtgcggatcctggagctcagccgcgcgcgccctgcccgatcctgtgccgacccaccgcactatgcgcgccgtgccgctgcccgccccgctcctgccgctgctgctgctcgcgctcctggccgctcccgccgcccgcgccagcagagccgagtccgtctccgcgccgcggcccgaacccgagcgcgagtcgcggccaccgcccggcccggggcccgggaacaccacccggtttgggtctggggcggcgggcggcagcggcagctccaacagcagcggcgacgccttggtgacccgcatttccatcctcctccgcgacctacccaccctcaaggcagccgtgatcgtggcgttcgcctttaccaccctcctcatcgcctgcctgctgctgcgcgtcttcaggtgggccctcccgccctcttccttcccccgcctgccgacagggcggcatcgccaacctgctgtcgccgcgcgcccgccccacctgcacgcacaggtgccctggtgcgccccagccagccgtgtgcctcctgccctgcccgggagagtgggtggggggccggggtgtgctcgtctggattttcctggtacatgttttaggaattttctttcctctctttaactatatatataaaataaatatgtggttcccatttgttggctttctgctaatgctgaacactaacaatagcgctctgaattctgacagcgtttcccataatttatttttataatcatttcacagatgaggaaaacattttcagagaggcaaaatggctcatctaaggtaaactcagtggtggaggtaggacttgaacccaggcctgtctaactttaatctcgctactccctctcccttctaccatctgcagctccctcacgccccgcctactttttcttcttcttcttcttcttcttttttttttttttgctactgaaagaagcagtttctagtgtggggggtagtagaattgcctccagaattacgctggaggggtgctttgcaccaggggttggagctgagcttcaggattctaggcgacccttggtggcctcccttattttctgttggtgggggacacagacggctttcctaggctcctgcctaagttgcgctagatgaacattcacaggggcatgagggatcttggagagccttttgtaggttgctcacgttcagggataaagtgtctggtaaattaggaaggatgtcccaggtccttgatccctgtccatcctggtggacagggctaagaggaatgcaaggacatttcctttaatgcctgggaaatcctgtttttgcaggaaatgaaccaaacctgtcctgttactgaggcccgcctggaagtctgggtgtgtgtgtcagctgttcactgctgcctccctctgcttccaagcgtacacacagtgctttggtgtttgatcagctgtggcaggttgggcttcagggcttgctctcctggtagcattttcagtgcaacagcagaaaccagaccaggaaaaggcagagttaggagccatctatgtattgagctttgctgtcagttgtgtgtgactttgagtccaggtgttttcttctgtgtctgtaggattagatgccagtggtctgagaaaatggagaaaggggaagtatggtcccacgctcacctcaccattccctgccttgtctcaggccacatcgttcctcactctgctggtctccttgatgttctctgggttgaaatgctcctgtcttcttcccactctacccactggcctcaatcctctgtttacaaactctagcagctctctgtggccactacctaggcatggcaatacctgggtgtggcatttggggcccttgcaagctggcccccgtctgcaacgcagacatcaaccagcgcttctgagcctagtaccttgtcacttgctccttatgctctgtggtttcccgcttctagcctaattcttgcctctatattctacaagtgcgtgcagccaccaaggcccagctcccatcctccttcctctgtatagttttcctggacatttgaatgaggctgtcactattttctgacctcctcatccctaatctgtgcatccttcagtccaaccatgccatgctggcttctgcactcagcagagggcccttgaggttgggaagtccagttcatcttcgtgtctccatgcccgatgcgggcctgccattcagcagaggtgccattgtcatctacggacttcctgattgttcagttggagtgaaggttaatgcctagagcagctctgagtctggaggtttgaaacatttagctcaaaataggccctggagtccacaaggctgtgtattttttttagaaggtatttgaacaattttgctagtctgctgtttattactcaggagtaggggagaaaagaaggcagcatgcacccagatgtgaggggtgcgagactcatgttggagtgggtaagccagcactctagcctggaagagatgggtctttagtagcttgggtgtggagtgttgaaagaagtttacgacttcataggagaagctggttatggacatgatctgcgtctcttcccaggaaggcaatcttgttagggtgagttttcaggtggacagctgccaccccagattctgatctagagaggactttgtaatattttacagcttgcaagggccctgatggtgcacagtccccatgtgtttctttgcagttgagaaagttgcatcccaggaagtggaataagtcattgctagattctagaacactctgcaagtctgtgtagccaaggcagggccagcacctcatctgtgctattcggtctgtactgtggcctttcccctgtcccacgctcccctgtaaccttggttagtcagctcaccaaatgcctgctctgctggctgggggccctccttcctttctccctctgcaactccttagcctgcgggcaccgagtcctggaaattccaccacctgagtctccaagagactgtctcacctctgcccacaccaccttccccggtgaagcttcgccacctgccgccgtttctaccttgtcgctcctgaattgcaataatatctgttaagctggggttcgtgcctccaaccttgtccctctccagtctgtcttccctcaactgcaggaatgcctgtctcatccttcttctacccctccctgccaattctccctgcatacagactccttgatgtgtgggcaaggctgactcttcagatcagggtgctgcctccctcctgagcccccatctcggctctgctcagtgcgcctcctgctttgctggacttcctggggttctctggaggcactgcgtggcctgagcatcttgtcccactctacccctctgcctggagtcccctctgtcactaagactgcgtggtcagttcggtgctgtttgacctcgttgctgttgcctcctctgagaagcctctgcagctagggcccctctgtgcttccaaagcacactcgatttttgaattccctcttcagagtcaagtgccaccgaacttcttctgagcaggactaggcattaatcttctgtgtttccctaatacctagtgtggttccaggcacaagctggcatttaataaagatatttttagcaaaagaatgttgagctctcaaggattttacattgctgatgtctctcaaaatgtgctagactagctgcatgactgatgctggatacctgcgaggtaggaatttgtacaatgtagataaaggagagtgtagtaagtatgattgcgtataaaatggcagtcctagcctatttctctgttttctctgaaggagtcaccttaccagacaacagaaaaaaattggatccaaggaaattagaagcaaagaatgtgtcttttaatgaaaaagatgtatacttttaatcaagtgattccattcttaaagtatgtacattttccactgcactatatattctttgcttctaatgtgaatgattagaagagaaagccaagatgcaagtgcaatgatattcagagaagctctgtttgatagtgaaaaggtttaaataatccaagtgtccaacaactgggcattggttaagcaaatcatggcaatctttatggcagaatactgtgcagctgttcaaaatgatgacattgagataatacttgctatatatttttgagtctgaaacaggtcacaaagtgacatgtatagtattagctcatttaaataaattataaacatgtatatacgaatgtgcagataaatctgtgtgtctgtgcatgtgggtgattatcgtatttttttattattcacgatatgtttctgcatagtttgaattcttttacaatccagaagcatgtagttatgatgtgtgtatgttgagtatccctgtgtgtatactcagctcctggccgcattcttggatgtgtctttctgaggaccagtatgagagcatctggggtgtacacctgggagtggggcttctggatcctagggggtgctcattcttgatttccttgagcaggcaccagtgtaggtttccatctgcagagcctgagggttctcagattctcacatcatatccaacacttagtattatcttactttctaatgctttccaatctgatgggtataatttggtattcattgctttattttgtatttcttcattttctaccatagttgagcctctgtctcttccaaatgttctccttaatcaatctgatttccccatctgtagaatcacgtccacctttttaaatgtatttcatcattaaggcaaaccatttttagacaggagacaaaaatcggaaggagggaaagctggctggagaccgagggccctttgttgggtaccttcacatgtgtgagagtggtcctacaggtacctggtgtggtgaaccccctgggtctgctacttggcaggtttatgggagctgaaagggaatcagcaaagaggctgtctctaggaagtagaaagctgtgattgctcctaattttttggtattgggaaacaactggtgatgttgcatggattcaggataatacacataagccaaggactgctggtatcagtaccttttgccccctacattcactcagaacactttattgtctgagttctggaaggaatctgactttacgctctggtgtctcatgagcagagcgggggcaagtcaggaaaaccctgccacctcgaaaccacaacgttcctttcatcctggggatcctttcccagtcttggagagtctccgaactccacggtgcaggctccagttctctagatgtctgttggctgcatgcccagccacttcttacttcaaaatctctgtaaaatcctcttatctgaaaggaggcttctttttggtgcttcccgagggatcgggaggttgaattctaagcggtctgacattgcccagctgtcagtgggaaaggtgcacactgctatgccctgaagacattggaaccacagatgctttgttaattttactaagccaggtctttgaaaaggaacgagaactttcctacttatcttgtatttcctaaattctctattgtgtgtgtatttacatttgttataagaaaagttatttaaaagaaaatataaaagcttaatacttttagcatttagggaaagttaccatttaaaaatttttttgtcattgcttattatttcatggtatatcaatattattttagtaaattggagttttgggtggagccatggttagaaggtccagccccattttgatttgagagaggttgtgggacttgttagcatcagtcggtcgtttctcattgcttccccaaggctttgaattgaaggaaaaaactatagaagtgacaaatgttcatcttctttcatgtttgatattatatgccacagtgaagaagtgttaagcaaatcggatacagccaaaatccagattctttaaaaaagagagtagagagcaagccgaaggattttgcctcctggtgttatttggtcatatctggagacattttggattgtcaggatggggagccccaaatgtcaagggtgccagagttgagagatgccgagaatctcggcttcaaggcctgctggttgtctgatatgggcagtttattgaacctttctgggcaccatttctcatcattaattagagtacatgcttccaagggctattgcaggtttagaatgagattgtgtcaactaagtctctggctcccctttaagcagtcaagtgtcctattatattgaaaaatacgattctgaaaacagatgtaatttacacccaaccttttggtcttgcttctgtccataaatgaggatgcagccatatggccacaattatcaggcaggtgcatctgtttctgaggctctttgaaatgaaattgctgactctttagcccaagtgagcctccttgactactcaattccctgatgaaggaggcgcctcatgactgcccccattaacaggactgtgaagacctggcacctgacgtggattccttctatcaaattggaaagggaagaaaatccctctttaatttaagcctgagcctcctgacttatatggcattacccatagactttcatgcccatgtaggctttgtgtatgggtgtctttgcaaatgcaggttcttcttgagacaccaggcaaatctagggtaagcagtggggactaagggaactccaatgtcagtatctgtagagcatcctgtagggcgagtgtcaagagagggaaacactcctggatttaagcaaagaagccttcatggattgtgttagtactttagttttatgactgaggttttgggtctaaccatttgcaaagggaaatcctgggaccatgaatttaggatcatgttattattgtttcacttaaaaaataaactatacttaatctaagggcaatctgccaggaatctagatttgctatttattttcctgagggtgcagggaggaggaaaccctttctcacgggcaggtgtggcacagaggagggaccatggcaaagtgcttgggcagggctcttgtaggcctggcagagcccttctagacccctccctctcaggtaggcgtttctttgcattcagagctccttccgcctacctccctacactcattgtacagatgagaaaactgaggcccagagtggggaggcttggttaaggtcactgagtgagtttgtaggaaaaataggacttaaacctaggggcttggatgctcagcttggccctttttggacctccaagatgtggtgggctgagtttggccctgtccagcgaggtctccccaacactgaacccagcacctaggagcaaacacggctgagtaaacagtgttcttcccagggtgtttaattagcacccactgtgaacatagaggtgccatggaacacatcagaggtcaaggaccatccagctcaatctaaggcataggataatgccctttgttgacaaaaaccccaaactctacaaatatttaaagaggtttattgtgagccaatatgagtgaccatattgacctggggaacaatatcaagaggtcctgagaacgtgggcccgaggtggtcaggtttcagcctggttttatacattttagggagatagaagttacaggcaaagacatgaatcaatatatggatggtttactttggttcagcccagaaaggcagggcttcttgaagtggggcttatagaccataggcagattcaaagaggttttgattggcagttgcttgaaagagttaagctttgtctgaagacttgaagtcaatagaaaggaatgcttgagttaagataaggggggttgtggagaccaaggttcttgttatgtagatgaagcctccaggtagcaggcttcagagagaatagatggtaaatgcctcttttcagatcttaaaaggtgccagacttttagttaatctctcctagatccaccaaaggcctagctgcattaatgaagattctctatagatgcaaaaattttcccacaaaagatggctttgcagggccatttcaaaccatgtcacagacatttttgggtaaaatttcatttccttcagggcctgctatctgtcatgtgatgctacacagaatcaggttggaatttggtatcttattgccacaaagagccttgttttgccagtcttatgatctctatttcattattaatgctggtcatttgtgcctaaactccaaaagggaggggtataatgtggcgtgtctgacctcctttcttgtctaggcctggaatttagtttttcaggtttctctggggtcctcttggccaggtctcttcaactggctggggggcttagaattttatttttggcttatggcttgaatgattctacttggcagataaggagccgtccaatcccacaggggagccatgtattaaaagcaatgctaggtaaactgagaaaggatgggtcagggaccagaatggtctgggaaggcatggtggaggaggaggacgattaggacttggcaggatgggaggaagaagaggttcttccaggaccagatgggtgaagcaagctttgctgagggtagggtttgtgaaatcacttggaaattgtgatgttgatgacaataatagcaactagtatttattaagcccttactgtgtaacggactctgtgataagcattttatatgttttcctcactcctatgagtggtgcactgtcagtcctgtcgacaaaaagagtcaagctctgtaaaatatttaaagagatttattctgagccaaatatgagtggccactggcccatgactcagccctcaggagatcctgagaacatgtgcccaaggtggttggggtacagcttagttttatacatattagggagacatgagatatcaaatacatgtaagatgtacattggtttggtccagaaaggcaggataagtggaaggggggataacttccaggccataggtagattcacagattttctgattggcagttggttgaaagagttaagttattgtctaaaacttagaaatgtctgggttaagataagtgggtgtggagaccaaggttttattatgcaggcgaagcctccaggtggcaggctttggagagaatagattgtaaatgtttcttgtcagacttagagggtctatcaataaatccaaaagggaggagggtagaatcaggtatgtccaaccccccacccttcccatcatggcctgaattagtttttcgggttagctttggcactgctgagattccaaattgctgtcaatagccttgctgagaggaggggttcattcagatggttggggggcttagaatttcaattttggtttatcatccccatttcacagatgagaaaaccaaggctcagttgttgaagtgtcttgctcaaggatgagcagctggggaaggggaggagtccgcctcacccttcccattgcagctggattttggaagccaattccagctggaggactaggaggatttgtagtgggtgagaggagcaaatggaggattttaatacaagagtgaagtaatcacagggcttctctagaaatgttggtccagatcaggttgtaccaaggatttaccaagaatgcatgaatagtgacgtggctggtgtggggggtgcaggatgtctggggagacccgtggaaggtgctggaaggaccacttgggaggactggaggcctgaatggatgaagaggagaaagaggaaagtgtcaggctgtcctgaagggcatagagaaggggggcattgtgaagggggtgaccaggcagggaaagggataggtttggtgaggaagaagaggactcacaggtgaaacttgctcatgaaaactccagccatgcagctgggccttggggctgggtggaggggcattgggagcatctgcctagaaggagtgggtggtgaggactgacattcccaccctcccctacctgggtggcagggataagtggtactgaaagggccccttatgacatgtgccccaaagcactgtgacctcagagtttccaggtggtggtcaggtcccctgggtccaccaagggcccctctgggtcatcttgccgctgtccttgaccccatggggctgcccctaggggctaccttctctgctttaaacctcacttcccttccctggccccttatataaaaacaaagcagaaccaaccctttgcaaacacacccgagagctggaggaacaggtcttggggcatttgctgttgccggatttactgtgtgctgcttttgtcttggaagagtaagcattggatttatccctcagggactgagagagggaaagagaaacaggatggggagcagatggaggctaaacactttagtgtaatgaagaaaaacctgaagacttgtcattgagctcttcagggttgtctggcccatgctggatgatcctctatgaagcgtaagcccccaggggcacggtctgtgctgtgtgctgcatgcccatcctggggtcaaccaacagtgctaacacttggttaaccccaatgggatggtgcccaggaggtagaggaagcagctagattatataaataatggtcagtactccttagtcatggttgaactgttggtgaacagagataaggaaggatttagtggaacgtgcatatcattacatctctctgggctcatgattttgagctgagttactaaatatcactcatgcttggcacgtaggacctaatgaaccatggtcagagaaccaagtcagagatggtaaactgatggcctggggctgaaaaatgtggcccacagacatttgttttgttttttgatctgcacagtgttttaaaaactaagatagttgagaacacttaaaagttaggagcctttatataaaaatctagatttcctccttcttttgacaggtggggatacatggaagtgcaagacctctgttccggggcagccgggcaggagcttggtggctgccactccacctaggctgggcagggtgccgctatttgtgcctttttgacttgaagacagagtattgtccaccacttgtcactgttgtttgttcccttgtttaggtctcagcagtcctgctgctctggtttcttttgtctacaaggccttggggcatttgagttattgacctggtatgttgagccatggtgcttgactggtgactgggtgctgggtgctggaactgaggggctgcagcgtggtggggagggggtgccctaggacaggggtgaggcgagggtgcatccagggtctccccagcctctgtgttggggagggttctgccggagctggatggtgttggagcttggctgctggagatctggaggctcttgctgcactagaggaaaatgcttttgcctcatgtgacttatttgtctgaagtggcccatctgcagtggagtaagatgagatttctatcacaccggtgtttgcctctcagtggcttgtcgaaaatgctctaggtggaaggtgtcgggtggagctcagagggctgtgcccagggcagaaagggaggtaggctggttattgggaatgtgtcttggtggcaggccatggtggtgagaccctggctagcctgttgattgtccaggggcctccaacacctgcttccttacagggtggggcagaggctagggctgaagagtgggttctgagtcatgttcttcatttcttcaagtgtagctggttttctgggggaagctctgttacttcttatgtcctgaggaggaggtgcagcgtagagctcagagggtaaaagcgaaacaggtctgtgtcctcagagcattggagggaccgcttggctcagggtcgcctgctagtcctcctgtctacactggcggcacctgtgtgcttcagtcttcctctcccatgatccattttcattttcttgattactttttccaaatgtcagagttcacgtgtgctgttcattgacaagtaatatggttttggcagaacgctggtccttgggctacagaactactttagtgggcttaaaaatggaaacagcccactatttccatttcctccaggtggaggaaaggtttgagtcactgagtttgggttctgaagtcaccaggatagccgggcaaagccacatggagtcagccatgggtgggccctgggagaagggtctcctgccagaggggcagcctgacacagacttactccatttcaaaatttattttaatgatttacattgaattgtatttatatacttggttttaaattaggtcatatgttcacatggttcaaaattcacaaagaacaaaagagcatatagcaaaaagtattcttaccttttagccacacagttttcttcactttgtgttgtcaatttcttgtcaaatctttccagggagattttataaatatagaagcaagtgagtgtaatatatacatgcatacacacacacacacacacacacacacacacacacacacacacacattccttccctatttcttataatgactttggtgagatataacttatatactatattcactcatttaaagtgtccaacccagccaggcatggtggctcatgcctgtaatcctagcactttgggggccaagatgggaggattgcttgatgccaggagtttggaccagcctggtcaacatagccagaccccacctctcttaaaaaaaaaaacaaataaagtgtccaactcaatggtttttagtatatttacagagttgtgcatctatcactgaaatcaattttagaatacattcatcactccagactgaaaccatgaatccatagtagttaatctctatgtgtctccgaattttctttctgtgtatagatttcccttttctggtctttcatatacatgggaccatacaatgtgtggtcttttgtgaatagcttattttatttagtacagtgttttcagggttcatctatgtgtggcatgtatcatttctttttattgccgttatgttccatcgaatgggtataccatcttttatttacccattcatcaatagatagatattgtagtagcctgttctcaggggctgctataaggaactgcctgagactgggaaatttatgaaggaaagaggtttaattgcctcacagttaaacctgcatggcaggagaggcctcagggaacttataatcatggcggaagaggaagcaaacatgtcctcatggtggcaggagagagaagtgcaaagtggattggggaaaatccccttataaaaccatcaaatcttgtgagaactcactatcatgagaacagcatgggggaaccacccccataatctaatcacctcccacaaggtccctctcacaacacatggggattatgggaactacaattcaagatgagctttgggtggggacacagccaaaccatatcaggtatttaagttgtttcctttttggggctattatgaataatgctgctctgaacaagtatatgagtttttgtgtggacatgtattttgatggctcttgggaatatacacctaggagtggaattgctgggtcatatgataactccatgtttaaccttttgacaaactgccaaatggttttccaaattgctgtactagtttacatctcactagaagtgtatgagggttatgatttcttatatcctcaccaacatttgttattgtctgtctttttgcttatagccatcctaaggtataaagtggtatctcgttgtgtgtttaatttgcaatgcattgatggctagtcatgttgaccttgtttgccttcgtgtattgtgcatttgtaaatcttcttttgagaactgtctattcaggtcttttgcccattttacattgggttatttgtctttttattattgatgggtaagagttcttcatatattctacataaaaatactttgatcagatgtatagtttgcaagtgattcctcccattctatgggggtgtcttttcactttcttgattatattctttgaagcacaaaagttttaaattttgatgagtccaatttatctagttttttcttttgttgcttttgcttctggtgtcatatttaataagccattgtctaatctagtgtcgcaaagatttatgctatttttttctaaaaatttagctcttacatataagtcttacatacttatatgtaagttccattttgaggtaatttttgtatattgtgtgagttaatttttttagatgatttataggagtccaactttattcttttgcatgtggatatcttttctatctcttacacatacactatgcttgttaccttgctttataaaaatatcttgtgcgtccgagtggttattcctaaaaagctcttcattcatttatataggtgcttagtgttcattatatggatgtaacataatttatttaatcagtcttctgttaatgggcatgtaggtgtcatttcacacatgtggaaacatacctgtaggacaaattcctagaaatggaattgccgactaagggctataccttttgtaactgatggatattgtcacactgctctctgtatatgttgtaacaatttacatgtccacaaacaagtaatgagagagtgtttctgtacatccttgccaacagtgtgttttcagacatttctatttttgctaaattaataggtgaaaaattgaatctctgtgaagatcaaaattacatttatcttattgaaagtgagattggacattttttcatagttaagaatgcggagccatttaggtttgtgtgtgtgtgtgtgtgtgtgaactgcctgtgttatgttctttaccagtttttcaattagattattgatcttttttattggtttttagggactatatatatattaaggagattaaattttaaaacatttataatatgttagccaggcgcggtggctcatgcctgtaatcccagcactttgggaggctgaggcgggtggatcacttgaggtcaggagttcaaaaccagcctagccaacatggtgaaaccccatctctactaaaaatacaaaaattggctgagtgtggtggtgtgtgcctgtaatcccagctacttgggaggctgaggcaggataaacactttaacctgggaggcagaggttgcagtgagccaaaatcatgccactgcactcctgggtgacagagtgagactgtgtcttaaaaaaaaacaaaaaccaaaaaacaaaaaccaaaatttatgatgagttggaaatagttctcccagtatatcatttcctttggcctttttttttttttttttttttttttttttttgagatggagtctcactttgtcatccaggctgtagtgcagtggcacgatctccactcactgcaacctatgtctcatgggctcaagcaattctcttgcctcagcctcccgaatagctgggatgacaggtgcccaccaccatgcccggctaatttttgtatttttggtagagatggggtttcaccatgttagctaggctggtctcgaactcctgacctcaggtgatctgcccacctcagcctcccaaagtgctgggattacaagtgtgagccactgctccccgcctgtttaccttgactttaagacatttttatgtgtttacatttatcatccttttttaaaaaaatggattttggatttctcccatgttttcttctagtacttctatggttttattttctacatttaagtctgatccgtctaatttatgctgatacaaagtgtgagatatgggtggttatcaacaaaatatttaatgagttacctttttctcactcatttgaaatgccatctttatcctatactagattccagtgtgtatttgggtgtatttctggactttctattctgctatagcatctgattgttagtgtgggatgccactgtgtattagtctgttcttgcactgctataaagaaatacctgagactgggtattggctaatggttcagcatgctgtacaggaagcatagcagcttctgcttctggggaggcctcaggaagcttccaatcatggtggaaggcaaaggggagcaggcactcacatggtgggagcaggagcaagagaaagagcaaggcgggaggtatcacccacttttaaaccaccagatctctcaggcactcacccactcactatcataagaacagcgcgaagaggatggtgccaaaccgttcatgaaggcccacccccatgatccagtcaccttccaccaggccccacctccagcactggggattacagttcaacatgagatttggttggggacacagttccaaaccttatcacactgtgttcagttattgtagttttacagcatgttttactaatctaactcctttatagaattttcatggctattccattcttgctgcttctcccatcctcatgaattttggaatcagctcatttagatccccagcagaaattggtcggtatcttactgcatttcactgagcttgcagattaatttagatggcttgaaatctttatgagattgaaacttcctagtcagaggcgcagcgtgccctccttctgttgacacaagcttgttttggttgcttttggttatcgcgggagctggctggcaaccaaaagaacttgcaggggcacctctgggtcctgagaagtgtctgttgaatgccgagtcgtagggttggggcacatccagaggtccgaggtgagttcctaccctcttgttggagtgtgaagggctcatgttgtggagtgtgatgcatctggattcgagctctgcttgcttcctgggacaggtcactcagtgccttctggccttggtttccttgccttgataatgggagccctccttgcctcactggcgggaggctgtgatgagatcacatgtgcattagctggcactcagggttgtcgcctcacagtgcctgctggtaccgtcaccccagtgctgtggatgacgcaggaggggcctgtgtgcctggaggtcatgtgtagacagtgccccgtggcagggatgtgcctatgaagaggggctgcaggattcggaagaaggagaaaacccagcctggttgcgatgtcctgcaatggcctcaggagaagtgagaaagcctgtggccccctggagtaagtagagtgagaagtgttagaggctgtgtcatcagaacccggaccacacctggcaggaagtagaaatggatgaagaaattcgggttcatgacgagaggcttgctcagaagcacaccaacaggggaattgcagggctgacccctgaacctcagtcgctgcactttgagttggtggctctgactgtcacactcaaaactgaactgagtctaaagggtttagtcctgttttattctcttcgtgggtgagggcgaggaaggaaggcctccccctctgtaggctgccagggcctggtgtcctccctcggcctccttgtttgtataagtgggacgtatgagcactcacacgaaacctgtttctgagcagctggtgaacagtccattgagtaaacaaaccctctggcttcaggattatatttcagactaaaagaattttgaacctctcctctctcttgttagaaatgagttttggtttggatggaagggtgctttatctcttctagaaattatctggccttgcctattcctgtgaagacaatatggacatttatttattaataaaaggaccactttacatctcaaccaggttgaggcctcctggttaacagtagcctatctcagaaaagaaagattcctgctgtggaagatgggccagcagtcttttcacttctttatttcccaaagttcgttctttgatggggagtgctagctggtctgtccttgtaggctgccgtcccactggcccccagcaccacccagtacacagctgaggggacaggctctggacgtgggggcactgggctgcgaacccaagtctgattgcaaacctgggctctttctagaaccaggcgctttgtccttgagctgcgtgtgtctttgagtaaaatgagggccctgtccccaaggctggcccactgcccacgaatggacccaggggatttcagcttcatcacagccgtgtagtctctgcctttgcctcaggctcatggcagttctgggaggtgcagttgccggttgtttgtcctcattgaaagcctgcttacaggtagccctaagcaaaaaatgtcaactctgcttctgtgtgtgtggttcattgtttctataaggggcagagtcctggggtttaaacaggcttgaggatataggaaaattatacttacatatggaaggctaactattaaaatgtggaaaaagccccaggaaggtgttgtgattacagtggtggtttcccttcgtgcagtgccttccctgagacctcgaggcagttaaggtttgctaggttgtgtgtgtgacagaaaacctggccccggctggctttggtgaaagagagagtagccttgtagtttttaaggagagctggcttggtagtcgatttaggacttggtctctctctttccaatctgccctctaccatattgcctttactttctgtttctagatggtggcatgatggcttatgtcatctgggcctcaaggccagtgggagggacacccacctgccctgttccagccttcacagcagagagtcattggctcgggttggtcgtgccttcccctgcccactgccctgctcctctgccattgccatggcctggggggtagcaatgcctggattggctcaggctccaggctcacgtccactcctggaactgggggtgtggccaggcccatgtgggaggggcttcacccagggcacagaggatacagatgccaaaaggagggaggaagtgggcgtgggctggctgcaaaccagcacacctgagggagtcacagtttaggaagggtttgttagaagtgtgtccagattagtgtggaatatgaaaatgtgagctgtgcaaagtgacacattccagagtgtgatgagggagggcaaagagttttttggcgctaaagtcaagtggctgcgaactccggtgaggcgtggagtggggctcttggatgggagtgagtgggggtgacagagcagggcataccagggatgactcaaggcgacctgttggggaggtctcagctggagcaccccctggccctctcaggggtcatatgtgctcactatgccctgtgattttcccgagttgcttccagtctatactctcaagccccatgcagcctatctccgcggcacatttcagaccatgggtagttgtgcggcactttcactcacccacgtgggaaggaggccccactgaaagtctcctggtcactggactgcctgcttcaaaccctagctctgccactgattagctacatggctgtgggcaagtcggcttccctgagcctcagtctcctcagttgttagacagggataccagcagcacatgccttgaagcgtgctttagatgttttacatttgatcacaaatttaaatcgcttagctggcacccaggaaaagttaaacttttagggactattattattattattttgagtcagggtctcactctgtcacccaggctggagtgtggtggcgagatctcggcttgttgcaacctccgtctcctgggttcaagtgattctcctgcctcagcctcccaagtagctgggactacaggcgtgagccactgtgcccagccttatggactattattttaaaagacacgttaaagaatctacacttagagaagagagagccagacttggttagggtttttaggcttcgaatgcactctattttcccattttctcacgttttctctctctctgaggcagaactgcactgttctctgagcccactgttcagacaggcttgcggatctgaaggtatgtggaaaatgctgattggctctgttcctaaatttcccggcttctgactggtgcatagttagtaaaggaagaattctccttttaatttgagaaatgtgctgggtgcggtggctcatgcctgtaatcccagcactttgggaggctgaggcaggcagatcacctgaggtcaggagttcaagactagtttggcctacatagcgaaaacccatctctactaaaaatccaaaaattagctgggcatggtggcaggcgcctgtaatcccagctgctctggaggctgagcagggagaattgcttgaacctgggaggtggaggttgcagttagccaagattgtgccactgcactccagcctgggctacagagcgagactctgtctcaaaaaaaaaaaaaaaaaaagaaagaaatatgtgaagatttcctgcaccctcaatcccacttccctgtccctgcaccctcaactccatttatacgctatgaggtttcctgctaccatccgcgaagacccttgtcaacacagccggtgcaccacagctgggaacgtgtctcgatgtctttaaacttctcagcagtctcagttttatccctattaacacacccagcagtggaaacagcagaaattgctcttcttttgtaaagagagttgtgtttcagagagttgattgtttgaaatgtaatttctccagctcattatgtcaaaactggcatttgaagcatacatgaggactcttgctaatagccttttgtatttggattcttcagggaaacagaatcaatagggtgtgtgtgtgtgtgtgtgtgtgtgtgtgtggagagatagtgagcgaaagagaggagagagagagagagacagagaaagagagagagagagaggcttatcgtaaggaatcagctgatgtgattatggaggctgacaggtcccaggatctgccatctgtaagctggagacccaggagggctgatggtataaggtccagcctaaatgcggacaagctgcagactcacaaagagccgatgtgttagtttgagtcccaaggcaggaaaaaaactgatgtcccagttggaaggcagttagacaggaggagttctcccactccttgagggaaagctgtgtttttttgttctattcaagccttcaactgcatggatggggcccacccacattagggagggccatctgctgtactcagagcccgttgattccactgttaatctcatccagggccatcctcgcagacagtgtgaccaaacgtctgggcaccctgtggcccactcaagttgtcacagagcattagccatcacacctttggtatataatcttgggattttttatttcctggggttgcttggctgcagaggctggcattaaagcatcatgggccacagtgttctggatgctagcgtagttttcctccttctcctatgggttggggttcaagggccttattttagctcagcaggctcattttcttattgtaagactctatatacgtgaatgataagattatagagaaggaaagtgattttataggtgtcagggattcactcccatgaggcagggctagggctgaagacagagcctccggagctttctcccagggtcagccatcagtcctgccccagggccaatgactacacgaggcatcaagttccaagtatgcaatgaggtttgctaatccaattttgcattttctgggctttgtggtgcctgaaaaagagtcacaaacatgactatgactcctcagcctgaagccgtctgggtgtgtccttttgagggtccacaggggactttctcatgtccttgggtttgaaggacatttcttttctcccgttccagatgcttgtttagctgtgtgtcagaaatggacagcccagccttgtccctttgcagaagccaagctctcctcccagacagccgcaacttgtccggagagagatttagggctgtctttctgagaaaggcgtgtagatcgggagtttgaccctagtctcaaaggcttgaggatgggtggtttttcatgtggttttgtcttggattgcttgtggcatttggatccacttctgggcttaaatttccccctgccagtgttgagatggaattggtctggggttataagtcatctagggcagaatgcagagatttattttactcctttggagggaggtggagagaagtatctcttgggggagagaatgtggatccaactgtttataaaggtagcatttaagtcccacacaaagcttgatttctaaatactgttgtcccagggctactggcaaggtgactggcagtgtgcccctttggtttatcctcttatcaccaggcttggcatttgcaccatgctttatcctgtgttcagaatccgggtagattcacacccatgcctgtgtgtccgtgtgtgtgcgtgtgtgtgtataccggtgatgaaagcagagacgaaaaatgctttgtgataaggcttgggtatcatcagactttacagctgattgttccccctcttccaaaatcttactccttttccgtacccaaggaaccatgagaagtgggtgctgtgggttgtataggttgctttatgccaaagacatgacgtgacactttggtaaacaatgtttttggtaaatcatatcagttaagagaagaccaagttgctgttgctaagaaatttttagaaaatctgaaagtgaagttttgttttcattcattttgccaacttactggagagtttctccgtgctgaagacaaagagatctcgcgtgtgtctttgatgtggtctccactcgggaatagcgtatggtcagcaagaagaatgtgtagggaacctgattcttcagtgccccgtttatgactttctgggttggctggtttctcatagacagtattaaatattctgaaaaaggagggacatcagtgaatataaagcagttaggaaaaagttcaagagagtggaggaacaaacacaaagaacgtcagtcatcacactaatagtgttattcccagtggcgtcctagaccttccagccatgttctgatacatatcgcagccttcgtgcagagagtcttaggctagaggctgaagtggcttctgtcagtgctttccctgcagcccacagtgaccctctaccatcctaaaggtaaaaacatagtgttaggtctggcacggtgtcccacgcctgtcatccccagtattctgagaggctgaggcgggaggatcgcttgagttcaggagttcgagaccagcctgggcaacataacaagacctcgtctctactacagatagaaaaaaaaaaaacaacccagccaggttgtggtggtgtgcacctgtagtcccagcttctcaggaggctgaggcgaaaggattgcttaagcccaggaggttgaggctgcagcgagctatgattgcaccactgcactccagcctaggtgatagaatgcgaccctgtctttattttattttgagatggagtctcactctgtcacccaggctggagggcagtggcgcaatctcagctcactgcaacctctgcctcagcctcctgagtagttgggactataggcacatgccaccatgcccagctaatttttgtatttttagtagagacagggtttcaccatgttagccaggatagtctctatctcctgaccttgtgatccacctgacttggcctcccaaagtgctaggattacaggcgtgagccaccgcacccggccgagagcctgtctttaaaatacaaaacaaaacaacaaaacgaaaccagaacactgtagtgttgtaaccattttcctcatgaatcctcatgatggaaacaaaattgactcattttcacaagcccttgacctaggagaaatgatgtagcgtatttaattcctctttatttatcatccctaatagtgacttttgccaagagcctgctgtgtgcaggcttaactgcatcatctcatgcaattttccctcacctggtttgtaagggaatggaagctcagggagatgaactgacttgcccctgatcacacaagcacagagcagcctgtttctgacccaactctcccgtggctggcctatagggcggcgccctcaagcgtcaggctgtgacaaacccggtcctcattggacatcttgatctttggggcttttttttaaagcatgtattttgccttcttaaaatattgcgtttgtggccgggtgcaatggctaacgcctgtgatcccagcactttgggagggcgaggtgggcagatcacgaggtcaggagatcgagaccatcctggctaacaggcgaaatctgtctctacaaaaaatacaaaaaaaaaattagccgggtgtggtggcgggcgcctgtagtcccagctactcgggaggctgaggcaggagaatggtgtgaacccgggaggcggagcttgcagtgagccgagatcacgccgctgcactccagcctgggtgacagagcgagactccatcttaaaaaaaaaaaagaattatatatatatatataatatattataaattatatataatatatattatgttatatatataatatattatattatatattatatattatatataatataatataatatataatatataatatattatatataatataatatataatatattatatataatataatatataatatataatatataatatataatatattatatataatataatatataatatatgtaatatatataatatataatataatatgtaatatgtaatacgtaatatataatatataatatgtaatatgtaatacgtaatatataatataatatgtaatatgtaatacgtaatatataatatataatatgtaatatgtaatacgtaatatataatatataatatgtaatatgtaatacgtaatatataatatataatatgtaatatgtaatacgtaatatataatatataatatgtaatatgtaatacgtaatatataatatataatatgtaatatgtaacacgtaatatataatatataatatgtaatatgtaacacgtaatatataatatataatatgtaatatgtaacacgtaatatataatatataatatgtaatatgtaacacgtaatatataatatataatatgtaatatgtaatatataaaatatattattatatatattattatataatataaaaaatatataattatataatataaaaaatatataattatataatatatatataaaatatatattgcatttgtgtattatttatcttgcttactgagtttttagtgctcagaccagggacctctgctttaagggttagcgaggtcggtcactcacttgaggtcccatgaccataagtggggcagcagggtgttaaccgaatctcctgggagcagtctcagcagccaggctggaggcagcagtgtggtttgccttccatcagatcctcacactctcagacagaggaaggaaacctgactaaacaccagctgctaagttgctgtcgggtcctctggggcttggggcccagtgactctttctctcccagctgtgttctcatgaatgtgcttcttctcctgcaggtcgggaaagaggttaaagaagacacgcaagtatgatatcatcaccactccagcagagcgagtggaaatggcgccactaaatgaagaggatgatgaagatgaggactccacagtattcgacatcaaatacaggtacagggtggagacagaggcttcctcctgggcttggggcagtgggttggtgggacctcgaggtcaggcatggtgtccatgtgttcttgttttttagtgaagtgttgggtcctggggtgttctgcacgtggagagacctgctctgatcttgtgttagtccattttcatgctgctaataaagacatacctgggactaggaaatgtataaagagaggtttaattgactcacatttccacatggctgcagaggcctcacaatcatggtggaaggcaaggaggagcaaagtcacatcttacgtggatgatggcaggcaagagagcttatgaaggggaactcccccttagaaaaccatcaggtcttgtgagacttattcactgtcaggacgagagcagcacgggaaggcccagccctgtgattcagttacctaccgagtccctcccacaacacgtgggaattgtgggagctacagttcaatatgagatttgggtggagacacagccaaaccatatcagatcccttcctagaacacactgcacccagaaacccagcagagaattgcttattacttttcccaaaggagaacacaaagtcacctttatagaaggaaaaggaggattgtgcttcagacaatgagctagttgtccactggttgtcaggggtccggcccaagcagccgtgtgtgccacacaccaggcacccaaacagaaacttctctttcagcctcgcttatgtcagtagctgaggacgtgggtggctgggtgggtggcgttcctgcttggatggagtttaccgatgagctccacaggcaggtgtgtttcttaaaggctttctctaggaaagtcagaatgactttgtgactttaggattgtagtgtgggttttcagatcattttgaggtgtactttgaatatgtgagcttcttaatggaagagctgaggatgagcatagttttgagacgagggctcgaagacccagagaaagggcattgcttggccaaagtcccaattagtagtaaaagtggaacagaaatgcaggctggtccctatcttggctccccggatcccatggcttctgcatgtctgggaaggcaagccttccacacctgtgttcctcagcacagccttggcggtccttggtccttctgcataaatcagttgtcagactcaacaagacaatgtttgggattttgattggaactgcattgcctgtggatcaatttagggagaatcagcacttttacattgactttgccaatccatgaatatggaatgattttccatttattaggtatttaaaaaaatgtttttcagtactttaaaaaatttatgtataaatgttttatacatttttgttaagatatattctcattggtgttttacattttgatatgtatattttttactttaaagtactatttatactcatgtctggagaaaatgactgtattatcatgtttacatacatattggttttggaagctcagtttgttagtgaatcacacctaaatcttataaagaacctgaaagcattaaaacggattggttatggataacagaatgggagaaaaatcccattagttgtaatttgcattttaggtaaagggcagcaccctttgaaaagaatcaaatcaattagtaatatttattcataccacaaaataatgcacagttggccctctgtacctgagggttccacatctgcaggctcaagcaaccacaaattgaaaatgtctgggctcgggcatggtggctcatgcgtgtagtctcagcattttgagaggccgaggagtgcagatctcttgagctccagggtttgagaccagcctggaccacatggtgaaaccccacttctacaaaaaaaaaaaaaaaaaaaaaagcaaaaattagccaggcatggtggtgcatgcctgtagtcccagctacttgggaggctgaggtgggaggatcactggagcctgggagatcaaggctgcagtgagccatgaacatgccactgcactccagcctgggcaacagaggaagaccccatctcaaaaaaaaaaattttgggaaaaaaacaatacaacaatgaaaataatacaaatccaaaagacaatacagtgtaacaactatttacattgtattaggtattaggaataatttagggatgatttaaagtatactagagaatgtgcataggatacacgcaaatactacaccgtttgatataaaagacttgagcatctgtggattttggtctttgcaggaggtcttggaaccaattctctgaggataccaagggatgtccgtgtacctaggaaagttagtgattgtattgattttatcgctaagccattttatctgtctcacattcaatacaaagaagtaaaatacaatgtgaagaaaaccatgtccttattactattcacagtcaaaagagtccgcttcctcctgcacggctgggaatattgtacaatagggagcgtttaatggttcgagtggatcaatgtactgttttgattctgagccagtgaacagcgtctcatcaatctttggtgactgaactaactccgtgggaagcatgatagacagaactatttttgtggtgtctccacatcccactgaataagagaagaccctaaacaaggaaatatgacaatcaatctgctcagaaattctctttataggctgtttcctagaaggtgggaaaaggggcctttccctgagggcatagacgtccatattattgtggcctggttgctggattgacattgtgtctggtatgatgaagataaggcacacgttgaaacgagtgtcacattaagaaacttccacagcttgtctcagttcttcaaataatggagcgagttccttttctaggctgacaatgactgccatattggcattgctgctggctgtgaaacaaacaaactactaaaggtaaaccacctggtaggtgttaaagttaacagataagtccaagcttgtgttttgaaagtccaggttggcttgctggctggcgtgttgcgagggcaaaagttagtgagacacctggtctccgggcacgctctgggtcattttcgttggccactttaatgatgtgcattccatctctatctgacacagcgatagtgcggggcccttcaacacttggtggttttttttttgtttttttgttttttttgagatggagtctcgctctgccgcccgggccagagtgcagtggcactatcttggctcactgcaacctctgcctctcgggttcaagcgattctcctgcctcagcctcctgagtagctgggactacaggcatgtgccaccatgcccagctcattttttgtatttttagtggtgacggggtttcaccatgttggccaggatggtctcgatctcttgacctcgtgatccacccgcctcggcctcccaaagtgctgggattacaggtgtgagccatggcgcccggccagcacttggtggtttttaatacaggaatagtgttagctccctgaagcaccttagtagtgtctcctctgcccctattctaggcagaaactcaggaccctgcaaatccctctgtataagtttcccgctccagaccatcggccgtaaagaacccctttgtcccactgaccagtctccatgcctgggtttctgcttctagggctgccagcttctctctgctgtcattctggggacagtgtcaaaaacagatttctctgcaagccgccatctcatgattcatgactttgatgtctcttaaaaaatattatttttaaactttttgtttattgcagttatttttaaaagatactgatttttttaaaaaaaatccagcaactggctgggtgcggtggcacgcgcctataatccagcactttgggaggccgaggcgggcggatcacgaggtcaggagatcgagaccatcctggctaacacggtgaaaccctgtctctactgaaaatacaaaaaattagccgggcacggtggctggcgcctgtagtcccagctacttgggaggctgaggcaggagaatggcgcgaacccaggaggcagagattgcagtgagccaagatcgcgccagtgcactccggcctgggtgaaagagcgagactccgtctcaaaaaaaaaaaaaaaaaaaatccagcaaccttgctaaacttttattaattcttgtaggataaatgtggaatctttgggttttctgtgtagatacgtcatctgggactaagaagagtccctgtccctgctcccaagtccttaaacgttttatctctcttttgctttgcttttgccttttctgcttcccttccttgagaagtttgtgctgtttgtggttgaaataaaatcagaatgtgagtgaacttggaagtgagtcattagacacaagcccactgcagtcctcaggcctaaagatgactgactgttcggaaagactaagtagtgctggcttttcttattacagaggtaatgttaagctgtagaaaatacagataataaacaggaaagacacagttacttgtcatctcactacttaacagtaaccactagagtgtgtgagtacatagatgtgaaactttgttttttatagaaataagactgtattatacatgctgttttggcacgtttttctacccaaacaatgaatcatgagcaacttttcaggccaataggtgtgaaagaacaaagagtttcagacgttgcatgtttggtttagtgtttttgtgaacttctttgtctgcacatggctaatctgttcacaggtacttgtttttcccatttagacataactcaaccaaatgtttcagttctctctaggaaacagactacatttaaatcagatgaatcatggctttgggttattttgtgattgggtggaaagaggaaaatcatgtttttggcaccagggcagtaaggcagagtaacctgcttcttatttcccaggtaactctctggtaacatcttgtgacttagagcctgtgcctatcagacaggcttttttttctcgaagttttcagccaggtaggaaatgaaggaggaagaatacaggcagggtaggagataagaccttgagtgcgtagggccagagtttggggagggagggagggagttctatagaaatgaatctctaactctgtacttaaaaagactaattagaaagaagaaatgatagctaaccagagtacaagagtgccctggggttttgaaatggttctttcaagaggcgtttgggtttcggctgcatgtgttttgagctttgttgcctagtgtgcagttgtgtggatgctctgggcctctttgcattcccggtttattacagaagactttgttacaccctctaggcgtcctccaggaagagacagatgtgggcttttcctcccgtgtgtgtggcaggcggcccggcagctgtgacaggcgcagcccaaaggcacactgctgggagaacgcgctgctcctgccagccctgcctccccaccaagagggaggtccctgtccccgcttcttatgtgtggaaaagatgtggccccgtgggggtgtggacgttcattctagaaatccctgcttcccaccctcttgtgggtagggcttcctttgggagtataattagaaacccacgagatttccactgtaatgctgcgggctttggctggtgtcttgtcttggaaacaaagggcatttttgtgcagtttgcagcatgaggcctctgcagggtaggcagggagtatgggaaaacagacctggcttgctacccgggagctctgagtccccatggacgccctcatggcagttgctaagcacactcaaggcagtgacttcttggagctgcttctacttactgaggacctctgaatggccaggcaccccaggcttcctcgtggtcttctgagggcgaactgttaggagcatcggcagatggacagctgcctgggcggtgggtatagaaacaatgggcatcattagcttccaaggcctggaaggaaccagagaggagccggtgacctgcagggtaactgtatctgaaacagcatcagaagccatccccagaccagtgtgaataaacctctgccagtcctcttccttgcagaatgcagaggatatgtgttaaaaatgggcatctcatggagaatttttgtttctttggaaagcaatattggcagcctgcgggcaattttcatttagggtgtctcactcaaagccagggcaccttaaaaattcttgtgtctatgtctatgaggatggagcctacgtgaacaggaatctgatcaaataaacaaaaaggaaagagaaagaaagaaaaagaaaagagggaaggaaggaaggaaagatgaacaacacaaatcatcctaagtatcaatgcttttgcaaaagcaagccatgtttttcagatgttcttttcttgtgtgtccctggatggaagcagtagaactgccaggggcttccctgtcacgtggtggtggtgtccccacgtttctctgtctcagacatactcacagacaggccaggcctcctccctccggcttctccgtcgttcactcataaggccactgcgtcctcttcccagagtgtccttgccggctgcactgagacgtcagctgccagggtgccagacgctactgacaggtgctgcaacaggtgttcctgtgttgagggctattttgcctgccggacaagcttcttgtaaaacatgggccagacgcaagttgggacatgtcactctcctcgtgtgggatggttgtaacccagtgtcatcctgcggcacggtgggaaatctgaataagcctgggcggtggcagctaaatatgccttcacttcctatagagattttggtgggggtggtggtcagcattgactctttctgacttatgttaatgatgaagcaggaatgtcactagcagtttggcggttctgggggatgagaagggggccgagagaggcctcttggaatctctgcttgtcacctagcacatgtctagttggtaagcctgataattctcttcaccatgagtacaggctgggtaagcctggccctgccctcgaggggcctgtgttgagagtgggagacagcaggagcatggccacttttttcttttttttttttgagatggagtcttgcttttgttgcccaggctggagtgcagtggcacaatcttggctcattgcaccctctgcctcccgggatcaagtgattctcctgcctcagcctcctgagtagctgggattacaggcgcctgccaccacgcccagctaatttttatgtttttaataaagatgaggtttccccatattggccaggctggtctcgaactcctgacctcaagtgatctgcccatcttggcctcccgaaatgctgggcaggtgtgaggtaccgcacctggccaagcatggccacttctaagaccacctggcaagccctctcacagaggaaggaacagggtgctgtgggcagccaggaaggggcaataagttcttcccagaggtggtgaaacctacaagttcgagaggaccacgaagtgagcccaaggtggctcaacatgcagggagcagtgagggcattccagggagaagtaacagcaggtgcaggcaaagggacgtttaagccagcatagggatcttcagtgagtggcagctttgagcctctgccccccaagcccctcctcgggggaaccccaaagcttctggccaatagatggccacagggaaacagctagatgacattgagagagccaggactttacagccagcctcctctggagacagcttgtcccctccactgtccctggagtattgttcctgagtgccagtcaccccagagagcctgaaggcccagccaactacacggctgaaacttggggtatggctctaccacctcctggagagacccagagagccggtgtccaggcctgacctgggcaggcgttggtgtgtgcgggtggacttctccccgtggaggcgcgtgaaggattctgcgatgagcagtgtggctccctaccttgtgtatgtgtgggcgtttcttaagcacacggatgtagacagcaacctgggggtgaggtgagggcagagagcctggtaggggatccccgtaagattcagagcagtcccgtgggatgcccagacacttacggaggtgaatttcagcatggcagcggtacagagtttgcatctccgttgattctgccggctgctttccccagagcccgcaggcctgccgtggccagatctgctctggcgcagctatggcgatcaggtccctgccctcagctccgattcttggtctttaaaatcttcactgctcctctccagttcctgtgcccccacccttcatcctcgacattgaccttccagcaagatgcagtggaaggcctgatggtggaatcagacctggtaggaaccttaatgttgggggtccttagtcccttcctctttgcagtggggggtgtgagtgcttgggctccgagatgttggtttgtgaggttagctcccccgactccccaacccacagaaggggccagggggtcactgtaagaaagccagcctcctgcacaacttggacatggcttgctggagatttctttttctctttctctagtctgttgagtaggggactttagtggctaatatgaagatactcaatttttttttttttttgagacgatcttgctctgtcacccaggctggagtgcagtggcaagatattggctcaatgtagcctcaacttcccaggctcaagtgatcatctcactcagcctcttgggtagctgggactacaggcacaagccaccatgtccagctaatttttgtagtttttgtagagacaagctctcagtatgttgcccaggctggtctctaactactgggttcaagcgattctcctgccttgacctcccaaagttctgggattacgggcgcgacccactgtgcctggcttatgttttctctttaaacaactttttatttggaaaaaaaattaaacttcatgcaaaaataaaaatagcgtagggaacaccctatacttttaactcatattttcctgttaacattttttgcctgtttgctttctgattcatccgtgtgtatatgtatgtgtgtgcacacaaatggtttttactaaaccattagagggtaagttatgtataccatggccctttcctgcaaatgattaagtatctatttcctaaaaataggatgtttacatcttctagtaaatagctacctgttatggtaatatatttggtattatgtaatattatgacaggaagttcattattttataaattctattaaatctttgttatttttgctcatgggattatataatgcccataatcaaacatcaggaggtgatggtggcagctttaactggtcaaattttccctccttttctaagtccctttagatgatgtcttgagcagagtcagtttttttttttttttttttttttttgagacagagtcttgctctgtcatccaggctggagtgcagtggcgccatctcagctcactgcaacctctgccttccaggttcaagtgagtctcatgccttagcctcccaagtagctgggattacagacgtgcagcaccacacctggctaatttttgtatttttagtagagacaggttttcaccttgttggccaggctggtctcgaaccccttacctcaagtgatccacccgccgtggcctcccacaggtctaggattacaggcgtaagccaccaagcctggccacagatttagtttttaaacttatgcttatttttttgagacggagtcttgctctgttgcccaggctggagtgcagtggtgcgatctctgctcactgcgagctctgcctcccgggttcacaccattgtcctgcctcagcctcctgagtagccgggactacaggcacccaccaccactcccggctaattttttgtatttttagtagagatggggtttcaccatgttagccaggatggtcgcgatctcctgaccttgtgatccatccgcctcggcctcccaaagtgctgggattaccgtgcctggcctaaacttatttcttgtacttcttatgttttctgacactgtggtgtgggcccggggtttaaaggtaaggaagcttagatgtggcttttgtctcaagctcccagtctaagcaagagaccaacactactcagatacataaaccaggagtcagcaaactatggcccatgggccaaatccagcccactgtctgtttttgtacagctcaggagccaagaatgattttcacattttaatggttgaaaaagaaccaaaggaagaatactattttatgacatgagaaagtaacatgcaattcaaatttcagtgtctataaataacattgtactggaacacagccatggccaagcatttcttgctgtggctgctgttccaccccaacagcagggttgaggagttatcaccgtgattgtgggatctgcagagtttacaatatttcctctctggactgtcacagaagaagttttccaacccctagtgtaaacaccctggaagtgctggcaaggagagggatataaggagaaagaggttgtgttctagggagtctgtgtggggagctgggggagggatccttagttgggaactgtggggagggagggggtttgctggaagagtggattgcgccttccagacagcacgctcaaaggtcctgtggctggggactgtggccttttcactggctgagagggtgagggatagagatgttcaggaggggtcagaatgggtgcgaggctctgccagaaggggcttactcttgtccttccctttcttttaggtaaaacctgtttcccagcctggtggcatcctgtggaaagttggtcagctgcaacctggggtgtgaaggactggacctggaagccctcttgcgtcggaggtgttgaaaccaaaacgaacgttatgtataaaaccccagctccatcgtgcgtgtcaggcatctgctcagactgtcactggcaagctcgtttccacgtcaccacaatggagttgcttctgccaccctttgggcatccctttaaagtgccccctacttctactccccatgtaagaggctttgtgccttgctaaggagcaaagggtagaaacatgttgattttaaagaagtttttttaagacaattgttgacaatagtaaaagagatcaggaggatcaagaatctaaaacaagcctgaaggatgtccaactgtgtatttagaatttccgacattcttctctactggatctacacattggaccccatctgatcctttgctgcttttttggcttggtcaggtcctggcctcattttggcgttacctgtgtcagagttcaaggtggatgtgcttagagctggtcagccccttccagacctggacacgtctgtggctccttttctttcttccttttttttttttttttaaaaaaaaaaaaggttcagcagaaatcagcgtggctagttcacaaagaatttccagtatcagggaaaaactgtgcgtgtgtgtgtgtgtgtgtgcacgtgtgtgcgtgtgcacgtgtgtgatacctataaaacagtttctccttctctgaagggaaaggaaagtgctaggcagcctgtgattagcaacattctttgtgcttttttgttgttcctctgctctgtcacagttctacgttgtttgccttagaaatgtaatttttaaaaaccattttaaaaatgaacggtgatttggctggctggaaaaaatcacactgtcaggggactatatttgaagtcagtctagacggggctggactaggaacccacctggacccaggagaccccacaggacccaggaggtccctgccggaaggcagaggttcaggtgagagtggctcacctctgagctggtgaagtgaggacttgcctgtgacatgacccagggatctgctgctggcttctggagacagggccttgggctgacttctcaggttgattgaggcctcctgactagcggtgttcccaggctagaggtgattggctgcaacaaagatgcttctattagtctattagcagtgccttcgggaccctgggattttgctctctctagaaaggtgttttttatttttttattttttatctcccccttttttcctggctttgctccagggtttgtgtatttgcctgtttattgtcctgctctttttttttttggatgaaaactccagcctttcctgactcacctccatcttcggttcttcagttttctgagaagagttgggatatgtgggaaggggcatgggagctcggcagcctccgcctgccaggaaggcagtttcgcctctgcaggaaagagcagagcccgtgggaagccctgggtgagggtggcgcagccggcccagcacgcatggtattgccagccacggggggcctgcgtgtagtctctgctccctgcatttcaccttctttgttgactttccttctctgttttcccccatctgtttgccagaggggtgggactggcaacagaacagccgtggctgctttatctctcctctccacggtgtactcaggcctgagtggtgactcacgggagcctggccacctcgcagctgttcgccccctcaacctttgaactggaactgctggctcacacagggttttcgacaactgcagctgaatctcatggaaaagctggattcctctgccttacgcagaaacacccgggctccatctgccaggtgcttgccactggtcctggcagaaatggcggctgctgaaagtgaccttccaaatccttggtggcacttcagcgccacaggctctccaataaaaaccctttacacacaaaccatgagtaccttgggcttggatgttttctgtggtgccggccagcggggcaccttttgtgaagacagaggtgggtgggcccaaggctgaggaggagggcggggatgggagctgggctggaggtgtttggatcctggtgattagagaaaagcttggaaatgaaaaaggcttggtggtggaggggcatgcatgctgtttttacgtctacatatacaattggaggctcactcgctcatttcctggaagcttgctccttggctaggaaatactgaggcctaactgtttccagagaatcttggggcatctccagagaagatagaatcaatcacataaaaaactgctggcttgtaactgcctcatacctggcttgctttactctatgagtaagcatgggatgcatctgggccgggttcacagcgagctgagaaaaagccgggggaaaagcccatttgctgccgtccagctggttcccttggaggtcaccaaggagctgggggtgtggtctgtgtccctcctccctgaggagctactcctgtgctccgtcttctctaccactgtagcagtgactaaggttctccagggtagctctttctccaaacagctgcgctggaagccagccctagagagtgggtttccccatcatctcaggcttctcagagagtgtcctccgctgagcacccatcctgtcaggttggctcgttcagatgcccggggacaagccagcctgacggggaggagggtgtttcggcgtccgcggcagtctctgcatggcggagggtcagcgggtaccgcaacttgccttttggttttgaagattctgttgaggcgccatcctcaccttgacctcttctacaaaatctgtctcccctgctgtgccgtggaacacctacgggaagccagtaagttaaagtcctaagatcaaagcccctccctctactgcctgcatctcctgtcataaaagcctgaattgtatggttattcttacaccctgtggggatgggggatgctttatacggacatggcacattatcctcaaagggccctggatgcacccataagtttgtgtcccgtgcttgccccctttggtgaaattcttggctgtcggtgtcattttaaggaaatcaggggaaattacccagaagatcagggtctgtaggagaagaggggtaggggatgcatcagtgacccaaacttgctggtgagatttggcagctgaagccatttaaagagattggcggttgggcgtggtgactcatgcctgtaatccagcactttgggaggtgagtagatcacctgaggtcaggagttcgagaccagcctggccaacatggcgaaacccccatctctactaaaaatataaaaattagcctggtgtggtggcaggtgcctgtaatcccagctactcaggggactgaggcagaagaatcacctgaacctgggaggcgaaggtttcagtgagctgagatcacgccactgcactccaccctgggcaacaagagtgaaattccatctcaaaaaaaaaaaaaagattggcaccttggtgttgccagtttctgaagaggggagaggagggttatgttacaagcatcaccaacaaagagcattgtgactcagcagaggggagagcagtagtaaagactttggggatgatgctggactgcctccccagccacccaccttccttgcacacgcttcttgtggcagcatcatgagtttgcaggtccagatgttgcttgcattgtaaccacagctccctgtgccccccagtgcctgctgtatttgggttagatattttcttataaataaatgatttaatcttttcagggtgaggggcgagccctggggacctggaaggtgttcactccagcaccactagttcagaaaaagggtctgtcccataaggcccccaggctgctcgtattgacaggtgcgagccggcgcttccctccagcccggtggtgccacagttgcttgtggtttttatttatcagagaattcaagaacacctgatgtggactcagtgtacacagcataccacttgcgaaaaccgagtttgttttccattattttcgagaactaaatagacgtgactcttccgggcggttgtcatgagccactccctgccttgctacctgagtcttcttgggtccaacaagtacctgggtgtgactctccttgtaaagtgcctcaaaatttgctgttatttcttgttaggcttagttagttggtttattagcaagctcattttccctgggatgggttttttgatgagctgagttgatgtggatgggaacacaaggcgctcttgtgtgtctgttggcatccaggtggcccacagtgtctagtataaatgtctccatggctgatctggcctggggtgctgtgaacaggcttcctgctgtgagcaggtaagagtgttgtgaatgaattatccccagagtctgcaagacaaccggccaggtggtgctgagtgtggcaggaagaggaatcggatgcagacagacaggcatgtgtttcctggcctcactgctcactcatgaaccctgtgaccttggtcccactttttccatctgcgctataggaatgcacctctttggttactgtgatcattaaattacgtaatttagccaaatacctgctgcaggtgcctggcaccaccggcaccaccagcaccaccaggaatggtcgccactagcaccaccacctccaccatgaatagtttttgcggtcttcctgggtgccaggtgcctttgcacacacacttccttattcagtccttaacagcatcctttaggtaggtattattcctggaacagactgatcatttccagaggcccagggctgtttcccctggatcatatttacctccctggctctccataagaaaacatccatttgcttggcactttgtcatcctttgagtcctgccaacaaggtggcgaggtaggtatttgtcttcattttgtacacacagggctgggtctaggaaggtcagtcacggcacagggtcacatggtttctaaggggcaggtctcaaaccaccagtctcctgccctcttcagcacttttccctgaaaggaagacgaggggacttttcttctgagaccaaaacggctcacacttgggatagcagaagatgtcatctctgggccaaagagataaggtcatatgttccaagaggcacccactctggctgtggctccctaaaggggaaagaggtctgcagggcaaagggacatgtcccctggacccccagatccttccttttctataattctctgcccaaatgcccctttgctagctgccagggcctgcactgagttcatcttccctggggccacttgtgtgcccatgcctcggctgagaatggccagctgtggctgagacgtggacatggttggagctcaaacatgcagccccgggtgtccacactcatgtgcgaggccccttgttacaatgaccaggtggggatggcaagagaaggggaatgggccgcggaccaggggcctccaccgatatcctggcctgagcccagcaggcattaggagcaggtcagctaacctgggacctgactggggctgtgtgtttgatttccatttccattttcagttccgctctcatcaccaaagagcccactcctggtgcctgtgatgttatgactgaccgtaagccaaactggagtctggttctgggggattttctacgtctcctcttttttcttatcaagatgtagagatgtgctttgaggtcgccactgttccaagatcacattgtttttctttgtgatgattctgtttcctacattgtacggttttgaggccgtttcttgattgggccagccttgacgtcagctctcgttatgtgatgctctcactttccctcttagtcccctcaaggtcttggtcaacgtcagtgtacttttctctctttcctttagttggaatcaccatccatggaaaatacttcctggaaacgttttggaatagaaagggaagaagaaatagaaagtaagcaccacataaagtaaccaatgacatggaataaataatctctgtttcatttgaagtccactccagggcagtctctactgcctggcaaatcaatccctttttgtccactgttcaccccacactggtgcagtggcagtgtccctttgccgagatgctgaaacacccagcttgcccatgaggcggtgggagggttgaatgagataaggcacacacagtgggtgcttgataaatgggtgtcatcttattatacatccagcaggttttcagagatccacaaggcgtgatgctgggccctgctggactgcaaaggtggacgagacaggcccactcctgactcataaaggagggagatgaggtttgtgcacagagcacagggtggccgccatctgctttactgaggcatcccagcaaccaagagcatcagctactatttattgagcttttaatatgttcctggcattgcgctgagaacttcacatgctttgtaaagacactcatttgcatggtaagaccagcttggactctggagccagactgcctgggctggaatcctggttctaacatttcccacttgtgtggccttaggcacatctgttaacctctctgtgatgccctctctctatctgtaaaagagaaacaacagcagtacctacctcatctggatattatgaattggatgttttaatgtctttaaagcactgccaggcgcatagcactaatgcattaatgtgcccagcaacagtacaaagtagcttctctgttgggatgtttacttgtcaagctaggaaaccaaggctttggtaataaacgcacccagatcccttgccagcagtggtctgtctgctgcttggaggcctgggtgctacccacagtgctacattgccacccagtgctgggacttggcctaaggtcagggccagccttgcagaagggtgggcactgatcccaaccaggtccctcagctctaggccctgtgagagctacaaagttgtgtgagattacagaggcccagagagagtgctaaggcatgggggtcccctgaggctgttctcttgcttggggctaagagattggtggtgactggtgcttgggggagtggggcccatggatgtatctctggctagaggagaggaggataaaggtggagaggaggccgcagaagggcttttttgtttacctgcatagtccagtccctccatttcttttctttttaattgggagaaaaggtcttgctctgccacccagtggcatgatcatggctcactgcagcctcaacctgctgggctcaagcgatcctcccgcctcagcctcccaagtagctggggctacagtctcgtgtcactacatccagctaatttttaattttttttagagacaggatcttactctgttacccaggcaggcctcacagtcctgggctcaagtgatcctctctcttgcctcagcttcccaaagtgttggggttacaggtgtgagccccaaggctggcgacaatatccatttcttaaaagcagaatgaattcagcttcagggaagcaaagttgggctggatggaatattatactcagtagaatgtctgagatctccctctgagatgtccctcttgccacctttattatgggcactttagaggtggcaactttgggtgacacaggcccaccatcttaagggttactgtccacgtccccaatgcagctgtcatcttccctaaggggaggacctgtgctccccttcgtccttagatgtgggggtcttgtttagatttgtggggcaccttgattccaaatagtcccatttctttaatgagcatttaggaaactgtcagatcatgtgtcccaatgttggttcaagacttgacactttgatagacatgaactaattccagtgtcttctagattcattagttaaaaataggacttggagttatgataaaccatttcaaatggatttaaatcaaatagcagagttttgataaaaagtatatttattataaaagtgatcttttaactggtgaaaacttggaagacaggtaattataaagaagataaaataaggtatctagatcataaccctgattagcattttggtaggtttctctctgaacttttcccctccctgcctccctccctccttccctcccttcctccctctcttcctccctcccttcctccctccctccctttgtctcttcctcccttccttccctcctttcttccttctcccctttccccacttccctccctcactctctcccttccttctcctctctcctcaccttccctccctccctccctctcccttcctcctccctccttccttccttctcccctcttcctctttctctccctccctctctccctctccgttctctctctcctcccctccttcccacccatccatccatccttcactcactcatttgcaaacatgtattgaactcctattgtaccaggcactgtgctaattggaaggctcaataaagtgaatctggggaggaccaggatacatcactgccagggatgacagagaataaagtgctgtgatagggacatgggggcatccgatgcctgagaagagagggactgactctacctggacaaagagtgacctctggccttgtgtgtgccttgccattgtttcctctacaaaagtgggtcatctgacctgattttttcagttaattttatgagtatttccccatgaccattaatatttaaaatggccttttaagagacagccttcccattgtcttttgtgggattgcactactgagcgacccgtctccaacctgtattggcaaaagctacggacgagagaggcctcatggagaagtgcaaagggagaggccttggggtctgacctggctcccaagagctcagattccgggtagtctcctttcctcccccttgttcctccccttggaccccctttcactctttcagtctgaaccttaacagaaggattcagcccgcctaggcgctgggccccacttgctgtgacccgtcattgtttctgcatggcaaccagggagcgcctgctccctgccaagcccagcgatcaggaccagagtatgtgcagttctgacctgtgttctcccctcccctggcagagagaagctcagtgactgtccttgcgtcatttgagcagagcccacaaaaggcagctgctgcccacggggagcctgtcaaacgagggcccagtgggcaatgtgagctgaagttccttgaccacaacaagcctaccaaaccccactggctttcccccaaccactgcaggctacaagtcccccagtgaccctgacgtgcagtgagtcttcctgaaccctgtccctgaagcagccatcacgtggggtatggattcaattttatttgctcgcaggtgtctaattggcccggcaccactgcctttggatgccgcttgtgtctgagtctacatcatttgtcagagttttatgtatcttttttctgaggtagtaatagtcatcctctggacaagatcctagagcctggaaagttccaacctgaaagtctgtacccagggacaggaccctgttgggcaggatgacaacgaggaagtttctagagtgggcgttcaccctggaggggcccttggagatcaaggagttcagcgtccttgttccatacccaaggacacgtgggcttggagagttcatatgaattgcaaccatcttctccacgggagggaacaccgtctctgaggctgctcatctgtcctggagccctaagcaggtgtctgtgggagggcactggctgcttctccctgcagttcttccttctatacctgtgtctcgtggctttcctgcccgcctcagaggaggatatctggggcatatcaggtatacacagtcacccacgttcagactatgaagggcgtggccactgcacgcaggaccagagaacggatttggacacgtctgtaaataagccgcaggttcacagcacagtgcctttcaagggaagcactgtaagctcactgagcaagggacccaagagtcaaaccctgcaacgtcaccctgagggggaccgggaaacattgtgtagggcggtgaccccaactggatggtcagacccagtgtggcctctgccgtgggggttcagctgcgtgtttctcggtctggaggccccagcagggcctacgcaagctgtggggaggaggctcccctgctggggattctttgacagggtgttgggtgtcagaggcccagggccagagcaccaggggccccagtgggaggagccaggtgtagggatgccaccaaccagcccagcagcgactgcaggaggcccgcggagcctaagttaaggtagtgtggaaacatctcggaagtcacctcgggagcctggatggaacatgccatgttctgattcagtggatctgctgtctgagactctgcatttccaacaagctcccaggagttgctggtgccgctgggctaggaagcacatcttaaagagtgacacttttaggctactttttttttctacaccctacttccagcttctgatttctagccctggaggtgtaggccacagccctgagtagcccctgccctacctgcttctctccagggttccccagccctccactcttctcccagggtcattcacatcatctttgattcggggttttgtctgtcccccaatccccctctcttctgcagcacctctcagataacccctgtattaaaatcacagtgaccagacacacatgccctggctgggggatcacacatgcgaacctgcagacaattccagatacccaaggccaggaaggcccacgtgaggatgtcacccaccctggaggagacttggatggggtggcaaatttctatttggaggaagagggtttccaggatggcagatgccagaagatggtcctgatgtctgaggaagggccacctagtttgacaggatggtaagtcgtaagcccactcagatatttggctgggtctttctgatgagtggaagagacttcaaaaaatactacagagtgtcctttctttctcagcagccaacaggtgaaaaaacagctttattccgaaagaaaatggtctagtcattgaggaggacggagtgtatcctgcagggcctgcctggtcttgcaggacagattggcagagaggaagtcttgccatgatgtcctgcctgtcaagtgtgatgggtaggtcacagggaaaacaggcactgctgggctccccagcagccagtgcatcaaggaaagaccagggcccagggggaagttaacacacatagaaagatgctgcatgtactcatgtgtgagattggggttcactctcggctatagaaagatgagctttaggccaaataatcactatacaggggaatgatggcagtggcgcactgtatttggaaactagctgggcagtgacagaaattggcccaagagaggtatagatgcagaggagaggaagaaaagtattctgaagccctcgagtgcaatgtccacaaagcaacaagttcaaactttccaagtcgatgcaaagaatcctgagacgggtgcatgagaacagtagacctgcagttgggggattgcagatgccatgaggaattgcagacttttgtccattggattcttgagatgtgtaaggttccttttgtatgtggggctctacatggtatatgagaaaaggtaaatgggtagatgggcagctgagtggattctcagcaggtcgggaggacagcagggtggtccttagtctgaccccaaggaagagccagcaaagaggacgggcggcaggtgggagctgcctggctcaggtcccctcataagtgctctaagtcagggggtatggggatggctgccgagggagcattttattttattttattttatttttattttttatttttttctttatttttattgattattcttgggtgtttctcgcagagggggatttggcagggtcataggacaatagtggagggaaggtcagcagataaacaagtgaacaaaggtctctggttttcctaggcagaggaccctgcggccttccgcagtgtttgtgtccctgggtac

SEQ ID NO: 89 - DNA, 871 bp, Homo sapiens
cgcaggatcccccggtgcaggcctccgtgctggtgcggatcctggagctcagccgcgcgcgccctgcccgatcctgtgccgacccaccgcactatgcgcgccgtgccgctgcccgccccgctcctgccgctgctgctgctcgcgctcctggccgctcccgccgcccgcgccagcagagccgagtccgtctccgcgccgcggcccgaacccgagcgcgacggcagctccaacagcagcggcgacgccttggtgacccgcatttccatcctcctccgcgacctacccaccctcaaggcagccgtgatcgtggcgttcgcctttaccaccctcctcatcgcctgcctgctgctgcgcgtcttcaggtcgggaaagaggttaaagaagacacgcaagtatgatatcatcaccactccagcagagcgagtggaaatggcgccactaaatgaagaggatgatgaagatgaggactccacagtattcgacatcaaatacagttttctgagaagagttgggatatgtgggaaggggcatgggagctcggcagcctccgcctgccaggaaggcagtttcgcctctgcaggaaagagcagagcccgtgggaagccctggggttttcgacaactgcagctgaatctcatggaaaagctggattcctctgccttacgcagaaacacccgggctccatctgccaggtgcttgccactggtcctggcagaaatggcggctgctgaaagtgaccttccaaatccttggtggcacttcagcgccacaggctctccaataaaaaccctttacacacaaaccatgagtaccttgggcttggatgttttctgtggtgccggccagcggggcaccttttgtgaagacagag

SEQ ID NO: 90 - protein, 287 aa, Homo sapiens
  VARIANT (1)...(287): Xaa = Any Amino Acid
RRIPRCRPPCWCGSWSSAARALPDPVPTTMRAVPLPAPLLPLLLLALLAAPAARASRAESVSAPRPEPERDGSSNSSGDALVTRISILLRDLPTLKAAVIVAFAFTTLLIACLLLRVFRSGKRLKKTRKYDIITTPAERVEMAPLNEEDDEDEDSTVFDIKYSFLRRVGICGKGHGSSAASACQEGSFASAGKSRRKPWGFRQLQLNLMEKLDSSALRRNTRAPSARCLPLVLAEMAAAESDLPNPWWHFSATGSPIKTLYTQTMSTLGLDVFCGAGQRGTFCEDRX

SEQ ID NO: 91 - DNA, 21587 bp, Mus musculus
  misc_feature (1)...(21587): n = A,T,C or G
atggggttatttgaatttctggagtccagcttcttgtatacaatatatttgtatatattgtgccacattttcactatccactcatcagctgagtacatttaagtcatttccatatcctagctattgagaatagagcagcaatgatcatgactgtacaaatatcaagtcctatgcagggattgctgtcaaggattggtttagctagattgtatggaagatctttctccacagtaatttccatggtgcctgtatgagtttgcaatcccaccaacattacgtgagggttcccttttttataacccccacaagcattggctatcaattgttttcattatcttaaccatctcaagctgcttttaatttgcatttctctatttgctaaggatactgacacttttaaagatatctcttaaccatttttacttctttttttgagaactctctgtttagatctctagccttttttaaaactgggtcattacttttttgactttgttttttatatattctggatattaatcctctatcagatagatacatattggcaaaaaaaaataccctcacctaatctatgggcttcctcttcattggttgattgttttactatatataagctttttaattttatgaagacctatttgttaattgttggccttaattcctgagtgagggaagtcctgtgcagtcctttcctgtacttatatcttgaagagtatgattctgttttcatacagaagttccaggatttcaagctttgcactgaggcctggaatccatttggagttgatttttgtacaagctgtaaatatgaatctaattcatcctactgcacgtaggcatcctgtttctccagctcccattattgaccacatttttgtcttcgttctcttcccagtcataccttaactatacattagcatagcacaattaagattttgttttgattggctttggggctttgttttgttatgttttgaagtactgggaattgaatcaaggccctcacatatgcaatcaagtgctctaccattaaattatatcccaggcctttattcaaagtctctctctgtttttttagacagcatctccttaagttgcctaggctggtcttgaatttgtgatcttacccaccttctcagagtgctggaattacaagagtttaccaccacatcttgctgggacttatgacacacttcatgtactctgcctgctgataaaattccttatagcattgatcttgttaagtatgggccataatggttgaggaaggaaaagctggcatgctcattcctgcagaaggagcctgtagaacctccagaggaatagcatttcatcctttagagcttctcacaatgcttagatacaagaggatttgatagcagacctcagaggaagggatgcccaggaaagtgtattactgtattagtgcattgctgagaaaccagaaatgaaaatgaccttacatgtggccagggaaggtaggcaggcatagtgggcacaggtattatagcagaaaagggaaataaagctggggatcatggaggaacacatgaatcttaaaaagcaaattgtggagtaagtcaagtaacttatccaataattagaaacttcgtgtaatgccctgaccctgccactaactaaatttagaaccttggatatgagttacttaatatactgagaccaaagtcattctgcctgtaaactgaatatgtcgggtaaatataaacaacaaaaatttactgcaacaaacatttttgagtgcctactaactgccaagtaccaacttttgaagagggaatgatgattatacagcatgctttttggttcattttataaactatgttttatagacaatggggttaaataaaagcaagagagacctactgacactttgagagccagaaaggacaatggttctgtatttttctaccagaaatgcgagtgtcccagtgtctatcacctttctattgtgtttatgttgtacagagaatataaacaagcgaagttacagaagatctgttcgatgtaaggtgaacaattgagttttcatatgtataatctcatttaacgctcatagcatgtggcttagatatttgcttcatattttgggtgggaaattggaactgagagaggtaaaagtgatttctcaaggttactttaatcccgggtaacttgaatccaaggctagacctcttcctgccacactactacatcagcttgaaaatggcatagtgataatttatacagctggtatgtatgtgtcagttaattcattatatggcttgtttaaataactatgcgagcaatacatcttgctataaactggttcagtacttccagctctgcctgccaacctccatgattcaatcatgaggcattctagaaatctgtggggctaataaggctacagaaggaagatgagaatgacggaatgtggtgcaagggggatacactcagctagagaacaggttcccaaggaagggccagcttcccatgtcagagattctcaagaggaagaaggaaatttggatgttatctgggaagacttccttttactctactgggtgatgggaggccatgggaatgagcgtggcaatagcaatactgctaagtggatggtagaagctgtatagctccaggagggccatctagcataaataaagaagtcatacattgaagggttcaactcctgggaagcctactaaatgataaaaaaagtgaagaatgagagaaagaaagaaagaaagaaagaaagaaagaaagaaagaaagaaagaaagaagagaaannnnnnnnnnnnnnnnnnnnnnnnnnnnnnnnnnnnnnnnnnnnnnnnnnnnnnnnnnnnnnnnnnnnnnnnnnnnnnnnggagggagggaaggcaggaaggaaggaaggaaggaaggaaggaaggaaggaagaaagaaagaaagaaagaaagaaagaaagaaagaaagaaagaaagaaagaaagaaagaaagaaagaaagaaatcaagtaaggcagatagagttcaaaataaggcttcaatctccatagagaaaataaactagtaacaaaacctagatagtagctcagcaatgatgtggtgcaaagcacagtaagagttcaaaccctcctgaagttttataggtggtggggagtccacctccgactctccaggtctagagcaacaagaaagattcaagacccacaaccagggatggcaggaaggaaagggttttctaacaatgtcctacaagtttgcttagaatgagctttagaattgaatgcccctaatctggaaatgaagatgttcagtgcataggctgcatctgagtctggtggggaaggaaacttcatatcatgcttctactttatgtcaaccattttataagcaaacaatattaattgcattgttatcttgggtatggtgaagtccccaaaggactgtattcattatttgtcattataatagttgatattaattcattatagacttttatacactttcattaatgttatgtcattgaaaatgcaataaaattgtaatgctatcttactggtctattcttgaattgctttgtcaacaccattgcaaaaccaatgaaaaggtagtaacggtgtaagattaagtgtagtttaataaataggtttcagctttacagactaacaatacaaaaaaaaaaaaaacctcaatcaaatttgcccttgactttataatgtttcaacaggttctcagaaatgtttgtaaaagcttttcaatttcctgttaacttatattcaatagttcacattaatgtcagctcaatcacatgactaaaataattcctttcagctcttgaaataaagagcaaattgcagctcatccagggccttacaacagagtagttcacaggagacacatgaggacacaaattacaggaattctttagaaatctttaaaacatcctttgtcaaatccatttggagaaaaaccctggtgacagcattatagtactgtttttagtgttccccttgccagaaaaatgtatgctcagtgatgctcttgaaaccattctattgtctctactcagtgttgagcgttgagaagattcacatctgcaaatgaataattgctacataccaggagccttcacggcctatctcatcattaactgcatctcatctatgattagaggtgactgtgcctgcttttcaataaattagccagaatcagaaaatgccatgcaggtgtccctgcgcctgcttattttctctcgtgtgcagaggctcatgaagaatgcagtgtgcctacttaaaatgcttggtctgatactgtgacctggcttggcatatttgctgacaggattttcatcttccctgaacagaaatgtttttctaaaaaatcactctgccgtgtgagaatatagactgctgggtcattctgcgggacagacactcaagagccctcttagcctcagtcaggacacagatctgaatctatttttgtaataacacacagagtctcttctttgaaaaaaaaatcatacaaattcaggtggatccatttatcatcttttcattgaagttaagtccagtaactccttcattatagtctatcatgtttgaattggtgcttcatagtcatttttctgctgctgtgctatttcaacagcatttctcctgtagcaacataacatggagagtggaaatataaatatgaacacacagacatctatggcttgaggatgtggacttctcagtgtgaatgctgtttctatatcttcctacccatgtcttatcactataatacttggtgttatacatgtgcctctctcaccctgggctcagattctctacctgtgaaatggcatagtaggaatactgcctgccttgtaggactgtggcaggctgttatatctatctggtgcctgcccattgtaacagctctcttcctgagtactttctgaagggtcataatggctgacagacagagagtgtaaagatctcaaaagaagtagcatgtaagcatggattagaatatttcattcaccagtaggataaaagcaggagtatccagcaaactagagcatacgcagctagcatgagcagaggtctgtgtgtaagtgatacctgctcaggtcagcacagggtgcagggctgctgctagcataggtcaagagcagacggcatcacagcaatgcccaaaacaatgtgatccactctaggtttacaaaaaataactctgatacatcctagagaatgaaatacatgaaggaaactgaaaatgggaagtcttctatgaaaccattcacatagcctaaacagggccgtggtagtgaaaggggggaggtgaggacagagttgacagggacttggaggcaacatgaaaggctcttgctgacaaactggacacaggagcatttgaaggaagtggggatgactccgtatccagaactgagaaagaaaaacaggaagggaagcaagttggggaggaacgataatgagttgggtgctataaatactaagtctgggtttatctgcaggaagaaaatcaagtcggggggttgaagcacatttctggcattcaggataggctcattcagggtggtagggaaatggaaaagtagagaaatgggaagaaagtagaattaaaaaaagaagaagaaaacaaagaacccttgcatatctgcatggtctagctatttccagaactggatggatgccaatccaaaacaactcttctatactaacaggcttgcccctgtacgagcatgcctatatactcacccctcaccttttctttcttctattaagtatacattaagcattcaatacatgccgagaactgttcaggatttgaaagacacaaacagtgaaaactcctgcctttagagtttctgtctttgtgcaagagacacttgtcaataggcaaacaaccaaataatcacaaaacatatctgctcaggattgaacttgtcaacagcctatcatgggtaggctctgaaggtcttaccattctccaaggtcatagctagatccttagctaagataatggtagctaggggtaggaggctcatgaggtctcacttctctctccctgataatggtcactgggaaagaaaacttattttcagtacttccaccactgatggagaatccataatcttgtacataatctcccttttaaaaaatcacagagagagagagagagaaagagagaaggagagagagagagagagagagagagagagagagagagagagagagagagagagggagggagagagagagagacccatgaacctagaatggagactagatggaggaagaagagaatcttttgggggtgggaagataggttaaggggagtgagtatgacttttaaaatacaatatgaagtatataaaattataattaaatctattgttatatataactaatacatgtaaataaaaacacaaaatataatttcagtaagttaatccaaggaggagagggaagcagattaacagagcacagatggaagagagaggaaagagtatttatttaaaatcaggcagtagcggtgagggaaggcattacttactttttacatgaagaaatactgttatggagcaagtcatgtgaaaatctagagaaagagcatttgagggacagggaagagaaagtatgaagactgatatagaaattaacttgatatgattcagaatcaccatgaccctgcctggcttcaatgggctgaatggctacaggttatatcctatgctatttctttactttcctgtattgttaattaaaagcattgaattcttgtattgttaactaaaggcacagacttatagcctttcttctgaattctgtgtaagttgaattcttaataacggacaggtctatatatttaaagttaggaaagcacaatgcctagtatgtgggtaattgttctttctccattcttgtatctataaatgtgagttaggatagttcctaatcctttcacatcctcagataccccagagctattcccagatgttgcttcccatctggtgaacaaatgcgaagctatttctattcctgctacggcaggtcagaagccaaacctatacgtagagcaaatagaaaggccaaatgctaagactcacttgctgcttgcaaacctgatggttttacttcgacttgaatactagggactgaaatgcaaagcaatcctgcacaggctctgagaagctgtttgctttgccacagttctacacttaaacattataataataatattattattatctcacaggggtgtcatgaggattaatgagacattatcaaatcactttgagctactcccctgggggtactaaataaatggtatgtgtccccctgaagtgccacttttgacattgatttgttgcaactggttctgctgtccaacagggctggaacgctcccaccagcccgtttcctataggcgaacaagtagccatcaaaaggcactggttttcagttcaaataaatatgaattgaaagagaacagtcagcaatcagaggcaaataggctgctctttgaaatccagtatttatcaagtgctcacggtgatcagcatgagtgtttcccagtgtaatataatactgcaaacactagatttgggaccgatccaagattttaggaccagccctgtcactaaccagctatgtgagctaaactgctaaacttctctagatctcaattctaagataagggctgtcctaataaggccatcaaggtcttccagacaaagcaaatggatgaaagcagtgagaataggcattctgaaagagagatactttacagcagggagaaacgtgtgaccatccatcacgggaccatcctctgctctcatctcctttgcctttgattaatattaatttcagtattaattcctgcaaaagtaagaataaatcatctccccagtcagacatagaagtgcaagaaacagtctttaaaaatagggtctttgcctctcagtgagctctccttgtgacactccgtctttcccaatcttagatttacaaaaataaatatgtaaatattcatcaactgttcccctaatcactggttaaaataagaagctgaccattgcacaacagattgctctgaaactgtgtatttaagagggatttaaatggtttcccagtttcttcatctgacaatagactccactctctgcagtgcccagcactcagatggttgtaaagcgaaacatgaaggaatgataaaacaaaaacaaacaaacaaacaaacaaacaaacgaaaacctggtgcttgttacacccccaaatgctgctctagaaacttgtagggtgattggactgctggctcagctctccctcgctccccagcccaggaatcacaatagggtcctgaactcaaaagaagaaatatctccccagagcagacagaaataaatacaaagcatcacttgttgcagaattcagtacaacaaacaaatgctgagatcccaggatttccaagttgctaacaacagaagttgggcaagccctctttatcatagtttagtagttgggagagggggtaagaaaaacatgacgacagatcactcttacatcaaactgaattttcagctaacttcatggaatgagtgaatgtctagacaatagttcctcttttgcaaacgattgcaatgattcaagggggtaacagaattttgtaactctggtacttatacttggggtagctaaatgtctgggaacagaaattatgtttaaagcaaccagcacaatttagagaaacagtttaagggagataatattttctgtaggcccatatcaagcaagagaggcacaatctgcaaaatgaaggctttcccacattaacagctaaaatacactttctcgagttccctactgcaagggcaggtatcattgtgttaattaaacgctaggtattgggcctgttcgtcacacagtaaggtgtggtgaattttctttaccattccctcttatttttttccactgccctcactaatcccaaccagaaacttgcccctgattctgcccgcactgagctaaccattataaaaatgaggtctccagatgcctttaaggaccctctttttagactgctgggaagacttgagaccccatgttacccattaacccattgcttcctgtccaaaaatatcgtttactgcaccaacacccaggttttagcattattctacccctctaaatccggatgctggccccagactatcctatcctgcactagcccagacaacctagcctgcagcccctcctcccaagacattcagggtctggatgcctggatgcctcctttgcttgggactttttgttacctactctagtggaacttgcccttcttggcaaagtgtcaagggccaggaggcctcccttcgagggatgaggtgtggtccttgcgtgggtataacagccctgagattaggtctcgaccacgcgcgggaagggaacgcgcgctgaccaggagcgagcaagcagagcccaggaacgaggtcaggcggccgggttcctccaaggccagcgtggctgggtaggggttccgcggagtctggggagtggggtgcaagttggcggcgatccagtgacaaagaaggtcgaggaacaagggtggcaagcgggaagcggagcgcgcgcgcgcggtgggcgggaaacccgggggcggtggcagagaggcgggcgcgcgccccgcggggaggggtgcggaggagggaggaggaggcgtctggaccgtgcagccccgcgggccgcgccagcccagacagagcctcgcggcagccgcagcaacaggcggcggggccgggctcgtagggcagaggcggcggtggggcggggagctccaggaggagcgactcgggccggcagccgccagcagggaaggaaagcaccgccgcctcccgcgctcgaccgccgcagccctccacccatcaccgcgcccaccctgcaccggaccccgcaggaggcggcgcgcgcatcctgcagagccccggccacgccgagctgccgccagacatgaccgtggtgcccggggaccacctgctggagccagaggcggcgggaggcggtggcggggacccgcctcagggaggctgtggcagtggcggcggcggtggcggctgcgaccgctacgagccactgccacccgcgctgcccgccgcgggcgagcaagattgctgcggcgagcgtgtggtcatcaacatctccgggctgcgcttcgagacgcagctcaagaccctctgccagttccccgagacactgctgggcgaccccaagcggcgcatgcggtactttgacccactccgcaatgagtacttcttcgaccgcaaccgacccagcttcgacgccatcctctactactaccagtccgggggccgcattcgccggccggtcaacgtgcccatcgacatcttctccgaggagatccgcttttaccagctgggtgaggaggccatggaaaagttccgtgaggatgagggcttcctgcgggaggaggagcgacccctgccccgccgtgacttccagcgccaggtgtggctgctcttcgaatatccggagagctccgggccggcccggggcattgccattgtgtcagtgctggtcattctcatctccattgtcatcttctgcttggagacgcttcccgagtttcgcgatgagaaagactatcccgcctccccgtcgcaggacgtgtttgaggctgccaacaacagcacgtcgggggccccttctggagcctccagcttctcggaccccttcttcgtggtggagaccttgtgcatcatctggttctcctttgagcttctggtgcggttctttgcttgccccagtaaagccaccttctccagaaatatcatgaacttgatagacattgtggccatcattccttattttatcactctgggcactgagctggctgaacgacaaggtaatgggcagcaggccatgtcgctggccatcctaagagtcatccgcctagtaagggttttccgcatcttcaagctctcccgccattctaaggggctgcagatcctaggacagacgctgaaggcttccatgcgggagctggggctgctcatattcttcctcttcattggggtcatccttttctccagtgcagtctactttgctgaggcagacgacccttcttcgggttttaacagtatcccggatgccttctggtgggcagtagtaaccatgacaactgttggttatggtgatatgcacccagtgaccataggaggcaagattgtgggctctctttgtgccatcgcaggtgtcttgaccattgcattgccagttcctgtgattgtttccaacttcaactacttctaccaccgggagacagaaggggaagagcaagcccagtacatgcacgtgggcagttgccagcacctctcctcttcagccgaggagctccgaaaagcccggagtaactccactctgagtaagtcggagtatatggtgatcgaagaggggggtatgaaccacagcgccttcccgcagacccccttcaaaacgggcaactccacagccacttgcaccacgaacaataaccccaactcctgtgtcaacatcaagaagatattcactgatgtctaatatatgatacggttgccaattctgtgcccagtattgtgtggaacatgcccccttggtctgtgtatgcccttgatttatacatttccagaccactcatcaaggaaagtacaagaagtgaggaagcacacttcattctccctattgcttcatactgaaacaggtgcctgtttttgcaagtgggctgcattctctcagctctttttttctctctctccctgtctcttaattttgtgaccaacaaacttacattaagcgtggttttttgtgtgagccctacagccacatcctgagaggaagtgaaactatagagtcagagtaactgtttaacctcaaaatcaaaagatagttgtttctttactaagtaaaggaggcggaacctaaatgaagctcctgactggtggacttttcaatattatttccggactagttattgtaactacctaacctctggatatgtgggtggaaagtctaactagagcgttgacgcgtaagcccactataaatttattttgtttttgactgatctttcagtttgaatctctcccctaaggacttaaggttcacaataattttgaaccaaaagggaaatgccccgaatgtcctgatctggctattaactcttcaaagtttgcaaagcattttgaaaacattagacacagattccaatgaagttgtgagttcatgccccagccaatatctacgaaagtctagaaactcattttcagtgctgccgggagaaacaacagaaattcctgatgcatccgagagataagcttctgcagtatcacaggaagattaaagtgtcagacaccccttccagcggaagttactaattcggacctgactgatgcagttcccatagcaacccgtgtttcctgggaaacccgaaaaaggttgtcatggcatcttttgctctctagccccacccccaccccaggccctgccgtttctacagtaacctttccagatggttcctacttacatgatttcataagaaaaaaacactatttgaataaaccacacaaattaagtgtaagactatatagaggttaaatgaatcacaaaatgcttttttacattttatataaatcattgctgttatcccataatgactggatcaaaaaggaaattatcatctttggaacgttacacgtaaggcatgatctgaattaaatgtcagttgtttggtagcaatttttaaagatggttctgtacagttttcattaagaaatggcaagccaacagataaaatgagaacaacaatataaacatggtctgtacataagccagtgagagtcagtgtacccaaagtattactacaagataccttcagagttcctcaatttaaaagaaaaaaaagaaaaagaaaaacatccagatcccacaacaggactgtcaccatcacagcactggaaaagcagaatcaacctcaaacatatggaggatgcacaatttaatgagtggattacaaaaaggaggttcaggaaatgatcagacttgaaagaacacctgcaagttacagccacatgctgagagctgccagcagacagacagaatcaggtgagccctgtcctatgtgatccctacaagtagtctattgtgcagggaaccagggacatttctgttcataactaggtttatatttgcaaagcagacagttttatattacatgccagttgcctttagaaagattaagaaattcttcccattttccccatgtttctggttatcttttggtttccatgtttatggcaaagggatgcagaaaattcccctctgagcagctttctcccaagctgaactgaaaagtactccattgctttaaccaaccctcttggcttctgaacaatttgtttccccctttaaactgaataaaaggcaaatgctacaactgctaggttagtagcccagtttaatttacataattacttattatctgtggtatcattcttgaaacaaatgcttaaaattgaaatatgattagcattttatttcaacagtctttttgccttatgtgtgttatgtgaattgtacacaactgcttttgggatttaatgacacataagtagtctgtccctctagagtacatgacataaaatcatttcaggtaaactttcataaccctacctaatatatagtgggaagtattaatggaaactataacaagaaagataaagggaatacacaaaaaatagaggcattaatttatgtttacctggcttctgtttgttctttgtgtcgaaataggatttttacctactttcctttgcttgtatgacctttgaacattaatctacattttgatgtaacagttgatattcttggtagaaagacgtttctttcatggcccattttgatgttaaacacatagcaatctcgtaaaagaccttaacataaaggtaacaattttattcccactttgaaatgtagacaccttgattaattcaataaataagtaaagttagaccatttttttatgcttcttaaataagaggagtttgaaggagaccttttgttttcttaaccagagaaatagcccaggttctgagtcagagctttcaggtgatgtaactgtttccagtcgccatattggaaactccttaaaggttataggttctgtgttttgatttaggcgtggtggatgttttaggtacagaaagcggtaccttgtgtcaggtgaatgctgccatcttacattagtatttgcaggcttttactgaagtggctgaaagaggctgttctgctgtcatacagcaagatttggctctggtatctgctgaatgaccttgagaacattacataacttctctgttccttagggttttttttttttttttgtagtataaaataataagtagtactccatgcacttgttgtattaaataagttcatgatatacatcaaattaagagattacactattttgtaattaattatacaagaaatcagtaatgttttcctatttcctttctgtgataacacaattaccatttattaaggagcaacaatgtcctgaacccttgtcagttctgtaaggtaggtaccattaactttattttaaggaggatgaaagctagatgacagaagttaaaatgactccctatgacttcaagctagcgaaatacccagccacaactaaaagttaggtcattatgaatctaaaaccatgctacttttattgggtatcttgaaagataaaattaatcccttatgcttttacatttaacttcagtccatattactaaccaaagtgtagaaacctattctcttcagcacactgaaaattaaccctttcttaataataagctgtgtataaccaggaaactcaaagctaagttatttaccagagattgacttccctgataaccaaagattcttttctcacataattgatgtgtctggatttaaccttagaaagcataatcagtcatattagggatgcctaccaggataaggggatttctctgtttttatattaatttcctggttgtatgtgttttaattggccatgtgataaaaagcattatgtaaattgttaggcttttcatttcctgtactctgcttaggttactaaggaaccatgccagaaatcaatgtaaacattttaatttctgcacaaaagtaagaattgcttgcaacaggatagaaagcagaaaattctcaggtcattggaacttgtggcactagtggctcacctagtcactccatttgtcattaggagacagatcaaaaaccattaggacataattttgtcatgtgtactggcagtagccccttcaccaagatcctaaatcttttataacatgacagtggatagtgacttgggcttagaataaagtgctaatgaatctacatttgccagtaaccattagctttgccagcgacaggctgttgaacatagctgaacatcttgagtgttgaaatgagattcttgtgagttctgtggctggatgaacacagctcatcagcacccttgagaggttgtctgtgccccacagccagtgatccagagaaaaccatggaagtcaatgcttgctattcctttttctatgtggtgttttaaactcatatcatgccaaattcaaatatggcaacaaaaccatagacacctacatggaaaagaaagtgttatttcttagcctctaaacagaattgatgaatacgcactgaaaaagaaatttaaggttgtggtttatacaaaacttatttacatgtttgtcatataacacagcatataactacagcacatatgacatacatggcatatgtacagcacatatatgcaaagagcttactcctttaagagccatagctatattttctaaacatttaaattttcaacattctctgcagcagtttcaagccctttccacctctcagctgtgaatagaagtgataacccctccaactaagaaatgcagagaggcatatcccctccccccccccacctgtctgaagacttatggaaacactgagatagaggtgagaagttctagacctggaagaagctatttagggatagcgtctcatggtgggacttttttcttttcccctttctgtttggtaatgctccctttcaactaaggaagatagaattactggtttgtaggatttcctatgttttgctgaggcaggtaagtgtgtgtgtgtgtgtgtgtgtgtgtgtgtgtgtgtgtgtgtgtgtgtgttcagttcagttacatttgtttttatacaccttctgtgagtgtatttatctttgaagaaagataaatcagagagagttttttttcttaaaacaaaaaaaaaaaaggaagggaaagctatatacaaagtctaaaccctttttaacagatttttcacatcttggccagggttatgtggcatttgataatagtattcatcatatcctcattctcaaattgcaaatacagtctcatgatttcaacttgttagaaggtttacagctgtttgtcttggtttttaatgatactgtggtctaattttgtcttccaaactgctaagaaaatacatttacaaaggagtgctttcatgttcaccctccctcttcttccttcttcttctctttacctctccatgcatctccatcagatgcattctccttgcacttcagaacttgtatcatcagccatcatttgcatttcaagggagacctggaaaagaggttccagcatttccttgagttccatattgttatcataatgtaagaggataggaactgtgcactgaaaaacactgagggttctgctcattagtaatatagcattccagtaagccacaaatggtgtttcatcatatccagagaatgttcggacacggcagacagtggggtctcgccttcatttatggaagattcacagaagtagaacaagaatttctttttccaaaaagcctctaagctgaaactgtcacaatacaaagactcttggaatttctgttgagatccccacaaaccttttactaagaaagttctcgtcaaacccatcattgtccctcccctggatttttattgacagtcctgattagcaacccagctttcttttccttgactctgttcttagcatggaaccctcagtaaaccttctttcttttcttttcttttttggttttttggtttgtttgtttgtttgttttgttttgttttttggttggttggttggtttttttgagacagggtttctctgtgtggtcctgactgtcctgtaagtcactgtaggccaggctggccttgaattcaggatctgcctgcctcccaaaggctaggattaaaggcttgtgccaccactaccctgccattttatttattcttctctcatacaataaatcctgactatagcctaccctccctccactccttccaaacaccctcacatctcatctctccccagatccactgttcttccatttcccttaagaaaaaaagcagatctcccacagaaacactgcatggcaagatgcactaagactaggcaccttccctcatatcaagactggacgagttaacccactaggaggaaaagtgtctcaagagcaggcaaaagagtcagagagaactccattcccatagttataagtcccacaaaaccccaagctaaacgaccacaatatatatgcagaggaccagcaccaacccatgcagggtccataactattgctttgatctctgtgagcacctgtgagccctgcttagttgattccgtgggccctgttttcctggttcctcaacccctctggctcctacatctacccttttttctgaggttcctgcttttgttttttggctttgttggtttggtttggtttttcactttggttggttggttggttggatggatggatgggaaggcttccagttagtataacatacttcagattcttataaggaacaacactatgaactaaccagtacccccagagctccctgggactaaaccactagtcaaagaaaacacatggtgggactcatgtctctagctgcatatgtagcaggggatggcctagtcggtcatcaatggggggacaggcccttggtcttgtgaagattctatgccccagtataggggaatgccagggccaggaagcagaagtgagtgagttagggagcagggggatgggagaggggataggggattttcggggaggaaactaggaaaggggataacatttgaaatgtaaatgaagacaatatctaataaaaataatattttaaaaaatccataaaaaagaaataaagaaattctacccaattgtaaagatggattcccttaatataaataacttaagtatggatatcatcaagggtgcttagaacttagaatgcttcccagagaccatggttcctacatagtagctaatagagtacttgttataaatattactcctcatacatgtttgcatagacgtaatggcccaagtagtacagaaaatcccaaagaacaaatgattccccagaggacttcatctttttattaagcaaagatagtgccatgatttcagatgcattctcttttgcaggaagtggaattctccttatttgaatagaaatacttctctataccccctttgaattttctctgttctcttggtttcccaagcaaaccagaccagtgcatgacctggatgtctcctctgcatatccaggtagtgccattttctcactaagtgtgtcagcaaattaaaatcaacatatgtgtttggatttacgtatgtagaccagcagaatgtgaaaactccttttagcagcttgacaaataagcctacatgaggtaaaatactctattctgacaatattgtcagtcttcttaaagaaataacagaaaacaaaaaaaaaatagaaatgaatactttttattttttcatgcttttaatttttttaattgtgtatgtatttttaggtaggtgggtgtgtcccacaataccagtgtgaaggtcacaagacagttaactttcaggagttggttctctttttctgccatatgagttgtaggaatcaaactcctgtcattgagcttggtggcaagtgtcttcacccactgatctatcttgctagtagccatctgtcagatttctaaatggccacgttgactgggtagataaatctaaagacaaactatttctcccagaaaaactgtattttaattgctttatttctagattatatagatcttttagctgcaagtatttttactgatttgaacagaacagtttactgtgctatgtaaaatttagatattttacttacaggcttagatctgtgaattttagatatgtattagtagtggacttaaatattcctgatatttctcaaagtcaagttagatttcacaggctcattttccaatgattttccagggctttttgacgatgttcatatcattcatattgctaactttaagaactgtttgcttaaacctttggttccttgtcaagagttcataacttccaagacctcaatcaggtaactgtaaaaaataaagcactaaaatgtcctagtctttggacttagtattatttagctggtagaactttagaacttactggaaatgtagccaattttaagtcctttaatagatgttaaaatacagacacattgtgagaacagagaaaaatctacattttttttagaatgacgttggccctctcatcagacacacattgttccataaactgagtatatttctttcatttagtgagagttatgagttgcttctttgcagatgaataattattaaactttgaccatctttgttgcccttttgagtaggtgtttttagttataggccatcattttctacaatatctcctgtacctttttatataaatgattttgatatttaatgattgtatttttcttttcaacccacttcttatccactaacataagcatccttattactatccagatatcacctgttgttgttgttgttcctatagaattacaacttttccacttttataacctattaggttgttgtatggtgtgcgtgtgtgtgtgtgtgtgtgtgtgtgcatattggtagatatgtgcttgtgtgggtgcatgtgtgcaggtgcatgtacacatgtgtgcatatacatataaagaccagaggttaatcttcagtgttatttctcaggagttatccaccttgttgtgttagataggatctctcagtggcccaaggcttaccaagcgactagactggctagacaatcaactgcagggtctccacttgtctctacctccccaggatgagtttacaagcacacatcatcacatccaggccttaagtggatcctggtgatcaaccataggtcctcatgcttgcacagcaaatgctttaccaactgagccattcactcagcctccatgccatattattcttattcagtaatctcaaagaccttgacaggaagttataaaagttaggtcctggttcttcctcccagccccatgctcccagaaataagactcagactcaaaatagatttacaaataccttggccatatagatagactctactctgactagatcataacttatataacccaatactttaacctacattttgccacgtgactgattagctgtccatgcatcaggtaccatgcatccatctcatcgcatctctcaggagactctcccctgactggctctatcccagaattctttctgcttcccggatgtgccacctatttcctgcctaagccataggccataggctttttaattgataagtgatgcatccatacaatacacaaggtattctctctgcaagaagttatggatgcaagaagttatggatatgtaagttctaaaacacaaagcccagtcacttttactaaaggttataacagtaccagagcaagtagagctgactagaaccatctgaagcaagacaaacaggcttcaggagcaccaagaaaaaagtaggtacttagattctaaaatagaggccaaatcattcctgttattagtattttcttcctaatgacaataattagatcattggagatttcatattttcaaaataaaaactaagcatattttgaatatactcctactttttattcaagaaaaatactgtaaagaaagtatgtctttggtcagtatgaccaagtgtaatccataccaagaagaaaaaatgtttctgcagattacccagcttgcagtaggcttcattttgcagcttcatgagtgaacaattctccctccagaaacatgatgaaattccagttcttcatctttggatatttgctcaaggtttagggacatctgctaaggccagcagtggatttgagaaaccatcttctctatgaatctgatagataatgttcacacattcaacctaggtttagcagtctttgtttgtgtccttgtgagtttcctttgtatttcagactaagcaaatgttttgatgacataaccaattttaatgtatcctttgtgtattcactcaacatacatatagtgaatacccaacagtgtgtcaaacactgcttaaaaagcagtaggaactg

SEQ ID NO: 92 - DNA, 1587 bp, Mus musculus
atgaccgtggtgcccggggaccacctgctggagccagaggcggcgggaggcggtggcggggacccgcctcagggaggctgtggcagtggcggcggcggtggcggctgcgaccgctacgagccactgccacccgcgctgcccgccgcgggcgagcaagattgctgcggcgagcgtgtggtcatcaacatctccgggctgcgcttcgagacgcagctcaagaccctctgccagttccccgagacactgctgggcgaccccaagcggcgcatgcggtactttgacccactccgcaatgagtacttcttcgaccgcaaccgacccagcttcgacgccatcctctactactaccagtccgggggccgcattcgccggccggtcaacgtgcccatcgacatcttctccgaggagatccgcttttaccagctgggtgaggaggccatggaaaagttccgtgaggatgagggcttcctgcgggaggaggagcgacccctgccccgccgtgacttccagcgccaggtgtggctgctcttcgaatatccggagagctccgggccggcccggggcattgccattgtgtcagtgctggtcattctcatctccattgtcatcttctgcttggagacgcttcccgagtttcgcgatgagaaagactatcccgcctccccgtcgcaggacgtgtttgaggctgccaacaacagcacgtcgggggccccttctggagcctccagcttctcggaccccttcttcgtggtggagaccttgtgcatcatctggttctcctttgagcttctggtgcggttctttgcttgccccagtaaagccaccttctccagaaatatcatgaacttgatagacattgtggccatcattccttattttatcactctgggcactgagctggctgaacgacaaggtaatgggcagcaggccatgtcgctggccatcctaagagtcatccgcctagtaagggttttccgcatcttcaagctctcccgccattctaaggggctgcagatcctaggacagacgctgaaggcttccatgcgggagctggggctgctcatattcttcctcttcattggggtcatccttttctccagtgcagtctactttgctgaggcagacgacccttcttcgggttttaacagtatcccggatgccttctggtgggcagtagtaaccatgacaactgttggttatggtgatatgcacccagtgaccataggaggcaagattgtgggctctctttgtgccatcgcaggtgtcttgaccattgcattgccagttcctgtgattgtttccaacttcaactacttctaccaccgggagacagaaggggaagagcaagcccagtacatgcacgtgggcagttgccagcacctctcctcttcagccgaggagctccgaaaagcccggagtaactccactctgagtaagtcggagtatatggtgatcgaagaggggggtatgaaccacagcgccttcccgcagacccccttcaaaacgggcaactccacagccacttgcaccacgaacaataaccccaactcctgtgtcaacatcaagaagatattcactgatgtctaa

SEQ ID NO: 93 - protein, 524 aa, Mus musculus
MTVVPGDHLLEPEAAGGGGGDPPQGGCGSGGGGGGCDRYEPLPPALPAAGEQDCCGERVVINISGLRFETQLKTLCQFPETLLGDPKRRMRYFDPLRNEYFFDRNRPSFDAILYYYQSGGRIRRPVNVPIDIFSEEIRFYQLGEEAMEKFREDEGFLREEERPLPRRDFQRQVWLLFEYPESSGPRIAIVSVLVILISIVIFCLETLPEFRDEKDYPDSQDVFEAANNSTSGAPSGASSFSDPFFVVETLCIIWFSFELLVRFFACPSKATFSRNIMNLIDIVAIIPYFITLGTELAERQGNGQQAMSLAILRVIRLVRVFRIFKLSRHSKGLQILGQTLKASMRELGLLIFFLFIGVILFSSAVYFAEADDPSSGFNSIPDAFWWAVVTMTTVGYGDMHPVTIGGKIVGSLCAIAGVLTIALPVPVIVSNFNYFYHRETEGEEQAQYMHVGSCQHLSSSAEELRKARSNSTLSKSEYMVIEEGGMNHSAFPQTPFKTGNSTATCTTNNNPNSCVNIKKIFTDV

SEQ ID NO: 94 - DNA, 23055 bp, Homo sapiens
ttgtcctgtgtatctacactgtatatgctatccactccagtcacttagcccatgagtcacttagtagccacttggttatcaggtctactgttgtggtatcacagtgcttgcgttcgagttaacacttattttacttaatagtagcctcaaagagcaagagtagtgttgctggaaatttggatatgccaaagagaagctatgaagtgtttcctttaaaagtcaaaaggtgaaagtcctcaacttaataaggaaaaaacatcttatactgagtaagaacaaaccttctgtctgtgaaattgtgaagagggaaaaagaaatttgtactagttttgctgtcatacctcaaactgcaaaagttatagccacagtgcatgacaagtgcttagttaagatggaaaggcattaaatttgtgggtggaagacatgaacggaaacatgttatgattgacagcaattatattcagtactatcagtggtttcagacacccactgggggtcttagaacatactacccatggataaaaggcagaggactataatttgattccaaggctagaacccttctagtacactacagcacatctttacattagcttgttctgaataacataatggataaacatgctcatactgtaagctttacctgaaagctaatcttcaacataaaagcatttggcagaaagttctgttcacatgcatgttaaggctggcatgctacaggtggattcctaagtttgatgggggtgggaaatcaagacaatttatccttacaactgatatatatctccatttgttcattatataattcacttaaatgactatataaacaatgaacctcagtgtaagttggtttagtgtttctaactgtgcatgccaatatacataactcagtcatgaggcatgctaggacttcaataggttgggaatggtgagatttcatgctaggagaataaattcagctttaggacaggtccccaagaagggtggccagcttctcaaattataaaatcctagagggaaggataaaattcggatgcaagttgggaaagcctcatcactcataaggtccaaaccagtggaggatgcaagccacagaatggccatggcaatggcaatactggtaatcaggtgggtggtggaagctgtgtagctccaagagattcacctggcataaataaggactccagcccatggcaaggttcagcctttgaggagcctactaagggctaaaaagaaaaatggaatctcaaacaagacagttgaggtttcaggatagggcttcagtatcaacggagaaactaaagagaacagtaacaagctaagacagagtatgtttctattgtcatgcaaaagatggtgaaacctcagaaccaggatgaacgtttataggcaataaggggcccacttcagacacactgagcttagagcagcaagaaagattctagatcttccaccagggattgaggtaaagatcagattttctgatatatttccataagtttgtttaaaattggctctagaattaaattgtcctgagcctataaatgaaagctttcaatacttgcagctgtgcctgggtcaggcaaggacggatgtatcataacatgttgaattttatttgcatccattttataaccaagtaatgtatccattgcatcatatctcaggtatgatgaaatccccaaagaattctattcatattcttttgttattataatactcagtgttaactggatcattatgggccttcatatactttcattaacattattacaattgtaatgaaaactcaataaaagtgtaatgctattctacagacatgttcttgaattgctttatcaacataattacaaaacctaatgacaaagtaataacactgtaatatgatgcctgcaataataagttttgggtttcaccagatggtaatacaaaaacctcaatcaaaatgtatccttgaccttacagcgtttcaataatttcccataggtgtttgcttacaatgtcaatttatgttcaacagttcacattaatgtcaactcaatcatataactgaaataatccattttagttcttgaaattaattttattgtgacttaccacagtctcacaacaaagtacctcacagaaggaacatgaggaaataaattaattttcaagatatttttaaacattcttagccaaatccactttgagaaaaatcatagtgaaagtattacttgtagtgtacatcttgctaaaagagaggtaatatgtttgctagtactctaaagccattcaattgtttctacaaatgttgagaagattcccatctgcaaataaataactggcatacatgggctttaaggcttatctcatcattaactgtatgtcttatctatgattagaggtgtgactgtgcctgctttttcaataaattaactacaacccgaaaaggctatgcaagtggctcagtgtctgattgctgtctcttacatatagaggctcaagggcttatattaatgcccagtcacacaatacttttaactctttggttggcatacttgctgaaaagagttccaatcttccctgactaaaaatgtttttctttttcttttattttattttagagacagagtttcgctctgtcacccaggctgaagtgcagtggctcaatctcagctcactgcaacctctacctcccaggttcaagtgattctcctgcctcagcctctggagtagctgggattataggcacgcaccaccacgcccagctaattttttgtatttttcatggatacaggacttccctatgttggccaggctggtctcaaactcctgtcctcaagtgatctgcctgccttggcttcccaaagttctgggattacaggcatgagccaatgcgctcggcttagaaatgtttttctcaaaatcactctgccatgtgagaacaaggacttagactgctgggtctttctgaggatacggcaacactggagagccatgttagtcccagtcaggacctatatctgcatctacttctggaataactttctctttataccttgcatctttcttacttcttaaaaaaaatggtacagattcaggaaagcccatgtatagcccttgcattgaggaacacgactaattctttcatcatggtctatcagttttttagcaaatagctagtatgcttcgtaatcatttttcttctgttatactatatgaaaagcatttatcatatagcaacacaataccagagactggaaatacaaagatgaataagataaggcctctaatcaccacagaggtagcctacagtagggcttaaggatgtgaacttcttggtttgaatcctagttctaccattttctagttatataaccttgcacaagtgaattcaccaccctgcattcagtttctttatctgtgaaatattactactgctattacagtagtaatattatctgccttacagggctgttggaggttactgcatataaagtggttagcaccatgcctgacttagcatagtgtattcactgctcaatatgttagctattagtattatggagttcacattctcatagggagacagatcatatcaaacacacctaaatatagtacaataaagccctctaatggggctttaaacaaaataccgtaagagctctgatgagaaagagtatcactgaattcatttatcagttacatggaatcttctttgaagtggtaattatgactgacaagaaggtggggctcttaaaagaagtggtccctaagctgggacttgaagattgaattcaccagtggaaaaaggtgaaaggagtatccagcaagctagagcataagcagctagcatgagcaatggctcagcagtgtgtaagtggatgacctgtccaaggaccagcaagtagtgtggagatgcggccagaatgacaggtcagagccagggtttggccatcatggcagcagtggagagcaatgtgatccaacctatgttttacaaaaataactcagctatatcctggaggataaaacacataaaagagagactgcaagcagggagcctgttatgaaactgtcatggcagcctgaactgggacagtggcagtgagaatggagaggtatggacagaattgagaagggcttggagggggaatggaaagcacttagtgactgaatagatgtgagagcagaggaaggatgcagggatgactccgtattctagcacaaaaaaaaaaaaaaaaaaaaaaaacaggaagagaagcaagtttgggggagaagataatgaggtcagtgttataaatattaagtttggggaacttcaggaagaatatcaagtgggggagtttaaagtataattctggagtgcaggacagaccccttcaggatggtgggaagggaaggtgaaaaaaaaagggaagaagtggcacttaaaaaacaatccttgtatatatatgtgtatagcctaactggttctatgaaccagaactagacagatacgtcttcaaaataaacactcggcacacacacacacacacacacacacacacacacagagagagtactgtcacatgtctgtatgttcattctgtaccttttctttcttccattaagcatctacgatgtgcctggtactcttccagatctggagcatacagaagtcaaaaagcccaaaccctgccttcaaggagtttattttttagtgcaggagacagacaataagaaagtaacaaaataaatataaaatataatgtcaagtaaataaacgaaatgaagaaaaataaaggaggtaagagactagagagttaccaaacggaggcggggaaggattgctatttgaattagtgtggttgtggtcagggaaggcaacttccctgaagctgacagttttaatggagacctaaagtgatggagagagccaaaaaaaaaaaaaaaactggaggaagagtgttgcaggcagagggaagggcaagtatgaagaccctgagagcagaactcatttagtataactgagaaacagccaggcatccagcttggctagaatagacaaaatagtcacaagtaacatttctagtactcttgtcatgtattgttaataaatagcattgtaaaaattttcatggatttatatcctatcttttcaacagcatgtaagcccaatgagggcatgatctatgtttaaacttcatatccccacagtatctagaacaatgctgtgcacatactaggtgctcttttttctattattattatactttaagttctaggatacatgtgcagaacatgcaggttacataggtatacatgtgccatggtggtttgctgcacccatcaacccatcatctacattacatatttctcctaatgctatcccttccctactcccccaccccctgacaggccccagtgtatgatgttcccctccttgtgtccatgtgttctcattgttcaattcctacttatgagtgagaacatgtggtgtttggttttctgtccctgtgttagtttgctgagaatgatggtttccagcatcatccatgtccctgcaaagggcatgaactcatccttttttatggctgcatagtgttccatggtgtatatgtgccacattttctttatccagtctatcattgatgggcatttgggttggttccaaatctttgctatcgtaaatagtgctgcaataaacatacatgtgcatgtgtctttgtagtagaatgatttataatccattgggtatataccctgtaatggtattgctgggtcaaatggtatttctggttctagatccttgaggaatcgccacactgtcgtccacaatggctgaactaatttgcattccatgctcatggataggaagaatcaatatcgtgaaaatggccatactgcccaaagtaatttatagattcaatgctatccccatcaagctacccctgactttcttcacagaattataaaaaactactttaaatttcatatggaaccaaaaaagagcccatatagccaagacaatactaagcaaaagaacaaagctggaggcatcacactacctgacctcaaactatactacaaggctacagtaaccaaaagagcatggtactggtaccaaaacagatatatagaccaatggaacagaacagaacagaggcctcagaaataacaccacacatctacaaccatctgatctttgacaaaccttacaaaaacaagcaataaggaaagactcccctatttaataaatgggaaaactggctagccatatgcagaaaactgaaactggaccccttccttatacagtatacaaaaattaactcaagatggattaaagacttaaacgtaaaacctaaaaccataaaaaccctagaagaaaacctaggcaataccatttaggacataggcatgggcaaagactgcatgagtaaaagcaatgcgaacaaaagccaaaattgacaaatggggcctaattaaactaaagagcttctgcacagcaaaagaaactatcatcagagtgaacagacaacctacagaatgggagaaaatttttgccatctatccatctgacaaagggttaatatccagaatctacaaggaacttaaacaaatttacaagaaaaaaacaatcccatcaaaaagcgggtgaaggatatgaacagacacttctcaaaagaagacatttatgcagccaacaaacatgaaaaaaagctcaccatcactggtcattagagaaatgcaaatcaaaaccacaatgagataccatctcatgccagttagaatggcgatcattaaaaagtcagaaaacaacagatgctggagaggatgtggagaaataggaacgcttttacactgttactaggtgctatttctccattcatttatctgtaattgtggatcaggacctctagccctgccttgtcccactctcaaacacttctgagctaatcctaaatgctgcttaccatctggcaaacaactggtgaactatttctgggattgatgtggtcagtaggaaacacaaactatgcctagagcaacacagaaaggccaaacaccaagatttatttacccttgctgtttgcaaacctgacggttttagtcaggctctagtattgcagactgaaatatgaggaaatcctgcacatgctcagagaagctgttggctttgccacagttctacgcctaaacgttataataatattattattatcccacaggggtgttatgaggattaatgagacattttcaaatcactttgagctactctgttgggggtactaaataaatgctatgttttcctcttgaaatgccatttttggcattgatttgttgtgatgggttcggctgtccaacagggctagaatgagcccaccaactcattttctatagacaacagacgagccgtcagaaggagtggttttcagttaagataaatatgaattgaagtgaactagtcggcaatcagaagcaaataggctgctgttagaaatctagtatattaagtactcacagtgatcaacacaagcgttgcacagtgtgatacagtaaagcaaacactggatttggaaatggtccaagattttaggcccagctctgctgctaactagctatgtgagcttaagcaaattgctaaacttctctgggccccaaatacaaagtaaggactttatatgtgtcctaagaagcacataatcaaagtcttccagacaaggcaaatacatgaaagggaatggaaatagtcacttatgaaggaaagacatttcacagctgggagaagcttgtgaccatttgtcacaggactatcctctgctctggtcttccttgccattgattaatattaatttcagtactaattcctgcaaaagaaggaataaatcattttctaagtcagacatagaagtacatgaaacatctggtctttaaaaatagggtctttgcctttccatgagctatcattgcagcaagcagtctgtctcattctaagatttaaatatatgaatgattgattatactgctactctaatcaccagctcaaaatatatacgcaaaataatgaggtggctgtcacattccagtgttctggagttttgtaagagaaagagttttacgtggttgcccagttttgccattccacaacataagtgactgcctgcattgtctggcactgaccaggaggtgaaacggaagatgaagggacaataaaaggacatgggtgcctgttgtgcccaggagagccggaggtggaaatcctatggaataaatgagcagtgttttctatggtgagctcagtttttcctcactcctcatcctaggaatcacagcagcatcttgggctcaaaaagaagaaatgttgaaactccagagcagatagcaacgcaaagagacactccttggggaattcaatctgacaagtatgtaccaagtctccaccatttacaaggcactttggtagttgctagaaatataagttggctaggacctactctgtgccctagagaaccccatggttgggagtggtggtgggaagtattgaccacaaatcacttacttaaaattgaattgtcagctaactttgggtgggtgaggagctgtctagacaatagttcctcttctgtaaatgatttgaatgatacaataaaaaacagactttttaaagcctagggttgagttatattagattgctaaaatttctggaaacaaattgtgttcaaagtaaccacaataatttggaaaaataagtttaaagaagatacatgtaagttatctctgggcccagatcaagcaagaggtacaagttgcagaatgaatgtccttccagtttaacaactagagcgctgcaaattccctaccacaagggcagtgccaaaatattaagtaaaaagtctaggtacaggtcctgctctcatcccttccacgacaggcttgagtcataaagctggactttctaaccacacaacttcgacttcgtgaatttcctttcccatttttcctcttatttccccgccaacaggaaacctgtgtagtggataaagaccaggctgtcactgctaatcccaatcagaaacttggtccttgattcttcccagtggccgacatctccgctgcgaaaacgggtgtgaactattcactaaagcagcagggcccgaacgcctttaacaatccatttccttcggactccgtttgcgaagcccatcagcacccattactccctttggcttcgcatcctagcagaagctaaattgtttaaacccccgctcctccccagggtttggcggtcctcgaccctcaagggaacctgggatgccggcgccaggcttgcctctggcccagggcgcccgcctggcctgcactccctccctggacactgggcccgcctgccctccccgggctgtacctaggggtgtggaggccagggtgccggcgcccgcggggccgcggcgggagctctcccggcccacgggccgaaaaccctggcgactgggacgcggccaggcgggccgggggcgaggggcgctgaccagaagcgggcggagcctagggcccgggccggcagcctgactccccgtgggccggctctgctgggtgggcattcccgcggggcgccgaggtacaacatgagggctctttcgctgacaccgaggggccttgagggctgcaagaaatgcaggcccggcggctgcccccgagagcgggacgcgcgcccgcgcggtgggcgggaatcctaaggggacgcggaggcgggcgcgcgccccgcaggggagggggcggagagcgcgagaaggagggaggaggcgtccccgtgcgggagcccggctgaccgcgccagacccagacagagcatcgcggctttggctgcaacaggcggtgggctcggctcgggggcggaggcggcgaaagggcggggagcgcgaggaggagcgacctggcctcaccgctgccgcctcttccccgccgcatggacgagcgcctcagccttctgcgctcgccgccgccgccctcagcccgccaccgcgcccaccctcctcagcgcccagcgagcagcggcggtgcccacacgctggtgaaccacggctacgcggagcccgccgcaggccgcgagctgccgcccgacatgaccgtggtgcccggggaccacctgctggagccggaggtggccgatggtggaggggccccgcctcaaggcggctgtggcggcggcggctgcgaccgctacgagccgctgccgccctcactgccggccgcgggcgagcaggactgctgcggggagcgcgtggtcatcaacatctccgggctgcgcttcgagacgcagctgaagaccctttgccagttccccgagacgctgctgggcgaccccaagcggcgcatgaggtacttcgacccgctccgcaacgagtacttcttcgaccgcaaccggcccagcttcgacgccatcctctactactatcagtccgggggccgcatccgccggccggtcaacgtgcccatcgacattttctccgaggagatccgcttctaccagctgggcgaggaggccatggagaagttccgcgaggacgagggcttcctgcgggaggaggagcggcccttgccccgccgcgacttccagcgccaggtgtggctgctcttcgagtaccccgagagctccgggccggcccggggcatcgccatcgtgtccgtgctggtcatcctcatctccattgtcatcttctgcctggagacgctgccggagttccgcgacgagaaggactaccccgcctcgacgtcgcaggactcattcgaagcagccggcaacagcacgtcggggtcccgcgcaggagcctccagcttctccgatcccttcttcgtggtggagacgctgtgcatcatctggttctccttcgaactgctggtgcggttcttcgcttgtcctagcaaagccaccttctcgcgaaacatcatgaacctgatcgacattgtggccatcattccttattttatcactctgggtaccgagctggccgaacgacagggcaatggacagcaggccatgtctctggccatcctgagggtcatccgcctggtaagggtcttccgcatcttcaagctgtcgcgccactccaaggggctgcagatcctcgggcaaacgctgaaggcgtccatgcgggagctgggattgctcatcttcttcctctttattggggtcatccttttctccagcgcggtctactttgccgaggcagacgaccccacttcaggtttcagcagcatcccggatgccttctggtgggcagtggtaaccatgacaacagtgggttacggcgatatgcacccagtgaccatagggggcaagattgtgggatctctctgtgccatcgccggtgtcttgaccatcgcattgccagttcccgtgattgtttccaacttcaattacttctaccaccgggagacagaaggggaagagcaatcccagtacatgcacgtgggaagttgccagcacctctcctcttcagccgaggagctccgaaaagcaaggagtaactcgactctgagtaagtcggagtatatggtgatcgaagaggggggtatgaaccatagcgctttcccccagacccctttcaaaacgggcaattccactgccacctgcaccacgaacaataatcccaactcttgtgtcaacatcaaaaagatattcaccgatgtttaatatgtgatacaagtgacatgctgtgctcagtattgtgtggaacgtgcccccttggtctgcctatgcccttgttttatacatttccagaccattcatcaaggaaaggacctgaagaagtggaaagcacacttcattctccctctccctgctgcttcatactgaaacaggtgcctgttttgcaagtgggctgcattctctcagctctccttttccctcttaccctctctctcttaacattgtaaacaacagacttacgttaaacttcatttctagtacacgccctatttaaaaaagagcagtacatcctgggaggaaatgaaactaaagaacagttagagtaactgtttaacctcagaattttaaaggcagttgtttctttcctaagcacatcaattcgtagtaaatgatgcttcggtttgatggacctttcaacgttatttattgaatatgtatttcggttgcctaccctgtagatatgtggatgaagagtctaactagaataatgacttgtaaacccaccatgagttatttggtttttgacttaaattcctatttgaatcccctttcccggaattttaagggtctctacaactttgaataaagggaaatgcccccaagatgtcctgatctgactaattagtttaattctttcgggcttgctaagcatttctaaagcattagactaacagattcctgtgaagttctgtgcatatgtcccagccccaacaactatcaaagtctagaaacagatgttttcagtgttgctgagagaaacaaaaaatttcctaatgcatctgagagataagcttcggcagtatcacaagaagattaaagtggcagacaccccttccagcggaagttactaattcggacctgactgatgcagtttccatagcaacccatgtttcctgggaaacccgaaaaaggttgtcatggcatctcttgctctctagccccacctcccagcccctgccgtttccacagtaacctttccagatggttcctacttaaatgatttcataaggaaaaccactgtttgaataagccgcacaaaaaataaagttaagtctgagactctaaggaggtgaaatgaatcccaaatgcattttttaactatgaaaatcattatgtcattccataatgactgaatcaaggaggaaaatatggtgtttggaatgttagatattaaccacaataaggcatgatctggattaaatgccatttattaggcaataatttttaaagatgcttctctacagttttctttctccaagaactttcaagccaacaaatgaaatttaaaagcaaatgtaaaagtgttctgtacataagcaaatgagagattcgatcagtgtgcctgaaaccttactacaagggaccttcaggctttctctttaaaaaaaaaaatacagatcccacaacagctctgtcatcatcacagcacttgacaagctaaataaacttcaaataaataaaggatgcacgtttaaaactgagtgaattgcagacaatcaattaaaaggagggacaggaagtaaccagatcttgggagaacacctgcaagtttcagccatatgccaagggttgccagaagacagacagaatcaggtgagcactctgtgatctactgggagcagtcccttttgttatccagagccagggaactgtcattcatgtatagactgatggtatttgccaaaccaacagttttatcttagttacatgcttggtgtctttttaaaaataatttacacctttctcatttgatttccatgttgctaactgtcgtttagtttccattgtttattacaaaaggatgaaaaaacagtcattgctcttcagaataaccttcactcaagccaaactgaaaattattccgttccttttactaacccacttggcctccaagcaacctgtttccctttaaaaaggataaatggcagaatctactgctgttagattattggtccaattttaatttacataattatttaatagtatgcagtggtacagttctttgaaacaaaaaagggttaaaaataagagtaacattttatttaaacataatcattctgtttcatatacattatataaattatacattatctacagttgttttttggttttaatagcatataactattctatccttccagagtaaatgagagtaaccctatttttaaagcccatgaagtattttcagttaggagtacatttataatgcatgcattgaagagagaggaaaatagtgattgagactataagagagagctgaggaaggaaaagaccaaacaaatagaggcaagaaatctaaatatacctggtcatagatttgttgtttgttttttatcatatatttgtttttatctatgtatatctaagtaggacttcattatctagttttctttgctttttgtttgagttaacctttgacattgatctacctcttgaccaaacgtttggtacccttaatgaccagaaattatttttatgacacattttgataatatgttagatacattgtaacaattacattaaaataatttttgtatctgttcttaacatagagatggaggaagtgcaatgacaattttattcacatttattcaggagatgtagaaaccttgattagttctataagtaaattatggttgtgccataattcttatggttattaaatggcagtaatttaaagggggcctttgttctttaatccagagaaatatcctggcttttgactcataactttgaggtaatatgattgcttgtagtcaccacattgtaagttccctaaaggatataagctctgtgtcttgaaggttttaggtactagtgcctagcacagaatgtggcaccttttatatttgttgagtgaatggctgttatcttacataaatgttatttccaggcttttaataaagtggttaaaagcataagctctgcagtcatatttccaggatttgagtcctgactctggtatatgatcttgaacaaattacttaacctctctgtgcctcagtttctttgtttgtaaaatgagggtgataaacagtacctcacaggtttattgtgaatagtaaatgttaatacaggtagaacacttagaaaaaataattccatgacacggcatcagagattttgctaagagattatattgtgatcatcactcacaagcactgtataattaatacaatgttttgtgaatatgaaatacacaagtaatcagtgtcttcctatttcctttctattataagaataataattaccatttattaagagtcaaccatgtcctggacacttgtcaactccgcaaggtaagtgctattaacctcattttaggagggcataaaatagatgcttaaagttaagtgatttccctaagacttcacagctagcaggagactcagttatgatttaaagccaggttattctggctctgaaacccatgctacttttattaggtgacttgaaagacaaatctcttatgcttttagacttggcttcagcctatgtcactaattaatgagttcatgtagataacatatctccagaaacctatttcatttcagtatactgaaaattaacctgcttaaaataagcaggtattttaaccaaatataagcatcaaatataagttatttaaataagatgaagagattgacttttctaataacaaaagattattttcttatagttggtttatctagatttaatcttagaaagtataaccagtcatagtagtgtttagtgataactgctatgacaatggatatttttcagtttcaagatttttctgttttcatgtgttttaatcaacaatagatgatagcattatgcaaattagttttctatctccttatgctttgcttcatttactgaagaaccataccagaaagtcatgtaaatattttgactctcccttattaagagggaagaaattattcagaacagaagtattaaaagcagaatgagattgccagttcactgaaacttgtgacattattgccttacctaaccactccatggatctttaagggcatctgtgctctaaagaaattaaaataaaatttttcctacataatagctgcagacccttctctcagttcttaaatcatttatgaaatgaaaatggataatgatttgggcttagagcaaaattctaatgagcctacatttgcacatgccagctggctttgccaaactacaaccttcactgttgagctcagttgcacgtcttatgtgttgaagaaatatacggatgtctgtgtatagcaagagattcatgtgaggaggtgtgactggatcagtgcacacccatcaacaccctggggaaaaatgtatatgccttacagctgatgaatccagatagaaacatggaagttaacattgttattgttttatttcttttatgatgttttaaaatgacatgatacaccaactgtggtgacataaccacagacacctacgcataggaggaagcattatgtcagttatttctaaactttgaaataaaatttcagtattgaaatttaaatgcacagtatgaagacatttaaagttatggtttgttggcataaaacttgttatttacctttttggcgtataatatactcaagtatttgttttgctatagtatataaagacaatgtatataatatatactagtagtctgttcctttgagtaccataactataacttattgacttctatacatttaaaatttcaacattttctacagcagttccaagtccttcccacctctcagctgtgaatagaagtgataacccttcccactaagaaatgcaaagaagcacacgtgccccataatctgaagacttatggaaacactgtgagatagaggtgaggagcataagaatgtggaagaggatatttagggctgcatttttacagtgggagctttttctttgtgttttgttttaggccttttaaactaaggaggatacaattattggtttttgtactattccgtatgggtttgggggcaattctatatatattaatgaaatcacttgtttttatatacctttaggaagtggttgataacctttgagagaaagtacatcaaaggaggcaggaaaaagggagtagaagccaatcagagcccagaccttactattgtgactcagctcttagctttctgccagaaaatggccattgctatatagcatatgataatagtattctttatgtactcatattcagtttgcaagtataatttaaatgattcagactggttagaaaactttcagatgtttgtcttgatttttaatgatgtcgtgagctaattttcaaaattgtgaagaaaatacattttaaaaagaaacgttttcatgattttactgggttcttttgtaccagatgtgtgttttcttctgttttaaaatttgcaccattagccatcaaatgcatattaagaagagatctgggaaagagcctccatcattttcttgggatccatgttgttattgttgtaacctaaatagagtgaaataggaactctgccctgtaaagtaaagcctggaattctggttgctagcaatataacacttaaatggagaaaaaaatgatatttcatcctatctaaagaatgttatgaataaatttgttcatgcaagactctgactttgcagatacaggggtcataccttccagtatggtgatagtgattggggagaagctttttctcttacagtgagcttccaacctcacacccactcctaatatcatagcacaaaggctcttgggaatctctatggaggcccccacccactttttagaatgaaagttagcatcatgcctacatgttttatatcagacagcactgttatttcatttgtcttccattacatttattttaaacttctgttcattatagaagtccctctgaatcctaaggttcttatttttatacatttaaacatgttctttacattaaaacataattaatttggaagagaagcagtggggacaatttattacacacacacacacacccctcacctgttcatagattacttcctatcctgcagtacatttactttctgtctatatttctaaatggtgtcatttttttctgaaaattagtgaatttccaaaatattggttttcattctgtatgtgcagcataaatatttacaaatcatttttctttttttccagccttacttaaaatgcaggtttattgcctagtgttctcaatgtatttattaatgaaataacattcactgaaatagtaaatatactcaacctatcaccaaattttgtcatttagcctcccaaatatctctaaaaacagcccactttactgtggcactgccaggaccactgtaatccacactgtcatctctatcctacattaagtgtgaaggtctcttaatggcatcctcacatttcttgtggccagtctgaccctttctcttcctggtagccagaatgatctttttgagaccaaaatccgattatataacccacccctacttaaaattctttcagggtcttcttgtttttaggatagaggctcaaaggcttagcatagcttttatggccccacatgatctcatatctagccttacctcctctttgcttatatttctcccttccttcttttgtgctccagtcaccctggtcttcttccagttacaggataagctccctttccaccttaagctaatggggatctttgcaaatatttcactgccagcctcctctttctctcctcacctcttgacttctatttttacttcaatactcctccaaggcatctctcatgactctggttttttcaattcccctattatagtatagtagttcattaaatttaagatgcccttgattataagaaatactattacttatgtgctattttttacaagatttccaattgtaaggataaagtaccagtgattttaaggtgcatcccaatttcatagatgctcaaatctaaaaatgtaggtcttagaatgcattaaatatagtatgttatcttgacatagctgtaattttatatttatttgtgttatatgattaatttctgtttcttccatgagagtggggactatctctccctttgttcaccactgaatcccttcccactctctcctgagtctgctccaaaaggctctcaccccgctatcattccaccaaaagtgtacttggcaaggtcactggtaacctcatataacgatacccagtggtcatttctcagttctcatttcaatttgacctatcagaagcatttggtatggtcagctacctcttcctaagaagactgtcttcatttgacttccaagataccacactgtggattttctttctacctctctggcctctccttcttaatcttatttactggttctttctcatctcttcgttcttcattctgtcttattctcatagctttaaattatctgtgtatgtaaatttgtatctcccagctagatctctcccctgagctcctgactgaatttccacctgcctacgtgacgtctccacttggatatctaatagacatctcaaacctaatatatccaaaactgagcttccgtccttctcccctctctagcccatcaagcctgtacttcctgccctcttccccacctccactactggcagcttcaattttccagttgctcaaagtaaaatccttggaattatccttgattcttctttttctcttacaccccttatttagtccactgtgttgacacttctaaaatgtttcaaacgccttaccacttcataccacttctactgctaccacttgatctaaaccatcgttatcttcacctgaatttttacagtagcctcccgattggtcctccagtttccatccttcctcttatttgagtctattctcaacataaccagagtgattctttaaaaacatttatcaagttatattacatctttgtgtcaagaccaccatttggcaccccatttcacacagagtactaactaaaggcttttttacaatggcctgcaaggccctgtctcattttgccctccttacccttttgacctaatttccaactcctctcccacttgatcctgtgctgcagccacactggccaccttgatcttcttcaaatacaccaggcatgctccaccttggggtctttgtatttattgttctccctgcctgggatgttctggcatctgatagctgcgtggctgcctccatcacctccttcaggtgcaactttcacattgaagccttccctagccacactatctaaaattgcaacctcacaacactctctatatcctttctcttcttatttttccctctaatgtattaggtattttatttattttgtttattgtatgttttccattcccttccatgaggacaaggagttttgtctgctcagtatgctgtatcacccaagacctggcatagtacctgaaatacagttggtgcccaataaatatctattggaaggagagatgagaggaaggaaattgccttccaatttgaggtgttttaacctataaacaaaattttcatgtcatgcatctatgcttcatttaatcactatgtggcttacactcctcatcatgctctgaaggacaaaattccttgtaatcagttcactggagaaggcttgcatttgcgaaaacatgctccagcaagttttccacaagaaatattacaccacccaattatggggatgcaatcctttaatgtaagtaacttaactgttaccttatatgagatatcattgagggtacctagtcactaaggatacctggaagttagaatgcttcacaaagaccatgttttttcatacgtaatagctgatagagtgcttttaatcaatgataacataaacatgttgactaattgaccaggacagcacagcaaaatcagaacgaacaagtaatatctacaaaaggcttatctatctagcagacattctaagaaacttccctataagttcagtctcagtttcagttaatgatgagtcctgaaaatccatggagtcttcattactatggaagctgattgaatcaaacattagatttcactagtgaatcacattacagaattacatcactgtagatatggcctgactatcttttgcaaaatgcaattaacattacattttaaaattatgacatttaaaagttagctattttttaaaataataaaaattagctattttttgaagtgattgttcatacatgaaagcagatggggacatttaaatcagttaatgaaaagtaagagcagatttgtagagtgacatttataaaacggtcaaacttaaactacttctaaataataaaatggaaggtgaaggcaatccagtagcatttggttcttagtattgggagattcctagcggtattgaaataccaacacatatagtatggaatgactgaaactaactaaagcattgatatgaccactgcagatagtgccatgattttatgtaatattgtaaccaaggcactttcctctgcagtaggaaatgaggcttctcctaataagaatagagaggaactttctccacaccccttttgaattttctcctttccctgcattttcaggcaaaccagaccagagaatgacttgactgttgcctctgcatatcgaagtggcacaatttccttaccaaatgtgtcaacaaatttgaaactaacatatgtgcctgagtttacatatgtagaccagcagaaattagaaactctttctccttacgccactttatgcagttaagctcacatgggataaagatcatttttctcttctgagaaaaatgttagggatttttaaagaaatgacataaaatataggattgaaatctatagttttatttttttctggttttgggtgaaggattgtgacattgtttatttttatgatttaactcactatgggttttactggattttctattgtaactttgtttagtcaaggtattagacatttaagaggcagccttatgtgccattacattttgtatttacctcgtgtctgactacagggcaataaaatatcagatagtcatgaatacatttcttctataagaaattattatgaaaagcttgttaaacaagagtgactatgtgtcagacttctaaagagcaaaattaactgggtaaccaaaaagtacagacagaaataactactccaagcaagaactgtttgaattgctttatacctagagtctgtagatcttttccctgcagaccttttaactgattttaaaagagcattttattgtgtgaccatataaattgaagatatttattattagtagacctaaatacggctcaaagtagtatcaattatacctcacagctcattttcccatgactttctagatttttttaaaagctcacatcttaacatattactgactttaattactgagtgagattaaaggtttttgcttgctgagagtacataattttcaagacctcaatcagagaattatatagaatcgagtaagaaatctttctagtccttgagcttattcattaccatttacttggtagaactggtaaaacttattggtgtgcagctaacactaagtaatttaatagatgtcaaagtatatagacacatgaaaacaaagttcccatataactacatgctatagaatgacttcaactcttttctcatcaaatgtaagttgatgagactaacagttaagtaagctaggtttctgtacttctttcatttaggccttttggaggtattaattacttcttcataaatttgataattattgaaatttgactattcttattctcttttcttgttctatatgttggaacatttatttggtaaattatcttcaattataggtcactgttttctattgtacttcctttctctcattttatagaatcgattttgggtccattcttctaagcctttcaacccacatcttaaccactaatatagacattctgaattttttttttttttttttttttttgagacggagtctcgctctgtcacccaggctggagtgcagtggcactgtctcggctcactgcaagttttgcctcccgggttcacgcaattcttctgcctcagcctcccgggtagctgtgactacaggcgcccgccaccacgcctggctaatttttttttttgtatttttagtagagacggggtttcaccctgttagccaagatggtctcgatctcctgacctcgtgatccgcccgcgttggcctcccaaaagtgctgggattataggcgtgagccaccgcgcccggctgacattatgatgattatcctgatatcacttttatttttgtttcgttgaattaccaccccctccacacctatactttattaggatgccatgcttataccattcttatttaataatctcaagagccttgagaggcaggta

SEQ ID NO: 95 - DNA, 3004 bp, Homo sapiens
cagcgcccagcgagcagcggcggtgcccacacgctggtgaaccacggctacgcggagcccgccgcaggccgcgagctgccgcccgacatgaccgtggtgcccggggaccacctgctggagccggaggtggccgatggtggaggggccccgcctcaaggcggctgtggcggcggcggctgcgaccgctacgagccgctgccgccctcactgccggccgcgggcgagcaggactgctgcggggagcgcgtggtcatcaacatctccgggctgcgcttcgagacgcagctgaagaccctttgccagttccccgagacgctgctgggcgaccccaagcggcgcatgaggtacttcgacccgctccgcaacgagtacttcttcgaccgcaaccggcccagcttcgacgccatcctctactactatcagtccgggggccgcatccgccggccggtcaacgtgcccatcgacattttctccgaggagatccgcttctaccagctgggcgaggaggccatggagaagttccgcgaggacgagggcttcctgcgggaggaggagcggcccttgccccgccgcgacttccagcgccaggtgtggctgctcttcgagtaccccgagagctccgggccggcccggggcatcgccatcgtgtccgtgctggtcatcctcatctccattgtcatcttctgcctggagacgctgccggagttccgcgacgagaaggactaccccgcctcgacgtcgcaggactcattcgaagcagccggcaacagcacgtcggggtcccgcgcaggagcctccagcttctccgatcccttcttcgtggtggagacgctgtgcatcatctggttctccttcgaactgctggtgcggttcttcgcttgtcctagcaaagccaccttctcgcgaaacatcatgaacctgatcgacattgtggccatcattccttattttatcactctgggtaccgagctggccgaacgacagggcaatggacagcaggccatgtctctggccatcctgagggtcatccgcctggtaagggtcttccgcatcttcaagctgtcgcgccactccaaggggctgcagatcctcgggcaaacgctgaaggcgtccatgcgggagctgggattgctcatcttcttcctctttattggggtcatccttttctccagcgcggtctactttgccgaggcagacgaccccacttcaggtttcagcagcatcccggatgccttctggtgggcagtggtaaccatgacaacagtgggttacggcgatatgcacccagtgaccatagggggcaagattgtgggatctctctgtgccatcgccggtgtcttgaccatcgcattgccagttcccgtgattgtttccaacttcaattacttctaccaccgggagacagaaggggaagagcaatcccagtacatgcacgtgggaagttgccagcacctctcctcttcagccgaggagctccgaaaagcaaggagtaactcgactctgagtaagtcggagtatatggtgatcgaagaggggggtatgaaccatagcgctttcccccagacccctttcaaaacgggcaattccactgccacctgcaccacgaacaataatcccaactcttgtgtcaacatcaaaaagatattcaccgatgtttaatatgtgatacaagtgacatgctgtgctcagtattgtgtggaacgtgcccccttggtctgcctatgcccttgttttatacatttccagaccattcatcaaggaaaggacctgaagaagtggaaagcacacttcattctccctctccctgctgcttcatactgaaacaggtgcctgttttgcaagtgggctgcattctctcagctctccttttccctcttaccctctctctcttaacattgtaaacaacagacttacgttaaacttcatttctagtacacgccctatttaaaaaagagcagtacatcctgggaggaaatgaaactaaagaacagttagagtaactgtttaacctcagaattttaaaggcagttgtttctttcctaagcacatcaattcgtagtaaatgatgcttcggtttgatggacctttcaacgttatttattgaatatgtatttcggttgcctaccctgtagatatgtggatgaagagtctaactagaataatgacttgtaaacccaccatgagttatttggtttttgacttaaattcctatttgaatcccctttcccggaattttaagggtctctacaactttgaataaagggaaatgcccccaagatgtcctgatctgactaattagtttaattctttcgggcttgctaagcatttctaaagcattagactaacagattcctgtgaagttctgtgcatatgtcccagccccaacaactatcaaagtctagaaacagatgttttcagtgttgctgagagaaacaaaaaatttcctaatgcatctgagagataagcttcggcagtatcacaagaagattaaagtggcagacaccccttccagcggaagttactaattcggacctgactgatgcagtttccatagcaacccatgtttcctgggaaacccgaaaaaggttgtcatggcatctcttgctcttaacctttccagatggttcctacttaaatgatttcataaggaaaaccactgtttgaataagccgcacaaaaaataaagttaagtctgagactctaaggaggtgaaatgaatcccaaatgcattttttaactatgaaaatcattatgtcattccataatgactgaatcaaggaggaaaatatggtgtttggaatgttagatattaaccacaataaggcatgatctggattaaatgccatttattaggcaataatttttaaagatgcttctctacaaactttcaagccaacaaatgaaatttaaaagcaaatgtaaaagtgttctgtacataagcaaatgagagattcgatcagtgtgcctgaaaccttactacaagggaccttcaggctttctcttt

SEQ ID NO: 96 - protein, 521 aa, Homo sapiens
MTVVPGDHLLEPEVADGGGAPPQGGCGGGGCDRYEPLPPSLPAAGEQDCCGERVVINISGLRFETQLKTLCQFPETLLGDPKRRMRYFDPLRNEYFFDRNRPSFDAILYYYQSGGRIRRPVNVPIDIFSEEIRFYQLGEEAMEKFREDEGFLREEERPLPRRDFQRQVWLLFEYPESSGPRIAIVSVLVILISIVIFCLETLPEFRDEKDYPASTSQDSFEAAGNSTSGSRAGASSFSDPFFVVETLCIIWFSFELLVRFFACPSKATFSRNIMNLIDIVAIIPYFITLGTELAERQGNGQQAMSLAILRVIRLVRVFRIFKLSRHSKGLQILGQTLKASMRELGLLIFFLFIGVILFSSAVYFAEADDPTSGFSSIPDAFWWAVVTMTTVGYGDMHPVTIGGKIVGSLCAIAGVLTIALPVPVIVSNFNYFYHRETEGEEQSQYMHVGSCQHLSSSAEELRKARSNSTLSKSEYMVIEEGGMNHSAFPQTPFKTGNSTATCTTNNNPNSCVNIKKIFTDV

SEQ ID NO: 97 - DNA, 22114 bp, Mus musculus
  misc_feature (1)...(22114): n = A,T,C or G
tagaacttttacttaattatatgtgtatgcgtctatgtgaatttcagcacaccacatgtattcaagagctggaggaggccagaagctggggttaaatctcttgaaactggagttacaggtgctgggaactgaacccaggtcctctgtaagagcaacaaagtgcccttaaccaatgaatcacccttctaatcctaaatgtaagtcttaaaatgtttcttttttaattgggaaatcctgggtaaacgggaaggaagcacacacagcacaccatagcctggtgttcgctcacacaacactccatagcttggtgctcagggcagttatgtggagggtccagcaggctctcccttaatctgccattttctgttgagttggccagttgccttgagtatactttgtacattatgttcagttctctattttaaaagagcattgtcaaatccaacaacccaaaattcaggagaaaagaaactccacattttcatacaatggtaatagtatgaatcataacttgtttttgatcagtcaaatagccaagttagtctgttttctaaaattgcctttgaatattatgctattgtgagttcggtttcatatccagaagtagcctctaaaatgaaaggtgtatacttgttttatgtacatggaaattctgttttcttcctatttctcaagctccacagttgacggtcttctctcctctcacctgacttgaataaaatgcttcctgcagttccaggcacagctgttcgactctcctgtgccaaatgtaaaagagtttttcaggagggacagacagcttttcagaggaaagggtctgctgagcttttctgctcaagactatgcattgatgggtacccgtcacctgctgtgtctccagctcctctcaaaaggatgtgcttaaattgctcaaggtatggaagtctaagcaaggccttttattttgctgcatagatctttggtcagagtcttggttatcattttatatgctttggtctcctctgaagatggaaaccataggtaaatgaaagaacttgctcctgctttcagttcctttaagatcactcagaagtagttttgattgttgaagggtttacacagattacatggaagggtggagaagcattgagaccctctttgttagagttttgttaaataaatgtgagacttgagagcatcgaataggatggtttctatgctcagaacgtggataacgtgtgggttttggtttggggttggtttgtttggttttggtttttttgagtcagggactgactcaagatggttttctcatgtttactcccagttcccttggagggattttttgttttgagttagggtctcaaatgtatgtatgtagcgaggagttcactgtggagagcaggttggagttgaactcagaggtactcctgtctctgccttccaagtgctgagactacaggagtgttcaccacactggactacctacacttactaataggctcgcagacctttgcttcgatccttatttggctggcacttccaatgctgtcttttgtttcaggttctattttcttgatctctacctaactttatctcttcttttgttttcttttttggttggttggttggttggttttttgttttttgtttttgtttttttttttttcgagacagggtttttctgtgtagccctggctgtcctgaactcactttgtagaccaggctggcctcggactcagaaatccacctacctctacctctgcctctcgggtactaggattaaaggcgtgcaccaccacgccctgcttcttttttttttttttttaagtttctttatattattttatgtatgagtgttttctctacttgtatgtgtgtgtactacatacatacgctgtgcctgcagagggcctttgatcccttgaaactgccattacaggtagttgtgagccactgtgtgcgttgctggaaattaaacacaggtcctctgcaagagcagttgtgagcactgtcccacctttctggccctctctcttgttttctccaattctacagtactatactatgtccagctttccttttggctataagttatagggcattctcttcagtctactttctctttctgcagagtcctaaacctggaagggacattagagatcacccagtgcagaccttttcttttgcttttgaaaaaactgaggccctgaggaattaaggcactgtgttgctatggttagcatatacgcactacatttcttcagccccagctttgctacatgtcacaggcgttgaaaagactcatgcaagaaagaatttgctgtgtaagttgttctcatatggagtaacaatcaggtatgatgagcagaaatagacaaccttggcttcctctggaataaatatatatatatatatatatattggttcaaaggtgatagtcatcttaaactgggagaggccaccatttattcagaataacaacatgtttctattggcactttttagatctattttattttgcatgtatgggtattttgcctgcatgtttatatgtgtaccacatgcctgcctggggaagttggaataagacgttctattttctggagctggagttatggatggttgtaaacctccatgtggatgctaggaactgggcccaggtcctctggaagagtagcagtgctttgaacctctgagccatctctgcagccccttcattgagacttttaaaaagtttcacattcacaacatcttttggttttctcagacagggtttctctgtgtagttctggctgtcctgggctttgctctacagatcaggctggcctcaaactcacagagatcctcctgcctctgcctcttgagtgctgggattaaacacatgcaccactgcctggctgaagtcccaaaattttaagtaatttttaaggcttctttttttagcaatgatttaatatcttttttttttcctggtactggtattttatttctttgtgtacattaggccatgaatttgtatggaatgggctccaacagctcaggctcttttccattagtcctcacaaagtgtgcttctctgggtggcgcaggctggcgcttcagctgcacccaggtgcccttctctttggcttcctttttcttctggtcgttctccatcacccgcttcaggaagctgtccctgctctttgagtgcttgatgtgctcaatccgcacattgatcctcttggccagaattttgccctaaacctgcttgttgacagtgatgcccacggcatgctgggtgacattgtagactcttcggttttgccgtggtagcacttatggggcattcctattgatgtctacaatatcacccttcttgtagattcgcatgtatgtggccaaaggaacaatgccatgtttcctaaaaggcctagagaacataataccgggtgcctctcctctttccctttgtgttcgtcattttggcgaattactggaagatggctgcggcggccgctgatttaatatctttaactaatacttactgtttttgtttaatgaagcaaaatgaaggataactttgaagatgacatttaaaatattagaaaggggagactttttattgaaaactattaagatatgtttaagaaacatttccacactttagtattggaattaaaaagaaattccgaagacaaatcattccggtccaaaataggccggtccagtaatgtttaattattttcaggcagccgggagtgatggcacaggcctttaatcccagcacttgggaggcagaggcaggaggatttctgagttcgaggctagcctgatttacagagtgagttccaggacagccagggctatacagaaaaaccctgtctcgaaaaaccaaaaaaaaaaaagagagagagagagagagaatggaagctgtggaactttccattgggtcttaacacctttactaattttttttttttttttggtttttcaagacagggtttctcttatacacttatctaccacagaaaaatttaaaaatccatgacagagttagaactagaacgcattttaaaaatcagccaccagtctcatcagaaaagctgtcaagtgttaagaattgatcaagctagagatggcagatacaggtttcctaaaatttctcatttttctttaatgatttatttttatgtacattggtgttttgcctgcatcttcgtctgtgcgaaggcgtgtgagggtgtcaggttgtggcggttgaacccaggccctctggaagagcagtcagtgctctcaacagctgagccttctctccagccccttctcactcttccttaaaagtttagcagtaaatactgtgagttgtttcccttgaaatggcagcctttattttcctgaaaatagccccttctaaacaatagtttagcatatagtctcatagaaatataattcataaaaaagatggctaaggtataactcagattttctgtgtagtctgtctagagacagtggtccaccactgataaacatttcagtgctttatgccctgtcccctttaatccctgtgctggttagtttttctcagcttgacacgaaaggttcatcagaaggaaagaaccttgattgagaaaatgcctccatcattgtcctgtagacaaggacgttttcttgatccatgattgatgtgggagggcccgcctcactgtgagtggtaccgcccttggtctgtgttaccaaactatggtcagccagccaggaagcagattcctctgtggtctcagttcctgcccttccttcagtggtagattatgacctgggagttgtgagagaacataaaccctttcctggtcacggttagtggacccgacccacagcagtagaagcaaactaggacagtcacgcaaatattcaagtttatttattcttttacctgcttttagtctgtgtattaagggcatgcattgcccttggagtccagaagagggcactggatcccctggaacaagaattacagacagttgtgagctgccatgtgggtgctagaaattgtcaaggttcaaattaaaataacttgaaaatgttgttttattgacagcatccttaatttctggaactaaattgttttgttttgcagtaaaaacatggcagaaggatcccaagagctcactgcccaaccagcatagcccatacagtgattcttgctcccaattcagtgagaaactgggtcaggacaatacagagagcaagagggaaaaatgcccaacgccttgctctgggcccctcatgtgtacacacagaaactcataagttactttatatatttattgttctattaacaagcatttattgtttgtttttagagacattttaagtctaaaggatatgaagagtgtccagttggaggatagtagttgtgacaaaaacttttgtagccaatcttgtcttacatcatatgaagaaaaaagaaaaccaggtgttaccatatatactgatagcagtttgcccaagtgcagcatgtgtcagaagacatctactgtaagtttccatttttttttaacatttagaagaattcttgtcattctgcttaaatgtcatttgttgctattgttctagtcttggcagaaattcctacctttcacattttcgttctgctgacaagtttccttgtgaactggtgaaagctgtgatttataatctgtcccacatacttcagggggaagagtgtccttacttgagtagtgcaaagattactaattcatagaagcaggtgagcaaaaagagctgctgtcccgccagctggtcggtgagcgtgcttggtgttattggggaaatctttggctgatggctaatgaacatgaagaaggcctttgggtgtccccaagaacagagaagctagccttgctttgtggactaaatgagacaagcacagttactggtttgatccctttttatgaattagaacgattatttagctttatcactacatgatctttagtaatgtggtgatgcataatcttagtatttgagagacacaggcaagcagatctctgagcttgaggccagtctggtctgcagaatgagttccaggacagccagaactacagagaaaccatatctttttattattattattattattattagatattttcttcatttacatttcaaatgctatcccgaaagtcccctatactcccccccccaagaaaccatatcttgaaaaaacaataacatataactcatactgaatacttcagaatatcaagaaatcaaaatctgcagcaactcctctggtataaccatggtcgagtgtgccctgatccgtttcctgactgcctggtgctgtcagtgtcttgagctgcctgcagagtatgcctgtgagagctggacggagagctcagtgggagagctattgcttagcataggtgtccagcccaagcacatgcaaaagcaaggatccttctgtctggaagggtgaatggcaggatgaggagccaggtgtgatggccatgcctctaattgtcaagtagatctccgtgaactcatcctggtctgtgtaacccaagttccagacccgccagaattccttgtctcaaaaaaagccatattaataaaagactaaagtgaaaattatcctgtgctttccccctgcccctgaaatttcaagacagggtttctctgtgtagccttggctagacctggctctgtagacctggctagcctgaaattcaagaaatctgcctgcctctgcctccctagggcttggattaaaagtatgtaccgccatgccttctttgttctttctttatttttaaagattatttaggagctagaaaggtggctcagcacttaagatccagaggacccagttaaattcccttacccatgtgacgctcataattacctataacccgtagtccagggatctggtgccctgatctagacactgcaggagctacatgcacatggtgcatacattcactcaggcaaaacactcatactcgtaagaaaattgacaacctaagtacagtcctcaggagccacatggtggaagggaagggtgagctgactctgaagttgtcttctgaccttcacttgcatggaatgaaatccacacacacatacaaatgaggagttatttgttcccatttatgtgcatggggtgtgtttacacatctgtttaggtgcccatggatggaaaagaggatgtcatattcttgggacaggaatcagggaactgtatgtaactcagcacgggtgctcttaactcctgagccatcttcccagcccatttcctggctgtcctatcaacattctcatctccacagaaaagaaacgctgtgtagttttgttcgtactgtgtaccaaaaagcggttctgctccaccgttgctttcagtgatgtagaaagattcgatggtaaaactcctcagtctacagcctctctttgtcccgtgcttactgaatttgctgccttccgcctcctgtttgtatgctgctttctcacaataggattgttattgttttctgggtggggggttaattttttaagacaaggtctctgtagccttagctgtcttggagctcactatgttaggctgacttctgaactcacagaactctacctgcctctgcctcctgagctggaattaaaggcgtgatccaccacacccagctgtgcttgagattctttaccgggatgttagcctaggacaacaggtctcaacctgtgagtctccacccctttggaggtcgcctatcagatatttacattatgattgataacaatagcaaaattccagttatgaagtagcaatgaaataattttacggttgggagctaccataacatgagaaactgtattgagtcacagcattaggaaggttgagaacctctggcctggagggacaggtatggccccaggatcgtatggtagatactaagtacccttttctttctcgttagccctggtgcaagggctcatgtccaaggaaaaaactgtaattcaatttgtgttcttactcagtaggctttcgttgcctgggataataaacttctttggtggcctctcttttccttgaatatacattattgctattactgtagctattaaatggtagaatagttttcagataagcttatcaaattgcctcatttggtttttgtagcctagactcttctagttttttaaggaagtgtaaagaattgttattgtttatactatttcagctaaaagcagttacagtagcatgcttagtgtttttagtattgtgtgcgttgtatcagaaatacgagtattacttttaatctttaaacagaaaccgcccagaatacttagatcttccccgtgcaaatcactgcagctgtcagatgagatgattgcgattactaacgacttggggaacgtagaggtttactgctctgcttgttcttcttcatacaacagtgctgtgatggagtctccttcaggtaatgcctaacggcctcaggcttactgtgtactgcaagagagctacacttcatgaaagtaacttaattttcccagtgagtgctggagagatatcttagcaattaagaatgcttgctgtttaatcatgaggacccaagttcagatcctagcacccatgtaaaaaacattcacctcacaaatgaaataatctttattcaaaaagaaaaaaaaatccaaacagactggtaatgttgtcagttgtcagcccagactgtctgaggccctgggctcgatgcccaccaggtgttatggtgggcaagcattctcccactgagttctataaccctcagcacaaaaccacttactattagacagtgttttctgcttggttataacaaactaattttgtttatttttgtcagttaatgtatccatggtgcacagttcttcaaaagagaatctctgtccaaagaaatatccagttataagcaatataatgtcgttagtaaataatcatgttgacctggtcgtgaacactgatctcttacaaggtaaacagacgtttgacataaacagtgttttgtcatattgttgaatctgtctgtctgtttgctgatatgaaataagcttcatgagcttatggtgctattaaagtgtaaaatctcaaatatgtgctttcatttgtctcgacaggtacactttcttctctaccgacagatgtcatcatgagcgtaagttttatcctgatttttaaaattaattaatttatttatatgcgtacaccatagctgacatcagacaccctagaagagggcattagatcccattacagatggttgtgagccaccatgtggttgctgggaattgaactcaggacctctggaagagcagtcagtgctcttaaccactgagccatctctctgattgaccttttgtgggtttttgttgttgttgttgtttgtttgtttgtttgtttgttgggtttttgttttgttttgttttgttttcgagacggggtttctctgtgtagccctggctgtcctggaactcactttgtagaccaggctggccttgaactcacagaaatccacctgcctctgcctctagagtgctaggactaaaggtgcatgccaccacgcccagcttccttttgagtgaatagttctaatcatctgagtaataaaaatatttctctgctgttatatacctagagctcctttaaacactgaatgctgaatttagatggcaaataattatgttagtgctgcttatagagaatcctatactataacttgttcattttactgtgttattgcaatggatatgttttgatatttttattatttgaaaactgcttaaacaagtattattttaccatttgtcctaagaactcagccagtgagtccagcagtggtgttggtaatagtgcggaccagccaggcctcctcccaccttgctcggtgctctgtgaggacacagctgctcccggtgagggagtagagaacaacagtgagaaatccatggaaggaaatgataggctgtgtctctcaaagtccacattaacagaacagaacattaagacagagcctccgggagagccctggagcccagctctccagcatctgcatcccagccctgcagacaatatcgcattctgctattcttgctacttgttcttccagaaaaaatttagctgtcggagagaagcttttgcaacccaaggaactgctgactgggagaaaatgctgggaaatttcagaaagcatgaagaaagtgacgtgcacttaaagtcactgcaattttggaggcaataccagtttctcgatgctattccgtgtgacaattcatctgtttattcaaaacagattgaaggaaataaaaagtacctaaggctcatcattgagaacattttatttcttggaaaacagtgcttgctgttaaaaggaaatgaccagtctgtttcacccatgaataaaggcagttttttggaattgctagaacttagagcaagagatagaggagaggtatttcagctcatgagttcccacgtggacttctatagcagcacgcttgtccaggaggagattattgaaatgataaaggatgaaatgttgcaagacatcgtgagtgagatcaacgcctcctcagccttttcaataatctgcgaggagatagctggtagtgccgctgagagacagctttccgtgtgtgtgaggtacccacaaaagacgccaagtgctgtcttggttaaggaaaggttcctggggtttgtgactgccgaggaggtgactggggtccacgtgcatgggcggatcaaagcttacctgcagcaggttggagttgattttaataaaatatgtggccaagcctatgatagtgccacaaattttacggtaaaattgaatgaagttgtagcagaattcaagaaggaagagccaagagctctctatgtgcattgtcacgcccattttttggagttagcggtgattagcttctgtaaggaggtgaaggagctccgcgaggcactacacactctctgctctttgttcaacacagttcatgtgtctgaagaaatgttggcaagtttgcaaaccatgtgtaagctaagtctaaataaaacttgtaagaaacacacgtcacagtcgtgttggccagcccacgaccatttgctgctggccgtgacggactgccttccggaggtcgttgaggtgctggcgtcagtgtcacgccggtgcgcaggcacagctgtggctgccgagctggaggacctgttggccatggttaccaagtttgaatttatattttgtttgaaatttctttatcgagtactcagtatcacagggattctttctagagagtttcaaagtgaaactgttgacatcttttctttgttttcaaaaatagaagcaattttggaatgtttatcttctgaaaggaatgatacatactttaaaaatatctgggatggagcagatgaaatatgtaaaaagataaccagtaagggttttgatgttgagaaaccctcttttcaaaaaagaagaaaagttcaaagaacagtagatcctggcaactcagagcatatgttttttcctacttcagcagatgaacaatataaatttaatatttactaccaaggtctggacacggtattaaaacatttaaagttatatttttcagagtttgactattgtaaaatgaaacaaatttcagagctgttacttaagtggaatgagccattaaatgaagcaacagccaagcacatccaggaattctataagcttgatgcagacatcattcccgagctccgattttaccggcagtatgcaggtttcaacttcatcgcagaggatgggtccttaagcttcattgacctaggctctttgtttattcagcatgctctccacaataatattccttgtatcacgaagctgttgcatattgctttatcttggccaattacttcagcaaataatgagaagtcattttccacgctgtctcatcttaaaacatacttacttcgtaccatgggacaagagaaacttagtagcctggctctgatagctgttgagcaggaactggtaaataaactgatggaacctgaaagactggggggaattgtcgaaaagttcattagtcaaatgaaagatacgtgagacaaacttgcaactttgagcttaattaaaagaattctgtggttttattagaatcctaatgaagttttgtttgttggaggttctttgagacagatagggatcttgctctgtagcctaggctagtcttgaatttgtaagctcttgagactgattgaccctcttacctgactcttctcctttaaagtattccagttgacgtattgtgtcgtaggcacatctacatttaatacatttactgagcaactactatatgccagatagtatgatatgtgctggaggtatagcagagaattaggagcctagagtcaattgaacatagttttttctaatatagaaatctagtaagcctggcacagcggcacactttcctccaggactgtgactcattggtaacatacttaacgtccctagaatgcataaggcccagattcaattcccagtgccaaggaagtcctgtaataccatcatagctgctagtgaccgtgtgcattgttaaataaaattttaactaaaaaccattgctgggaagagaatagttctacagaagcaaaaaattagaggcctaactaactctgctaccagcagagagatgcagagtggctgtgaggttaaggtttgaaatacagagtaggtggaccaggtagtggtttttctcttaacaactgcatcagctcattccgagaggaaaaagataaaggaagtagggagtttagcaaggctgattgagctttggttctcagctacctgccttgttgaaagaataaagacaggggttaagcaggtcgcacctgaccattcagaagcaaggaagtcatttcaggttctcagcccccaactaaggcggctcagagcgtcagctgaattctgggctcccagtagtcacttagttgtgctgtccttattctccagaagaagccaaaagccagagcagagggagtccagccctcatgcctttatagaggggacctggtgcaggtggcattccctctgggctgcacacagagtagcgcctccaagactagaatcaattccacgggagccacaagcccctagacttgctccatggtctgtctccatttcccttagatctcatctgctgaactgcacttgtgccagcaagtccttctccagcctctgtgtcctcagggtggacatgatgtggacaaaacgtattggttcttcagttgtctggttagtcccatcttcattgactgggcctttattacaccacagcctagtttgtgccaaacttcacttggattccctatggcctctgccagaagtgtcttgctctgttgctaaccacccaaccctcactctcgggcataatgcaccctaggttcacagacctgcatggatttggaaaaggtaaaagtcctagctatccttagctgtgcagtgaaactgagtccagcaggagtggtgagcagtcagggacaaggctgtcttcaggtgtggggatcctgggactccaacatgcaggaaggggctctaccacttgggactctaggatcggtacctgccatggtggggaagttagggataggctagcagagctaggccattgtgtacatttcttacactagaggaaacagtcctcagcatgcgtctagatagaattatacctttagtcccagtacttgggaagcaagggcagatggatctctgtaattctgagaccagcctgatgtacagagctagttccaggacggccaaggctacacaaatcatgtctccaccaaaacagaaaacagaagtcttttctaggataacatgtagggcttgaggtcttgtgcctcttctacttcaggtagcctccaggcatagttttacactcccgccagcatgtctgcctttgttctacattgtcccacagttgttactgtcactccctctagtctgaactctagctgcttgttggaaatagttgaccttgtttattccttttttttttttaactgtttgatttttgttaagttctttaagccatgaccttttctctgaaatcagcttcctcttccacagtgttagggttttatttcctctgatgagacactgtgacccaaggaactcttagaaaggcaaacactggggctggcttacagtttcggaagtttggtctgttatcatcatggtggaaagcatagcagcatgcaggcagacttggtcctggaggagccaagagttgtatattcttgatctgaaagcagccaagaagtgactgtcttcagtaggcaggtaggagactctgatgtcatcttgggcagagcctgggcatgctgggattaaaggtgtgcaccaccacacccagcatagtttttagttttgattatttaatttccatcttgtccgacaatcaagattgatggattttgcccctaagcccccaaatttggtagatgtctcacaccccttctggaaattagaacagctatctttgtcaagtacctattatgtaacttagtactttgcaagttacattagtgctctcaatagcctaagaagtaggttattgggtgctcaagagattgtgtagtcgttaagtagttaaggctactcttccagagaacccttggttcaagtcctagcacctacatggcagctcacaatggcctacaactccagttcctgaggatccagtacccttacattcacacacatgaaggcaaaacaccaaataaaaataaatcattaaatttactcctttaaatggttacaaagcacccaactagtaaagatcaaagtaagatataaaacaggtggtccacggatggtatgataagcccagcacttggaggcagagcaaggtggatctctgtgagtaggaggctgtgctgatctacagggttcgtgcccagatagccagaaccacatagaccctgtctgtaaatacatcaatatattcttcttgtgccatgtgtaagtcagaagggtcttgtcttcaccatcatgttgaatgaaagcatcctttctattttgctgcttctgatttgtgagggacttacaagcttatcttttttgatgttggtggtttggtttttcaagacggggcttctctgtgtagccctggctggccttgaactcaaagatctgcttgggagatcttgggaggtggagaaacataaaacaggctcccagtcagtcacaaggatcagactgaatgtccctgcactcaccttggtgcctgtgttgctacgctgtgctgtttctcaactcggcgttttctggtggattggtttattgggatgtaagttgttcctaaactgagggacatctatccaaactcaggaaagtgtgagtgtgtgtgtattaaccacatgctcaatcaaagaaactactttttaggcccttttgggcaggaaggggtctatgtagacttttgctggccttaaactcacagagatccacctgtctctgcctctggggtgctgggattaaagatgtgtcccaccagtcctagccttttaaatgatttgtatgttggagggtggcggtaatgtagttctcttacagaatcaaactcaggtcgttgtgaatagtagcaaagttaaaatagtagcatatacacctttatatctcacagtctctttttaagatttgtttattttgtgtatatgattatgcttagcttannnnnnnnnnnnnnnnnnnnnnnnnnnnnnnnnnnnccactaatcttaaccactgagccatctctccagctcagtagtaaaattctttatacaactgagccatctttaaggtgcctgcatttctatttttttaaattagatattttctttatttccattcaaatgttatcgcccttcctgatttcccctgcgaaaaccccctataccatcatcacccctcccccagctcaccaacctactcacttccgcttcttgaatttctactttttattcataaaattaaaatagtgcaaaaacgtagctgggggcagagctcacttgcttagcatgcacacagctctggatcaggcctcagaactgcaaaattaaagacagggaaaaagaaaagaaaaaagggactggagagatggctcagtggttaagagcactgactgttcttccagaggtctcctgagttcaattcccagcaaccacatggtggctcacaaccatctgcaatgcaatctgatgccctcttttggggtgtgtgtgtgtgtgtgtgtgtgtgtgtgtgtgtgtgtgtgtgtgtgaaaacagctacagtgtactcataaataaaaaaaaaaaggaaagcatttactgagtgtataacttttatatttattgagcacattctaagatctacttttattacaacctacatgttgccctctcccttcactaggtattaaagtattaagttaaagtattagcaaaataagtcttgagatgaaagtcagttttttggttaaaagaatacagctgtactcaaagctggcaaaccgtcaggtagatgtcagtgtctcacccttgggattctgagtaggtcactttggggcaaagatcatgaaaccagttcctaaagttccactgctgattttggcacagtcagctttgggaatcaactgtgttactgaatgattttcaaagcatttatatcctcttaacaagagataaaacatattctgtgaagacatattgagtactgcactctgcacagtaaagactaaatagatttcatgggtgtgatcgtctccttctggaaacatggattagattagaggttttggtatgagggattggtgccacaatcagtaaatatgctannnnnnnnnnnnnnnnnnnnnnnnnnnnnnnnnnnnnnnnnnnnnnnnnnnnnnnnnnnnnnnnnnnnnnnnnnnnnnnnnnnnnnnnnnnnnnnnnnnnnnnnnnnnnnnnnnnnnnnnnnnnnnnnnnnnnnnnnnnnnnnnnnnnnnnnnnnnnnnnnnnnnnnnnnnnnnnnnnnnnnnnnnnntttgtatatatgggtattttatctctatgtatgtctggtgctggaggaggtatttatttatttttgtttttcgagacggggtttctctgtatagccctggctgtcctggaactctagaatatataagcaccctggttgtttttaatacatttaataaatatatttatttgacctggaaagatggttctgctactaaaggctaggctcacccttttacttatttttatcttatgtgtgtgtcatgaatgtctctgcaaaatgtttattcagtgcccacagtggccagaattgggaatcagatccctgggacctgagttaaggattgttaactgccatggaggcactgaaactctaaactaggtcctgaggaagaacagctaatacttttacccactgagtcttctcttcagactcccttggttgtttttttaaagagttattgtatttatgtatctgtgtggctgtgtaaagaaagatctgggcaaggtagctcacacattttattccagacttggaaagcagaggcaggcagatctattgagttggaggccaacctggctttaatagtttcaggtaagccagtgagaccctaaacaagcaaacaaacaagtaaataaaaaattccatcttttaaacaataaaaataccaaaatgttctttgaccctccttaaatctggttgggacaagatttgtaaatcttatttgtagtaatagctgttgactgcaaagatcactggaaacttctacaaatttgaggacaccttggttacatagtgagatctagggctacaaagagaaaccggtcttaaaaaaacaaaaattaagaaaggacactaccctaagttcaattcaggttctccacaataaaaattttcacatttaaagtatttttaattactttgtgtacactaatgttctgtctgcatttgtgtctgctatagtgaatcacatgccctggaactggaattacagacattgtgagctgccatgtggttctgtaaattgaacctggttcatctggaagaacagtcattgctcgtaactgctgagccatctctccatcccgacaaaatacctttaaatcttctaaaacaaaacaaaaagcagcaactgggaagtggtgacacgggccttaagtttcagtacagtcagggttattcagagaaaccctgacttagaaaacataaaacatgggctggagagatggctcagaggttaagagtgaaaagtcccaagttcaattcccagcaaccacatggtgactcacaaccatctgtaatgggttctgacaccctcttctagtgtatctaaagacagctacagtgtactcacatatataaatcttaaaaaaaaaaaaaaaaccagaaaaaaaccaaatccacaagtcaagaagatagagtaatcatgtaacgtattaaagtggtgagggtgggactgtggctttgcagttaaggtgattgcaagactcaacctcaaagaataggtcgtgtattccctctgtgtattatgaatgcaatgaatcttataattaagagaaaaaaaataggggggctggcgagatggctcagtggttaagagcgccgactgctcttccaaaggtcccgagttcaaatcccagcaaccacatggtggctcaaccatccgttaacgagatctgatgccctcttctggactatctgaggacagctacagtgtacttacatataataaataaataaatctttaaaaaaaaaatagggctggaagattcaatggtttttttcatccttttcaaaagtagtttagggctggagaaaaggctcagtaggtaagaagtctagctgttcttccagaggttcaattcagagtaccctcatggttgctcgcaattgtaatccactccctgaaaaacggtgactacttctgccctcctgaaactatgtagtctaggctgactttgaactctcagagatccacctgtctctgctacccaagtgctgggattaaaggcatgcatcaccacaccctaaatattataggtttttaaaagagagcatattttaataaataaaaacggtagctactctggggagtgatgggttaagagcacctactgaaccccctacatatgtgtggtagatgtgcggcttgagtgggggtgggacgaggggcaagctgtctctgactcttgttgcctgcctttggatggatcactttcttctagctgggctgccatgtctggcctcaattggagaggatgagcttagcctgacttagtccttagacttgatgtgccatggattggtaccatgggtggtagtgggggtggtgacagggctccctcctctgaaaagggtgggggagattggagaaggtgggtgggcacgggtctggaaggaaaggaggaaggggagatgagatcaggatgtaaggtaaataatattttaaaaatataagaattcaaattgtcaaaatatctgtatgaaaaaaaagcatttgttgctctttgatttctagcacccacatgtggcagatgacataactacagtacacagacacacaaacaaaatgaaaaatttaaatgagaaagacctaagttctccctcaccattatcagagcttcaaaatagaacatacttcagtcttcctgtcttaccagcctcaaaggaaacaagacacatctgtttcaaaggatgagaacatgtgcaaggccagccttcagccttggctagttgggtaaatgaatctcaaaaccattgccagttcttcttgattataggaactaaaacacagttaacaattttgtgaagacagaacttggaggcaggcagatttcagcctggtctacggagttccaggacagccagggctacagagaaaccctgtctcaaaaaaaaataaaataaaataaaataaaataaaaatgataatgaacaaagaaaatgctgccaaccagattgcctgtcaagcaatccgaagtgcgttctgactgatgttcaagggcgccactcactttgggaggtgccatccctggctgatggtcctgggtactataaaactggctgagtatgccagaaacaagccccccatggcctccacatcagctactgcttcctggtttcttcagttttgattcctaccgggttctttatatgatggattgtgctgcaaaactgcaacctagaaataaactttcctccccaagctgcttttagctgttttattccaatagaaaccacagctggagagatggttcagcagctaggaacactgtcctgaggttctgagttcaagtcccagcaaccacatagtggctcacaaccatctgtaaagtcaagtgtgtctgaatacacctacaatgtacttatatacatgaaataagtggtgctgctgtgcctccaaggcttaccaccttcagttgacttgtaaatgtggcttcctgttgagtgcaagagaaagtataactggagtgccaaggataagatggtcagatgaggcacctaaagattggaattgaagagtccaagttaggtggtaacagcttggaaggctggggcagagttcttcagaaggcagtatacgctttgaatcagcgctccatatatggtacagtttcacccatagccaggattcatgggtccaggaatcaaggggtggactatcactatcactcctagtgaccctctaagaagagtccaactgggacacaattttaccttttctgtgtgcttttcgaggtcttgctaagcagtctagcttcaggtatgggtacttttattcacagtacagaaccaagttcaaaaataaagggtcattgcactaatcttctaaatctctaatcctatcatagaagtagatccaccatcctctgcctcccagatgctggaattaaaggcacacacctttatacaagtctgcattgctttctgttgtgttcactagtcatctattcccctcagtgctcatttgtccatcctggtcaaatttcatgtacatacacatgacctgtgttgagaatttatgccaagacaggactgtcaattgaatactcatatttaggcttgtggtcattagggctcgtatctaggataaggcagatttggttctagtgtgccagcatttcactacaattgtgattttgtaaattccagcaatgttttaagtggccacacaactgttaaaccagcagtatatcaagttcatttttaatagacttcctgtcatggttttgtatattaggagtggccctgttaaagtgtgtcactgagggtgtgtgtgagcttaagacacgtgctgcctggaagccagtcttcatgtagcagatggaagatgtagaactctcagctccatctgtaccacacctgccaggtcactgccatattcctgccttgataatggactgaacctataaaccagccccaattaaatgtccttggatgagccgagcagtggtggagcatgcctttaatcccagcactcgggaggcagaggcaggaggatttctgagttcgaggccagcctggtctacagagttccaggacaggcagggctacacagagaaaccctgtctcgaaaaaaccaaaaccaaaaacagttgccttggtcatggtgtctgtttacggcagtaaaactctgagacacttgccaacactttaatggatcttcgtgttattgggagtctactcctacagagataggaacttcaggtaataacctattttaacttccgagaggtacaggaggctgtgtacttcatctgggtgcactacagaaacaaaattcttactgagtcatttcttcatgtaccaaacactgacttaggagctcagtttccaaaaaaacaaacacgcacacaacaaaactccacctggaaagctttactagctgctgctttgaagcagtttatttcttctagtttcagttcagctggtgactgatatttctaaataaacttaataggtctaaaagtgtattcttccatcttgtgggtttttaaaagaacaagtttatatacctgctttgaaataaggactcaacgtagactagcatgaagctaatgttcccatttgcctcttgaacctttttccaagttacgttagtatgtgcacacacactgcaatgtatg

SEQ ID NO: 98 - DNA, 2114 bp, Mus musculus
tccgggagagccctggagcccagctctccagcatctgcatcccagccctgcagacaatatcgcattctgctattcttgctacttgttcttccagaaaaaatttagctgtcggagagaagcttttgcaacccaaggaactgctgactgggagaaaatgctgggaaatttcagaaagcatgaagaaagtgacgtgcacttaaagtcactgcaattttggaggcaataccagtttctcgatgctattccgtgtgacaattcatctgtttattcaaaacagattgaaggaaataaaaagtacctaaggctcatcattgagaacattttatttcttggaaaacagtgcttgctgttaaaaggaaatgaccagtctgtttcacccatgaataaaggcagttttttggaattgctagaacttagagcaagagatagaggagaggtatttcagctcatgagttcccacgtggacttctatagcagcacgcttgtccaggaggagattattgaaatgataaaggatgaaatgttgcaagacatcgtgagtgagatcaacgcctcctcagccttttcaataatctgcgaggagatagctggtagtgccgctgagagacagctttccgtgtgtgtgaggtacccacaaaagacgccaagtgctgtcttggttaaggaaaggttcctggggtttgtgactgccgaggaggtgactggggtccacgtgcatgggcggatcaaagcttacctgcagcaggttggagttgattttaataaaatatgtggccaagcctatgatagtgccacaaattttacggtaaaattgaatgaagttgtagcagaattcaagaaggaagagccaagagctctctatgtgcattgtcacgcccattttttggagttagcggtgattagcttctgtaaggaggtgaaggagctccgcgaggcactacacactctctgctctttgttcaacacagttcatgtgtctgaagaaatgttggcaagtttgcaaaccatgtgtaagctaagtctaaataaaacttgtaagaaacacacgtcacagtcgtgttggccagcccacgaccatttgctgctggccgtgacggactgccttccggaggtcgttgaggtgctggcgtcagtgtcacgccggtgcgcaggcacagctgtggctgccgagctggaggacctgttggccatggttaccaagtttgaatttatattttgtttgaaatttctttatcgagtactcagtatcacagggattctttctagagagtttcaaagtgaaactgttgacatcttttctttgttttcaaaaatagaagcaattttggaatgtttatcttctgaaaggaatgatacatactttaaaaatatctgggatggagcagatgaaatatgtaaaaagataaccagtaagggttttgatgttgagaaaccctcttttcaaaaaagaagaaaagttcaaagaacagtagatcctggcaactcagagcatatgttttttcctacttcagcagatgaacaatataaatttaatatttactaccaaggtctggacacggtattaaaacatttaaagttatatttttcagagtttgactattgtaaaatgaaacaaatttcagagctgttacttaagtggaatgagccattaaatgaagcaacagccaagcacatccaggaattctataagcttgatgcagacatcattcccgagctccgattttaccggcagtatgcaggtttcaacttcatcgcagaggatgggtccttaagcttcattgacctaggctctttgtttattcagcatgctctccacaataatattccttgtatcacgaagctgttgcatattgctttatcttggccaattacttcagcaaataatgagaagtcattttccacgctgtctcatcttaaaacatacttacttcgtaccatgggacaagagaaacttagtagcctggctctgatagctgttgagcaggaactggtaaataaactgatggaacctgaaagactggggggaattgtcgaaaagttcattagtcaaatgaaagatacgtgagacaaacttgcaactttgagcttaattaaaagaattctgtggttttatt

SEQ ID NO: 99 - protein, 681 aa, Mus musculus
PGEPWSPALQHLHPSPADNIAFCCYLFFQKKFSCRREAFATQGTADWEKMLGNFRKHEESDVHLKSLQFWRQYQFLDAIPCDNSSVYSKQIEGNKKYLRLIIENILFLGKQCLLLKGNDQSVSPMNKGSFLELLELRARDRGEVFQLMSSHVDFYSSTLVQEEIIEMIKDEMLQDIVSEINASSAFSIICEEIAGSAAERQLSVCVRYPQKTPSAVLVKERFLGFVTAEEVTGVHVHGRIKAYLQQVGVDFNKICGQAYDSATNFTVKLNEVVAEFKKEEPRALYVHCHAHFLELAVISFCKEVKELREALHTLCSLFNTVHVSEEMLASLQTMCKLSLNKTCKKHTSQSCWPAHDHLLLAVTDCLPEVVEVLASVSRRCAGTAVAAELEDLLAMVTKFEFIFCLKFLYRVLSITGILSREFQSETVDIFSLFSKIEAICLSSNDTYFKNIWDGADEICKKITSKGFDVEKPSFQKRRKVQRTVDPGNSEHMFFPTSADEQYKFNIYYQGLDTVLKHLKLYFSEFDYCKMKQISELLLKWNEPLNEATAKHIQEFYKLDADIIPELRFYRQYAGFNFIAEDGSLSFIDLGSLFIQHALHNNIPCITKLLHIALSWPITSANNEKSFSTLSHLKTYLLRTMGQEKLSSLALIAVEQELVNKLMEPERLGGIVEKFISQMKDT

SEQ ID NO: 100 - DNA, 21986 bp, Homo sapiens
  misc_feature (1)...(21986): n = A,T,C or G
gtctccaaaactacatcttcaaagtcaggcatggtgggattatgtgcctgtaatcctagctatgtgggagattgaggtgggagaatctcttgagcccaggaatttgaggccagcttgggcaacacagcaagaccctatctcttaaaaaacaaaactgcactattagatgtgctttataatctgtaatgtatagatgagaaaattaaaatttagggagtataaatgtgacagaactgggtaccaaattcaggttttcttatttcaaggctaatgttcttactctaatttgagaggtcatttcatttataaagagaagttataattgtgtttaaactgtttaatgatgtccttgttatttattcttagagacattttaaatccaaaggatgtgattagtgtccagctggaagacactacctcttgcaaaactttttgcagcctatcttgtctttcatcatatgaagaaaaaagaaaaccatttgttaccatatgtactaatagcattttgaccaagtgcagcatgtgccagaagactgctattgtaagttccaattataacctttacagggattctgatgattctgcttaaatatcagagtttttactgaatctttttattaaatcctagattcagtatgaagtaaaataccaaaatgtgaaacataatctttgcagtaatgcctgcctttcaaagtttcactctgctaacaacttcatcatgaactgctgtgagaactgtggcacttactgttacaccagctctagtctgtcccacatacttcagatggaaggacagtctcattactttaatagttcaaagagtattacagcatataagcaggtatgaataaagacctattgtttcttctattaactggcctatgaatggtttcactctaggaaaatgtgggaagtagtttttggtaccctttggaataatgtcgataagttgatgaagatgaaatagaaggcttttaacggtttcttcttgcataagaattcatgataaatgctatatggagattttcctaaataatctcagatcgattatctcaccttaaagaaaaggcaggcaggctggagccggtttataaactagaaataagtatagcaaaaataacaatagtctgctggtcaataaaacccaaacacaaaagtatttttgtttttatttttatgtatttattttatttctttctttttttttttttttttttttttggtgagatggagtcttcctctgtcacccaggctggagtgcggtggcgcgatctcggctcactgcaagttctgcctcgcgggttcatgccattctcctgcctcggcctcccaagtagctgggactacaagcacccgccaccaccacgcctggctaattttttgtattttaagtagagatggggtttcactgtgttagccaggatggtctcaatctcctgacctcgtgatccacctgccttggcctcccaaagtgctgggattacaggcatgaaccaccacacctgaccttatttattttttttgagacggagtctcgctgtcttgcccaggctggagtgcagtggcacaatcttggctcactgcaacctccgcctcccaggttcaagcaattctcctgcctcagcctcccaaggaactgggattacaggcgtaagccactgtgcccagctatttattttttttatttattttgatttttttgagacgaggtctttgtcagccagcttggagtgcagtggcaatcatggctcactgtagccttgacctccttagctcaagtgatcctcccacctcagcgtcccgagtagctggaactacaggcacacaccaccacacctggctaatttttaatttttttgtagagacaagctcttactatgttgcccaagcttgtcttacaactcctgaactcagctgatcctcctgccttggtctcctaaggtgctgggattacagatgtgagcctagccatgtttttgtttttaattccacgtgtttaactcttacaccaaacaatgcaaagatgaatcaagaatgtcacatgtggacagtcatggtggcttacacctgttatctcagcactttgggagaccaaggcgggaggttcagttgagccaggagttcaggaccagcctgagcaacatagcaagaacctgtctttaaaaaaacaaacaaaaaatatcacatgctttctctgagtcagtcataggaggaaataatccagtgagattagtattatttgtccctatttctgatagacaagctctgggtgggtgcttctgagagcagagaaagagcaaatgagatgaggtgggacttcttagatatgttgcttgttcatatcatattttgagacccaactctatccctatacagacttccttaaaaacaagcagttggccgggtgcagtggctgatgcctataatcccagcactttgggaggccgaggctggccgatcacctgaggtcaggagttggagaccagcctggccaacatggcgaaacccgcctctactaaggaataccaaaattagctgggcatggtggcaggcgcctataatcccaactacttgggaggctgaggcaggaaaatctcttgaacccgggaggtggaggttgcagtgagccgagatggcaccattgcactccagcctaggcgacagagtgagactccgtctcaaaaaaaaaaaaaaaaaaaaaaagcagttgaagatgggagtcaaaacaagccataattcaaatagatcatttgtgactcacatcttttctatggcccccatcttgagagtatcctgccttgggaccagaacggaaagcacagaagacttctcccaaaggcaggaaataatattcctttttttttctttctttctttttgacactcaataggccttgttctgggttgttttttgttgttgttgttgttgttgtttgttttttgagacggagtctcgctctgtcgcccaggctggagtgcagtggcgcaatctcagctcactgcaagctccgcctcgcgggttcacgccattctcgtatctcannnnnnnnnnnnnnnnnnnnnnnnnnnnnnnnnnnnnnnnnnnnnnnnnnnnnnnnnnnnnnnnnnnnnnnnnnnnnnnnnnnnnnnnnnnnnnnnnnnnnnnnnnnnnnnnnnnnnnnnnnnnnnnnnnnnnnnnnnnnnnnnnnnnnnnnnnnnnnnnnnnnnnnnnnnnnnnnnnnnnnnnnnnnnnnnnnnnnnnnnnnnnnnnnnnnnnnnnnnnnnnnnnnnnnnnnnnnnnnnnnnnnnnnnnnnnnnnnnnnnnnnnnnnnnnnnnnnnnnnnnnnnnnnnnnnnnnnnnnnnnnnnnnnnnnnnnnnnnnnnnnnnnnnnnnnnnnnnnnnnnnnnnnnnnnnnnnnnnnnnnnnnnnnnnnnnnnnnnnnnnnnnnnnnnnnnnnnnnnnnnnnnnnnnnnnnnnnnnnnnnnnnnnnnnnnnnnnnnnnnnnnnnnnnnnnnnnnnnnnnnnnnnnnnnnnnnnnnnnnnnnnnncggagcttgcagtgagccgagatcgtgccactgcactccagcctgggcgacagagcgagactctgtctcagaaaaaaaaaaaaaaacctgtattgagtaccagttgttcagcttatgtgatggggcaagactgatttgggtaaacgagttagttaacaagcacagcctaacactttccccttgcatctgaatgtaagacatcatgtgacagtgataatggagtaaatctacaatgttagtgaactataatccagaattagaaaaatgtccaaatatgtgaatctaaaaatggggtagctttttatttttaaaaagtggattattagatgtaattgtaattattttggccatatgttaatagaatatattaagttagccttcccttatgaatattaaactaacttaattataaatgataccactattgggccaggtgcggtggctcacgcctgtaatcccagcactttgggaggccaaacgggaggatcacttgaggtcaggagttcaagaccagcctggccaacatggtgaaactccatctctactaaaaatacaaaaattagccgggcatagtggcacacacctaataatcccagctacccgggaggctgaggcaggagaattgcttgaacctggggaaggtaaaggttgtagtgagccgagatcataccactgcactccagcctggacaacagagcaagactctgtctcaaaaataaataaataaataaaaataaattatgccactattgttgcttaacgttaaagattagtgaattgttaagatttctcaaaatataaaagttgttcatactaataaaggataaaaatagaaattttcgaaattatcctttttgttttgttgtgcctttgccaatatcctgttctctcacagaaaaataaaacgtatatgtatttttttgtctttgtactttggtgggttttgttttgtttttgtttttttgagacacagtcttgctctgttgcccaggctggcgtgcaatggcacgatctcagctcactgcaacctccgcctcccaggttcaagcaattcttccatctcagcctcccaagtagctggggttacttgggcgcacaccaccacacccagctaatttttgtatttttgtagagacggggttccaccatgttggccaggctggtcttgaactcctgacctcagatgatcttcccgcctcggcctgccaaagtgctgggattacaggtgtgagtcaccgtgcccagcctgtctgtgtactttgcatctccaaaagcagttttgttccatcggtgattttttttttttttttttttttttagactgagtcttgcttttccacccaggatggaggctggagtgcatggtgtgagcaaagctcactggaggcccaacctcaggtgttcaagcaatcctcctgcctcagcctcccatgtagctgggaccacaggcatgcgccaccacacctggttaatgtttgtgttttttgtagagatgggtctcactttgctgcctaggctggtctcgaactcctgggctcaagtgatcttcctgccttagcctcccaaagtgctgggattacgggcaagagccaccacactgagcctgatgtattattttttctttctttttttgagacagagtcttactctgtcacccaggctggagtgcaatggcatgatctcggctcactgcaacctctgtcttcctgggctcaagtgatccttcccacctcagcctcacaagtaaatgggactacaggcgcacgccaccacactaggctaattttttatttttatttatttatttattagagatgaggtatcactattttaccagtctggtctcaaactcctgggttcaagtgatccccccgcctcaacctctgaaagttgagattacaggcgtgagccactgtgcctaggctctgacatattctgaaatccaggaatattggttcctgtttgactagaaagaataggtggtgagcataatctttacagtaatgcctgcctttcaaagtttatatcctttcttttgcatggttactacttactgaactcacagtactctatactttctattgcttgtatgctgctttcttacaatatgcttgtaatttttaccatgaagttagcctagaaaaacagtgattcccacagtatcttgtaaggtatttaagttaagcactccttcctggctcctcctcagcatcggtagacatcttcccaagttaattcccaagctaccattgaggacagatctataactatataaggcctttgtttatccagtaggctttgactgcctgaaatgaacttctgtgaccactttcttcattgcttttttttttttcccttgaaaaggagtttcactcttgttgcccaggctggagtgcagtgtcacaatctcagctcactgcaacctctgccacccaggttcaagtgattctcctgcctcagcctcctgagtaactgtgattacaggcgctcgccactacacctagctaattttttgtatttttagtagagacgggatttcactatgttggccaggctggtctcgaactcctgacctcaggtgatctgcctgctttggcctcccaaagtgctgggattacatgcatgagccactgcacctggccttactgctttcataggtattattattattgctgttaaatatatctgataaataataaaaatcattttcagatttgccaatattcttttagttattgcaatctgtagtgtctttttaagaaaatgtaaaaactgtcttaattgttattctttttaatattccaactaaaagcagtggtaataggttcttcttcattaacaacatatcatataccaggaatatgaatattattttaatctctaaacagaaacctgccaaaccacttatatctgttccttgcaaaccattgaagccctcagatgaaatgattgagactacgagtgatttggggaagacagagcttttctgctctattaattgtttctctgcatacagtaaagctaagatggaatcttcttcaggtaatgtttgtttagcaattgtaggggtttagtaattattaataaataatattatttgactttaatttataaccttgattcattttcaaattaaactgacttttaaaagtcaaaacaatctaaacttgttgcaaagaactgtttttcagtatttttgtataaaaggaaggctactttaccaccagagatttaatatttgtaggccaagcacggtggctcatgcctgtattcccagcactttgggaggccaaagtgggcagatcgcctgaggtcaggagtttgagaccagcctgggcaacatgttgaaaccccgtctctactaaaaatacaaaaaaaattagctgggcgtgttggtgggtccctgtagtcccagctacttaggaggctgagacaggagaatcatttgaacctgggtggtggaggttgcagtgagccgagatcgcaccattgcactccagtctgggtgacagagtgagactccatctcaaaaataataataataaaaattaaaagatacatgtctttttttagattatttagtaaatgaatatatgtatgtttacatcaatatatattgagcacctactgcaaaacatggtacataggaggcacttggtcaatatagagtttaatacatttacaagactgcttttattagaatatagaatgttttacttagccctgttttgtaaaaacaagttttcattacatttttcacatgaaatagaagtgattgtaaatgctttaagactcaataataaaaaagcacaaataatctgagccaactaagtattccatcaaaaagcctcatgtaggaccagtggtgctatttacatagaccatagagtgactaatgcctctgggatttgtaagtcatacaaactggcttgttacagaaatttctgcaatagtagcttgggcaccaacctagcgctccattgatgttaaggtttatgaatcctggaagagtttgaaatagatgcccattaggagattcaatcagaatctcttttcttcatgagtaatttcacagaaaaatttgctcataattttaaacaaattctttaaaaggactgggaaattgtgtacaaaggtaaaagacataaaatgttggagaagtgtaaattttcagtgtaatgttgtaattataaatacgatactaaagaacctggctattcctaagccctaataaaaattacttcagtacctaccaattccttaagctattagatgcttgcattatttctttaaacagtattactaaacagtactttctgatgattgattttgccttgtttataagaaatctttttattgttgtcagtaagtgttgtttctgtggtgcatgatacttcaacagagcttctttctccaaagaaagatacgactccagttataagcaatatagtgtcattggcagacaccgatgttgccttgcccatcatgaacactgatgtcttacaaggtaaaagttgatgttaagatatttgacataaatattgttttgtcatacttgataaatctgtctatatgctaaattttctttttgtttcttatatgaaataagcaaatatagtttatgatgctattttataggttatagtatataagatcttgaatttatgctctattttaacagatacagtttcttcagtaacagcaacagcagatgtcattgtggatgtaagttttaactttttttaccactgtctttttttaataagcagatttttgttgttgttgttgttgagacagagtctcgctctgccacccaagctggagtgcagtggcgtgatctcagctcactgcaacctttgcctcctgggttcaagcgattctcctgcctcagcctcctgagtagctgggattaccagcgcctgctaccatgcccagttaatttttgtatttttagtagagaaggggtttcaccaggttggccaacctggtctcgaactgctggcctcaggtgatccgcccaccttggcctcccaaagtgctgggattacaggcatgagccaccacacctggcccagattttttatatatatatataatatatactataatatataaaaatataaatatataatataaatatattataatatattgtatataatataaatatattataatatattgtatatttattatatattatatttatatatttaatatatattttatgtattatgtattcatatatggggtgtgtgtgtatgtttgtagattgtttaaacagaagtatttttttcctctgggttcttcttttaaaaaaatactacacaatttgagtcatctgagcaataaaaattatttttatgacaattacataccaaaaggtccttcaaacatttaatgctgaatctagattgcaaataaataagttatacgtaattgttaacgtttccccctagtggagctcatactgtaactcagccatttattttactatgttattagagtagatatatttgatattttaattaatttttgaaaactgttaaatgttcttttctcattttctcccaaagctttctaagagttcacctagtgaacccagtaatgctgttgctagtagtagtacggaacagccaagcgtttcaccatcttcatcagtattcagtcagcatgcaattggttccagtacagaagtacaaaaagacaatatgaaatctatgaaaataagtgatgaactatgtcacccaaaatgtacatccaaagtacaaaaagttaaaggtaaatcacgaagtattaaaaaatcttgttgtgcagattttgagtgtttggaaaacagtaaaaaagatgtggcattctgttattcatgccagttgttctgccaaaaatattttagctgtggaagagagtcatttgcaacccacggaacttctaattggaaaaaaaccctggaaaaattcagaaagcatgaaaaaagtgaaatgcatttgaagtcattggaattttggagagaataccaattttgtgatggagctgtcagtgacgatttatctattcattcgaaacagattgagggaaataaaaagtacctaaagcttataattgaaaatattttatttcttggaaagcagtgtttacccttaagaggaaacgaccagtcagtttcatctgtgaataaaggcaattttttagaattgttagaaatgagagcaaaagataaaggagaagaaacatttcgacttatgaattcacaagttgacttctataacagtacacaaattcaaagtgatattatcgaaataataaagactgaaatgttgcaggatattgtgaatgagatcaatgactcctcagcattttcaatcatatgtgatgagacaatcaatagtgccatgaaagaacagctttcaatttgtgtaagatacccacaaaaatcatcaaaggctatcttaattaaggaaagattcttgggttttgttgatactgaggagatgactgggacccacttacataggactatcaaaacttatctgcagcaaattggagttgatatggataaaatacatggccaggcctatgatagcaccactaatttgaagataaaatttaataaaatagcagcagaattcaagaaagaagaaccaagagctttatacatacattgttatgcacactttttggatttatcaataattaggttttgtaaagaagtaaaagaactccgaagtgctctaaaaactctcagttctttgttcaacactatttgtatgtctggggaaatgttggcaaattttcgaaacatttataggctaagtcaaaacaaaacatgcaagaaacatatatcacaatcatgttggacagtccatgatcgtacattactatctgtgattgacagtcttccagagattattgaaacattggaagttatagcaagccattcttcaaatacaagtttcgccgatgaattgagtcatttgctgacattggtttccaaatttgaatttgtcttttgtttgaaattcctgtatcgagtgctgagtgttacaggaattctttccaaagagcttcaaaataaaaccatagacattttttctttgtcttcaaaaatagaagcaattttggaatgtttatcatctgaaagaaatgacgtatactttaaaacaatctgggatggaacagaggaaatatgtcaaaaaataacctgtaaaggttttaaagttgaaaaaccttctcttcagaaaagaagaaaaattcagaaatcagtagatcttggcaattcagataatatgttttttcctacttcaacagaagaacaatataaaattaatatctattaccaaggattagatactatattacaaaatttaaagttatgtttttcggagtttgattattgcaaaataaagcaaatttcagaactgttatttaaatggaatgaaccattaaatgaaacaacagcaaaacatgttcaggaattttataaacttgatgaggacattatcccagaacttagattttatcgacattatgcaaagcttaactttgtcatagatgatagttgcataaacttcgtcagtctcggctgtttgtttattcagcatggtcttcacagtaatattccttgtctctcaaagctattatatattgctttgtcttggccaattacttcagcaagtactgagaactcattttctaccctgcctcgtcttaagacatatttatgtaataccatgggacaagagaagcttactggcccagccctaatggctgttgagcaggagttggtaaataaactaatggagcctgaaagactcaatgaaattgtggaaaagtttatcagtcagatgaaagaaatataatacatgctcatttgaacttacctaaaagacttgtatttccattgggatgttttcatttcaaaattgttcaaaattcaaaagacacagaacgataaacagtgaagtctccttccctcctttagaactcattttctcttcccaaaaagtgttatcttttccttaaatatccctctagaggtatttttcctaagtggtattgtacggtgtatactgttcttcagcttgtcttctctgtgtaacatatttttgagattgtcccatgtcgttacatgaagagtttcttgattcttggtctataattgcagatgttattgtatgaatgtaccataatatatttgagcagtccctgctgacatttttttcctaaccttttgctattataaataatgattcattttataaccttttatataggtcacattgcacatgagtgagttactgtaagctggaaatctaaagttagaattactaggttaagatatgtgcatttttacttttgatagatattggcaagttgccatctataaggattgtgccagtttacagtcccacccacaatgcatgagagtgcctattaaatctttgtaagtgttatcaaatgttttgatctttcctaatctcttactttaaaaatggcgttttaatctcagtagaattttgtatattcacttaagaataaggttggggactgggcgtggtggttcacacctataatctcagccctttgagggcctacacaggaaggaagatcgcttgaggccacgagttcaagatgaggttggcaacatagtaagacctcatcactacaatttttttttttttaaattagtgaagtgtggtactgcacacccgaagtcccagctacttgggaggctgaggcaggaggattgcttaagcccagaaatttgaggctgcagtgagccatgattgcaccactatgctccagagtctaggcaacagagtgagaccttatctctttaaaacaaacaagaatgaagttaggtatctgtttatttgtttgagccatttgtatttccttttttgtagactgtcctgtttaaacgttaaaatcactgctgtggttttgatttatacatctcagctggatggcacaataaattattaagccatgttatgaaaatataactatatttaagtaacctgcaaagaaaagactatttctttatacttcaaaaaagtttttgtttttgttttgagatggagttttgnnnnnnnnnnnnnnnnnnnnnnnnnnnnnnnnnnnnnnnnnnnnnnnnnnnnnnnnnnnnnnnnnnnnnnnnnnnnnnnnnnnnnnnnnnnnnnnnnnnnnnnnnnnnnnnnnnnnnnnnnnnnnnnnnnnnnnnnnnnnnnnnnnnnnnnnnnnnnnnnnnnnnnnnnnnnnnnnnnnnnnnnnnnnnnnnnnnnnnnnnnnnnnnnnnnnnnnnnnnnnnnnnnnnnnnnnnnnnnnnnnnnnnnnnnnnnnnnnnnnnnnnnnnnnnnnnnnnnnnnnnnnnnnnnnnnnnnnnnnnnnnnnnnnnnnnnnnnnnnnnnnnnnnnnnnnnnnnnnnnnnnnnnnnnnnnnnnnnnnnnnnnnnnnnnnnnnnnnnnnnnnnnnnnnnnnnnnnnnnnnnnnnnnnnnnnnnnnnnnnnnnnnnnnnnnnnnnnnnnnnnnnnnnnnnnnnnnnnnnnnnnnnnnnnnnnnnnnnnnnnnnnnnnnnnnnnnnnnnnnnnnnnnnnnnnnnnnnnnnnnnnnnnnnnnnnnnnnnnnnnnnnnnnnnnnnnnnnnnnnnnnnnnnnnnnnnnnnnnnnnnnnnnnnnnnnnnnnnnnnnnnnnnnnnnnnnnnnnnnnnnnnnnnnnnnnnnnnnnnnnnnnnnnnnnnnnnnnnnnnnnnnnnnnnnnnnnnnnnnnnnnnnnnnnnnnnnnnnnnnnnnnnnnnnnnnnnnnnnnnnnnnnnnnnnnnnnnttttggagacagagttttgctcttgtctcccaggctagagtgcagctgcatgatctcagctcactgtagcctctgcctcccgggttaaagctattctcgtgcttcaacctcccaagtagctgggactacaatcgtgcaccaccacacctggcaaattagtttgtatttttagtagagaggggatttcaccctgttggcaggctggtcttgaactcctgacctcaggtgatccacccacctcagcctcccaaagtgctgggattacaggcataagcaccatgcccggccctaatttattgatttccaccttaaaaaagagaaaacaggcctggcgcagtggctcacacttgtaatcacagtactttgggaggccgaggcgggcagatcacttgaggtcgggagttcaagaccagcctgactaacatggagaaaccccgtctctactaaaactataaaattagccgggcgtggtggcacatgccctgtaataccagctactcgggaggctgagacgggagaatagcttgaaccccaaaggctgtggttgcagtgagctgagatcgtgcaattgcactctagtctgggcaacaagagagaaactccgtttcaaaaaagagagaaaataggctggggacggtagctcacgcctataatcccaacactttgggaggctaaggcaggcggatcacaaggtcaagaattcaagaccagcctggccaacatggtgaaacccatctctactaaaaatacaaaaaaaatgagccaggtgtggtggtgggtgcctgtaattccagctactcaggaggctaaggcaggagaatcacttgaacccaggaggcagaggttgcagtgagccaagatcgtgccattgcactccagcctgggcgacaagagtgaaactccgtctcaaaaaaaaaaaaaaaaagaaaatagaagttaactctagtattgaatgtgtgttgcatatattttcattcttttaatggaagtgcttaaggctatgaactttcctctaaagtcagcttggtcaaccatgtgttttttcattttcatcattttctagctgtttttagttgtagtttctatcttgtcataaaatcaagaagttgggccaggcatggtggctcacgcctgtaatcccagcactttgggaggccgaggtgggcggatcacgaggtcaggagatcgagaccatggtgaaaccccgtctctactaaaaaaaattagccaggcgcagtggtgggtgcctgtagtcccagctactggggaggctgaggcaggagaatggcgtgaacccgggaggcggagcttgcagtgagccgggatcgcaccacagcactccagcctgggccacagagcaagactccatctcaaaaaaaaaatcgaggttggtgttcttgttttcattttcaagtgtttgttttctattcttgtagtctattatacagccaataatgtaaaaaataaacttacattaagtataacagctatcttggttgaatgcctattagcctattaagtaacctagtacttccctcagtgttttacatatattatttcatttagttctcataacaacctattattttacagaagaaactaaaaaaacacattatggattacacaactaataggggtgaaactggatttgtacccaggtagtctgactccaaagcccatgctgtcaatcaccatgctctactacctcttagacaaccattatcacttataaatattcctaaataaaagattatcagaagtccattaaaaaatagatggctgggcatggtggctcacacctgtaatcccaatactttgggaggccgaggcaggtggatcacctgaggccacgagttcaagaccagtctgaccaatatggtgagaccccatctctactaaaaatacaaaaaaatgagccaggcatggtggtgcacacctgtattcccagctacttgggaggctgagacgggaatcgcttgaacgtgagaggcagaggttgcagtgagccaagattgcgctactgcactccagcctaggcaacagagtgagactctgtcacagaaaaaaaaaaaagtcagaaatagttgtgtcatttttgttaatctccccaaatcccttcataaaaacagcaactaggagagttaaagcagaaatccatgcacagcatctactgctaatctttgtgacaaggtatctccacaatcccaaaatatgatcagatagtgacaaaagcagctataagatctgcttgggacatctgtgtggaaagccgtggaggaaaggcaatgggacatctgatggcattaagaataggagagccctcaagtcaacatgttttcactggaaagcatggtaggccaaaaataaaatttaaaaaattggaaccaggtgtggtacctcacgcctgtaatcccaactgtttgggaggcagagacagtgaatcacctgaggtcaggagtttgaaaccagccaggccaactggtgaaaccccatctctactaataatacaaaaatgagccaggcgtggtggtggcaggcacctgtaatccaagttacttgggaggctgaggcaggagaatcgcttgaacccaggaggtgaaggttggagtgagctgagatcctgccactgcactccagcctgggcaacagaaccaatgagactcccatctcaaaaaaaaaaaaaaaaattctagcaacagtcaaaacacagaaggtttctatagactccaatttgcccgtgagtttgtggggatggtgctaagttctgaagatgtagtggtctaggttctcatgaactcttgaaactaacaaatttgagcttcattccaaaacaaaacccctctgaggttgtagattccaaattgagcaggacagtgacaataagaggtaacttttgaaagaaaaggtatagacagaagtgagagagaagcagaggaaacatctcaaagtattaggctattttagtcactttctgaaaataatagaacttcatgagccttgaggctagaaaagctattctgtcgtgtctctcccaataagtacaggaaaatgcatttcacgtgaaagtaagcaacagaaaaagattatgaaatataatacaaaattgcatagaaaacagcaaagtaaatccctaccaaacaggtgaaaattaacatgatgtttcaaaacaagctaaaagcgcctgggcaacatagtgagaccccgtctctgcaaaaaataaaaaaagctggacgtggtggctcgcacctgtagtcccagctacttagaaggcaaacgtgggaggattgcttgagcccaggaggtcgaggctgtagtgagctgtgactgtaccactgcactccagcctggatgatagagtaagacactgtctcaataaataaatttttaaaaatatggggccggagcgatggcctgggtctggagcccgcggcctccaccgcccacaataacaacaacgtgtagggagcagccgcggccagagccggagcaggggccagagctgcggctagagtagggcctgcgcgtttgagtgactgagagttgcccctgcctgagacctcaaactccaggcggaagcgctatcggttggctgagcagccgtagcccgccgcacggcgacccccaggcccagacagcggggcggaggtctcgtaggcgcgggactggcttctctcaggatgagcccttagagccgggctccggatctttctcagcctcgggcccctttcactttcaggacagaggccagagaacggtgatcatcacacaccccagccggcttcctggcctgggcattttctccgcggccaagcagtgttggggttgtagctgctgggagctccctcctgccgccacctcttctgctaggaagggactgacgcgttcccacgttcttgctctgcacctccccactcttcccactcaagaataagtttctcggccgggcgcggtggctcacacctgtaatcccagcactttgggaggccgaggcaggcgaatcacgaggtcaggagatcgagaccatactggccaacacagtgaaaccccgtctctactaaaaatacaaaaacattagccgggcgtggtggcaggcgcctgtagtcccagctactcaggaggctgaggcaggagaatggtgtgaaccagggaggcggagcttgcagtgagtggagatcgtgccactgcactccagcctgggcgacagagcgagactccgtctcaaagaaaaaataaataaataaataaataaataagtttctcttccctctccattgaaaattctgccccggaggtccaaaacatctattttgtgtgcccttccccagctcctggagcagcacccttagaagtattgcctactcatcagggctgagaatccttcatttttgacttggcttttttcgccctttgggagataaaggtccctttccaccctctttactaacgctctgcccaccagcccttatccttggggtcatcagctccttggccatttctatgtgacttcccccacccatctgagttccagcttcctctgggctccaatctccagtccctggcggagtgactagggggctctggcccaggatccccaaccctggaaggcagctctaacgcaggaagagaattgggcgtcgggtgcgcacctggcagctcaggagtcggggctccactcaccccacacaagaagatgaaaatgcccaaagagctcaatgtattgattggtttggctggggacagccagagaaagaagcccaagcagtcaccgcctgcttcgccctgagcctcctgacttagactctgagtccagctccaaggaggaagaggaattcggtgtggttggaaatcgctctcgctttgccaagggaggctattgacgatgctgcaagatctgctatccgctctgtggttttgtcaccctctctgcctgtgttgtggcctgtgttggcttggtgtggatgcaggttgctctcaaggaggatctggatgccctcaaggaaaaatttcgaacaatggaatctaatcagaaaagctcattccaggaaatccccaaacttaatgaagaactattcagcaagcaaaaaaaacttgagaagattgaatctggagagatgagtttgaacaaagtctggataaacatcacggaaatgaataagcagtgcagggtcgggtcatgagtggccagagcctatcctggcagcgtagagtgcaaagcgggaaccaatcctggacaggaagccatcccatcgcagggcttactcatacacacgctcacactcagactgggaccatttacgcatgccaactaaccaaacatgcacagttttgtgatgtgggagtacctggagaaaacccacgccaacatggggagaacatgcaaacagacagtggcccggccaggagtcagatttttttctcctcaatgttataaccaaatgacgttgaacaaaacattattcaaggacctgctgtaaataggaaagtttacttctgtcctagggcttcatctatgaagctggaagagattgcactgaaaccctttccatttcagcatcaacatgccttcaaagattctgggactgacttatgaagccagcctgataacagaggacttctctgcgagcacaggtccagaagcatgggtggtgggaaagcagaaacttgtgttgtttcctaagggagctctctgagtggttttctaaaattaatgttacacatctctgatggtctattcaagtcagaggcatctgtcctaaaccaaaataggtagaaaaataaaagtatctgggcatggtggctcacgcctgtaatcccagcactttggcaggccgaggtgggcagatcacccaaggtcaggagtttgagaccagcctggccaacagggcaaaaccctcatctactaaaaataaaaaaaattagccaggcctggtggcatgtacctgtaatcccagatactccagaggctgaggcacgagaattgcttgaacccagcggcagagttcggcagtgagccgagatcacgccactgcactccagcctgggtgacagagcaagactccatctcaatttaaaaaaattaattcattaaggaaaacaggaaagtaataggtaaccataaaaaaaaaatgtgggaaattgtccatgtctccatctcagaaaaataaaaaattctaattttccttttgattcctcctttatgagttatttaaatgtatattgattatgaagggatactgaaatctccaaacttaattatgaacttctctatttttcctgcagttctagcagttttggctttgtgtattttgaatctttattaagtgtgcagtgtttagaacaggtatgtctttttgtttatttgttttttgagatggagtctcactctatcgcccacgctggagtgcagtggcacaatcttggctcactgcaacctccacctcctgggttcaagcgattctcctgcctcagcttcctgagtagctgggattacaggcacgcaccgtcacgcccagctaaattttgtatttttagtagagatggggtttcaccatgttggctaggttggtctcgaactcctgacctcaggtgatccacccacccacctcagcctcccaaatgctgggataacaggcgtgagccactgcgcccagccaacattattattattatttggagacagggtcttgctctatcacccagcctggagtacagaggcatgatcatggctcactgcagcctcaaccttctggactcaagtgatcctcccttctcagcctcctatctaggtctataggcatgtgccaccatgcctggctaatttttaaacttttgtaaagacggggtctcactgggttgcatcggctagcctcaaagtcctggcctcacgtaatcctcccaccttggcctcccaaaacatgggattataggtatgagccactgtcccctattataagggtacacacctaattattatattatcaaaatataagcctattttaatttatgtctatttttatatttaaggtggcctttatgtaggtggcatatgattgggtctttttttattcagtatgatctgacaatctttggtttttcattggggtatttagaccatttatatctaatgtggccaggcatggtggctcatgcctgtaatcccaggacttcaggaggccaaggtgggcagatcccttgagctcaggagttcaagactgtcctgggcaacatagtgagatctagtctctgcaaaaaaaataagcaaaaaattatctgggtgtggtggcatgcactgtagtcccacctacttgggaggctaaggtgggagggtcgcttgagcttgggaggtcaaggctgcagtgagccaagattgtgtcactgcactccagcctgggtgacagagcaagatgctgtcccaaaaaaaaaaatgtggttattaatatgatcaagttcaaatctaccatctttttttttttgagacggagtttcactcttatcacccaagctggagtgcaatggtgtggtctcggctcactgcaacctctgcctcagcctcctgagtagctgggattataggcatgcaccacaaatcccagctaattttgtggttttttagtagagatggggtttcactatgttggccagtctggacttgaactcctgacctcaggtgatctgcctgcctcagcctcccaaagtgcgagattacaggcgtaagccactgcacctggctcaaatctaccattttactatttgttttctattcgaccaatgtgtctttgttcccctttctctctctctctctctctctctttttttttttttttcctttctggccgggcacgatggctcaagcctgtaatcccagcacttcggaggctgaggcgggggatcatgaggtcaagagnnnnnnnnnnnnnnnnnnnnnnnnnnnnnnnnnnnnnnnnnnnnnnnnnnnnnnnnnnnnnnnnnnnnnnnnnnnnnnnnnnnnnnnnnnnnnnnnnnnnnnnnnnnnnnnnnnnnnnnnnnnnnnnnnnnnnnnnnnnnnnnnnnnnnnnnnnnnnnnnnnnnnnnnnnnnnnnnnnnnnnnnnnnnnnnnnnnnnnnnnnnnnnnnnnnnnnnnnnnnnnnnnnnnnnnnnnnnnnnnnnnnnnnnnnnnnnnnnnnnnnnnnnnnnnnnnnnnnnnnnnnnnnnnnnnnnnnnnnnnnnnnnnnnnnnnnnnnnnnnnnnnnnnnnnnnnnnnnnnnnnnnnnnnnnnnnnnnnnnnnnnnnnnnnnnnnnnnnnnnnnnnnnnnnnnnnnnnnnnnnnnnnnnnnnnnnnnnnnnnnnnnnnnnnnnnnnnnnnnnnnnnnnnnnnnnnnnnnnnnnnnnnnnnnnnnnnnnnnnnnnnnnnnnnnnnnnnnnnnnnnnnnnnnnnnnnnnnnnnnnnnnnnnnnnnnnnnnnnnnnnnnnnnnnnnnnnnnnnnnnnnnnnnnnnnnnnnnnnnnnnnnnnnnnnnnnnnnnnnnnnnnnnnnnnnnnnnnnnnnnnnnnnnnnnnnnnnnnnnnnnnnnnnnnnnnnnnnnnnnnnnnnnnnncctcagcctcccaagtagctgggactataggcatgtgccaccatgctgggctaatttttttttt

SEQ ID NO: 101 - DNA, 1986 bp, Homo sapiens
tttgttgatactgaggagatgactgggacccacttacataggactatcaaaacttatctgcagcaaattggagttgatatggataaaatacatggccaggcctatgatagcaccactaatttgaagataaaatttaataaaatagcagcagaattcaagaaagaagaaccaagagctttatacatacattgttatgcacactttttggatttatcaataattaggttttgtaaagaagtaaaagaactccgaagtgctctaaaaactctcagttctttgttcaacactatttgtatgtctggggaaatgttggcaaattttcgaaacatttataggctaagtcaaaacaaaacatgcaagaaacatatatcacaatcatgttggacagtccatgatcgtacattactatctgtgattgacagtcttccagagattattgaaacattggaagttatagcaagccattcttcaaatacaagtttcgccgatgaattgagtcatttgctgacattggtttccaaatttgaatttgtcttttgtttgaaattcctgtatcgagtgctgagtgttacaggaattctttccaaagagcttcaaaataaaaccatagacattttttctttgtcttcaaaaatagaagcaattttggaatgtttatcatctgaaagaaatgacgtatactttaaaacaatctgggatggaacagaggaaatatgtcaaaaaataacctgtaaaggttttaaagttgaaaaaccttctcttcagaaaagaagaaaaattcagaaatcagtagatcttggcaattcagataatatgttttttcctacttcaacagaagaacaatataaaattaatatctattaccaaggattagatactatattacaaaatttaaagttatgtttttcggagtttgattattgcaaaataaagcaaatttcagaactgttatttaaatggaatgaaccattaaatgaaacaacagcaaaacatgttcaggaattttataaacttgatgaggacattatcccagaacttagattttatcgacattatgcaaagcttaactttgtcatagatgatagttgcataaacttcgtcagtctcggctgtttgtttattcagcatggtcttcacagtaatattccttgtctctcaaagctattatatattgctttgtcttggccaattacttcagcaagtactgagaactcattttctaccctgcctcgtcttaagacatatttatgtaataccatgggacaagagaagcttactggcccagccctaatggctgttgagcaggagttggtaaataaactaatggagcctgaaagactcaatgaaattgtggaaaagtttatcagtcagatgaaagaaatataatacatgctcatttgaacttacctaaaagacttgtatttccattgggatgttttcatttcaaaattgttcaaaattcaaaagacacagaacgataaacagtgaagtctccttccctcctttagaactcattttctcttcccaaaaagtgttatcttttccttaaatatccctctagaggtatttttcctaagtggtattgtacggtgtatactgttcttcagcttgtcttctctgtgtaacatatttttgagattgtcccatgtcgttacatgaagagtttcttgattcttggtctataattgcagatgttattgtatgaatgtaccataatatatttgagcagtccctgctgacatttttttcctaaccttttgctattataaataatgattcattttataaccttttatataggtcacattgcacatgagtgagttactgtaagctggaaatctaaagttagaattactaggttaagatatgtgcatttttacttttgatagatattggcaagttgccatctataaggattgtgccagtttacagtcccacccacaatgcatgagagtgcctattaaatctttgtaagtgttatcaaat

SEQ ID NO: 102 - protein, 449 aa, Homo sapiens
MTGTHLHRTIKTYLQQIGVDMDKIHGQAYDSTTNLKIKFNKIAAEFKKEEPRALYIHCYAHFLDLSIIRFCKEVKELRSALKTLSSLFNTICMSGEMLANFRNIYRLSQNKTCKKHQSCWTVHDRTLLSVIDSLPEIIETLEVIASHSSNTSFADELSHLLTLVSKFEFVFCLKFLYRVLSVTGILSKELQNKTIDIFSLSSKIEAICLSSNDVYFKTIWDGTEEICQKITCKGFKVEKPSLQKRRKIQKSVDLGNSDNMFFPTSTEEQYKINIYYQGLDTILQNLKLCFSEFDYCKIKQISELLFKWNEPLNETTAKHVQEFYKLDEDIIPELRFYRHYAKLNFVIDDSCINFVSLGCLFIQHGLHSNIPCLSKLLYIALSWPITSASTENSFSTLPRLKTYLCNTMGQEKLTGPALMAVEQELVNKLMEPERLNEIVEKFISQMKEI

SEQ ID NO: 103 - DNA, 23889 bp, Mus musculus
tgtccttattaccagttggggcatcttctggatatatgtccaggagaggtattatgggatcctctggtagtactatgtccaattttctgaggaaccaccagactgatttccagagtggttgtacaagcttgcaatcccaccaacaatggatgaaaaaagtgttcctctttctccacatcctcgccagcatctgctgtcacctgaatttttgatcttagccattctgactgttgtgaggtggaatctcagggttgttttgatttgcatttccctgatgattaaggatattgaacattttttcaggtgcttctcagccattcggtattcctcagttgaaaattctttgtttagctctgtaccccaatttgcaaaacacatgaaactcaagaagaaggaaggccaaagtgtggatacttctttccttcttagaatggggaaaaaagtgcccatggaaggagttacagagacaaagtttggagctaagatgaaaggatggaccatccagagactatcccacctggggatccatcccataatcagccaccaaacccagacactattgcatatgccagcaagattttgctgacaggacccggatatagcgctcttgcgtgagtttatgccaatgcctggcaaatacagaaatggatgctcatagccatctactggtggaacacagggcccccaatggaggagctagagaaagtacccaaggagctaaaggggtctgcaacgctataggaggaacaatgatatgaactaacaagtacccctcagagctgtgtctctggttttatatgtagcagaggatggcctagtcagccatcaatgggagaagaggcccttggtattgtgaagatcatatgccccagtacaggggaatgccagggccaggaagcaggagtgggtgggttggggagcagggtataggggactttggggataacatttgaaatgtaaatgaagaaaatatctaatgaaaaaaagaaaaaaagaattatcataagttttaaaggagaattcaatgcactttgctctgcctcatttaatgcaaaatttagagagcatgaattttacagatagatttgaaccaaatagccagtccaccatccatgatttaacaacacacaaaatgtctcactgtaacatctacaatactgtcttattttaaaatggaacaaaagtctagacaaatagaatcataaatcatcagagtgcacttctccttaagccacacttaatatccaaataaaaataactacaaaatattttcagttagcatgacatagtgtgcagggttgttcacatgcccattcatccatccatcaatcaatactatgtgatacacatcacacaccattgacatatgaccttatctttatctccagagagcagatgggcaaggacatgagacacgtccaagatttgctacaaaacgtagaactggacagacacttggatatctcggtcatcttccctttgtgcctaacttgaataagtcaaaggtcttctgataaccacagcctattccttctgaaggacgtatttacccatttgtagagatgatttcattagacaaattccagattcaaaaacagaccttcatgcctgggaatttagaaggtgaaagacttcccacatagctacggatatgtgccatgctttgtcttcaagaacagttcagtgagatgactcagtggatcctcttatgcccagtatccttggtaactagacatcccactggcatgagcagaaacacaaaattcttaactcaaatataaggggcactcagcaagtgaaaagtctagctctgtaaactggagtcattgaatattcattaccattcatatttcatggcactgtaaatctcataaaaacaaaaagctgttcaagagttttgggtcttgaaagaggtcactgcaggattgaggatcataagactcattgttctaggaatggaaactacttaatgatcacactacagggtcatttatccacagtctctgggggagttcatctctggctatccatcatctttgcttcccaccaaacctgataagctgagtttaatccctggatgctgcatgatataaagcaagaactgactccctgcaagttgtcctctgacctccacactcaggctgtggcatgtgtgcatgtgcatatacacaacaaacaaacaaacaaatgcaaattctgtgattattctttatcattttattcctttaaactacaaaatacattgtgaagtttcccagtcattttcaatgtatagcagagacataaagacatggagagatggctcagcagttaagagcactgactgatcttccagaggtcctgagttcaattcccagcaaccacatggtgactcacaaccgtctctaatgggatctattaagtctcccggttctggacacatattcacatgcacatgtgcacatacaccaaatactgttgccaaatataaaaatttgactttctgagaatttttactgatagcttcttggttaaaaaaacaaaaacaaaaacaaaccaaaaaatacaaaaaaaatgaatcatagggtcttttgtacaaaaataatcttttgtttagttaacaaatacccactgtgttcctacatgtgaagctgctaggcaagctgactacttcccaggagcctgggctccagaagggaacacgtccacttgtgcctatacaagagcagtgtggtaggtaggttcatgataacggtaacattgtgggccacaggagttcaggaaggacacctaactcagatgcaggtctccccaattgagtcctggaaatgaggaaccaactgaaaagattgttgtgggtacatccaggacaagggtgggatttcccatgtgaaaggaaatcatacaagtgaaaatccagtgcaatgcaagcaaagggggctgcgggcatcaaaagcaacacacttagctagagtgtaggatcctttattcagacaccaggacacggctgtggctttgggtctaaagctaacaccaagaatagctcaggtccctggggagggtgagtagagacagggtatgggggtactaagaattaggttctgggaggccaagtctaaatggggctgcatatgttggaaccattcagaatcctcccagtctaagtttacatgtttaggacagtttgaaagtcattagggaaaggatcaaggatggaacttgggaaaatgtttcaatagcaccattgatgggttactgcattgtccaaagacactttagttttgagtataccaggctgacacagcagaacctttgctgaaaattaacctgtgtggaaagaacattggccgcagacttgggctgaagccctgtggactgtcacactaagccctttgcattaactcatttgttgaaacatttaaagccccttctatgcaccacaaactatgctagaggctgggaacagaaggacaaagtataccccttcaagggactcagagtgtgaagaatagcatcgtaaacatgctgaagacacactatcaaaagcaatgttaaaacaaagttccaaatcagggtggccgtggagaaagtctgctctagggacagacaaagagaggctgtctaaagagaatggcaccagaatggaaccctgcagggcaaacagctggtgaagaagcagggtcaggtcttcaggacagacagacctgcaggtgcaagggcagagaatggtggttcattcagagagcagcgtgataagcacataggatgaagatgagaaggaagggggaggtttccatagtaaccagtggctggaccacaaagaggcttgtatgttatgttaaagcacttgcatgcggtaggagacggagagaagtctacagtaactatagacttctggcccaggggactatggggaaggggtcccattaatcaacatgagaaagcagaaccgagagggaacagagagcagcaggtgggagaagctgggagaagagtgaagtgttacaggaggtctaggaacacaggccaggaatggagagtgcttttttttttttattacgtattttcctcaattacatttccaatgctatcccaaaagtcccccataccctctccccccaccacttccctacccacccattcccatttttttggccctggcgttcccctgtactggggcatataaagattgtgtgtccaatgggcctctctttccagttatggccgactaggccatcttttgatacatatgcagctagagtcaagagctctggggtactggtttgttcataatgttgttccacctatagggttgcagatccctttagctccttgggtactttctctagctcctccattgggagccctgtgatccatccaatagctgactgtgagcatccacttctgtgtttgctaggccccggcatagtctcacaagagacagctctatctgggtcctttcagcaaaatcttgctagtgtatgcaatggtgtcagcgtttggaagctgattatggggtggatccctggatatggcagtctctagatggtccattcttttgtcacagctccaaactttgtctctgtaactccttccatgggtgttttgttcccaattctaagaaggggcacagtgtccacactttggtcttcattcttctagattttcatgcgtttagcaaattgtatcttatatcttgggtatcctaagttttgggctattatccacttatcagtgagtacatattatgtgagttcctttgtgaatgtgttacctcactcaggatgatgccctccaggtccatccatttgcctaggaatttcataaattcattctttttaatagctgagtagtactccattgtgtagatgtaccacattttctgtatccattcctctgttgaggggcatctgggttctttccagcttctggctattataaataaggctgctatgaacatagtggagcatgtgtccttattaccatttggaacatcttctggatatatgcccaggagaggtattgcgggatcctccggtagtactatgtccaattttctaaggaactgcctgactgatttccagagtggttgtacaagcttgcaatcccaccaacaatggaggagtgttcctctttctccacatccttgccagcatctgctgtcaactgaatttttgatcttagccattctgactgttgtgaggtggaatctcagggttgttttgatttggagagtgctttttaaggacccacacacagacaatcaaggaaaccatgctggaggtcagaggcccagagacaaaggaagcagcgctgggacaaggctcaagagcaggttcatgggggaaataggtactcaaggaataaaaacactgagatgtgggcagaagacaagaatggagaacctgagaatcagatggaggcaggggcattaccttagtcacaagctatggagaggcaagtgagctcacaggctttgcccatcggatctaacacatggaggtggctggcaaattcaacaagagtggatcacatggaatggtaggaagaatctgagaggccctggtagaggagccgtggagaacacatacagggtgttagaagcatggctaagagagcaaaagaatgcagggacatgtgagaggtgtggggtcaaagggtatttccagggcaggatgcaggggcagactgcatactgcaacaccatataaacctactgtcatactctgtggctgtgaacggaaggaagagaacgtgtgtctaattttcagtctttccattacaactttgatgttttctatctgtcgtccctgtacttggatgctctccagtacctggtaggcttcacactcatttccgttttgtgattagacctaaaaagcgggcctttttcaagtggtgatgagaggcccagcactgacacccagaaattctcagccaccatcagagaatgagcttgtgggggcgagggaggaaaattgcaagaggaaaatgggaggggtggaggagggggaggagagagagagaaagggggagtgagagagagcagttgtgatgaattagaggggtgagggagagacaagaatgggagcagagaaggaaagggaggaagagagatcagagaagcaagagggagacaaagaaaagaggctatggcacagctcagtgcgggagcttgtgcaaggctcccaattcagtccttggtactgcaaaacatgcttgtttttaagtaaatgtcagggtctgaaaatcgctaaaggaagactcagatagaacgcaaaaacagagagcatttattctgcagaaacaaccagcatgtgggggtcaaccattttatgaaatggggaccccaaacaaaggcacgcaagccttcttatagggaaccaggggaactctctagagggactgggaaatccaaaatctcattggtgggtgctagggtgtcacaagtggtctggagtcaatggcctgcattcctatgtcataaatgtttaaccattggctgagatagggctatccagtgcagatggcccattctaagatattttcccattcttgtggctattcctgggctgttctttggaagggggttttatatcttgttctggattttatggtctgttcctagacctggtgtcttatgacattgtttctgggacttatggtctgttcatggagctggtgcctgtggccttctttttaaaatcagatctgatccttaaatggagaaaaatagggtttatgttgtcctttcaaaataagttctctcatggtttgaattatataaggaaaaggataagagaatgggaggagacaagaaatacttttaaagatgggagaaagatgtctgagaggaggaggatgggaaagaaagggagagaatagaagagaggtgggctaggtcatagtaaactggggagctgtctggaccagtgttgctgctttctaaaggcacataacatgagactcttgctcgggcatgtgtctgcctgaactgtgtacagaagggaggctgagggagactgacaggtgctcatggggcaaaaggcagcggtgggaacaaagctataacatcagacccaagagagcatctccccacaccaaggagcttcatccctcgtgggcaggggcaagcagtcccttctgggaaccagaaccgagtaggagtccctagacactgaggctgagggcgagtggactgtgagagagtaaaccttgccaaggagccacgttttgggagcagggcagttacagattttcgagagtcaaatgctctgcagtgcacgcaaaaggaaggagctgagttctgtctgtgaaagcaagggtaggtgaaaggagagaagtgattttataaagttgtcctctgactggatacatagtctatggcacaaatgcccactccatcacacacacacacacaaacaattaattcagaataggaaaaaatggacctcagattagaacagagaaataaatggatactagattaaatagggcctgtgaggacctggagatatggtcagtggttaagagcactggctgctcttccagaggacctgggttcaattcccagcatccacatggcagctcacaactgtctaaaactcctgttccagagatgtgacaccctcacatagacatactaaacagcaatgtacatgaaattaaaacaatttaagcccacaaaccatgaacagttacttaaatgtatacaaagattttaaatgtgaacatctggcaaccatctttatgtttttaaaggatcattctggattttttttttaaatcatgacagatattatctggctaacgatgtgtttgaattacttggaagtgcactgatttcctgctttgagaagctcaggggacagattcctcaagaaagagatggatggttggctcaaactaacataaaacacaaaacaggaacgtataaaatcaaattggagatgagtatccactgtgaagttctctcaactttcccgatgttggcagatgttagagtaacgccctgggaagttttaccgttttgactgttgcatggatattgccttggagggaaccagggagcctggttggagtctctgagcactacccctgctgcaggaagaacaggagcttaagccaacaacacctcacattagattgaaccatccagagtgagaggcacgctgccctctgccagagctacaaacttgcaagggagtttaattattcagggggtaaggaggatacttgagaagaagagttcctgtcaggccttggcactggctgcagacttcagataccctggggtgtcctagcttttttgttttttgtttgtcttcaaatgcattgctttggatgacctgataacccaaacggtgggaagacaggacaggcatcaccatccagcatccctgtcacttcaggtcaccccattcactgcccctccctcccccttcagaatgcctttaactgcctgcccctcttcccctggtctttaatctgttgctgttttcggctgcttgagtggctccatccacagccagccctgatttagcagccttcaatcggaaaacagatttctctggaagactgggacaaaataaggcaaaatgagctctgttcaagggcctcacagcacttctctagggacagatgcttggcctggagctctctgcaatcacccctcccccactgcacctgcatccatgctggctgcaattttgacacaattcctatagctctgtcctggaggtggctaagagagtcctccttatctctctccctccttgtggaggacatttttccattccagtaatgactcgtgtgactcatttttggattcttgctcttgccacatccacagtcattttaaatttaatgttcagttccaaaacgcttacttgtcaagacttgttgctccctgggtgtctatacaggacagacgtgagtacctgcctctgctgtccctgtggacaccgatacaaaagagaccctcgaagcagaaatgcctttccatttggcctctggcttcaggaaatgagtctcagctctgttgaagaccagacatgcaagttgggctgataaccattactgctctgttccggaaaagccaacacacccccacccccaaagtctgactgtgacgtttaatttttttaaagatctggatagtttctacccctcagtcctgggggcatccccctcacctggttcataagcattaaatatggagtcaaacaagcctttctcagattctagctccatcaacctctgtccgagcctcagtatcccctacaaaagagagtgctcatttggggtattcttgcaggcagtaagccagactgtgtaccagtgccctagcctccagccccgtgactagtcctcgtggatgttcagtactccatacccacgcatggaaactgctattttccctgcacaaaatcaatgtgctttgtacattgactggcagctgaacaccgtgtgctgtactttgtcttccttggtggaaatcacaaggaatgtttttatttatttactactttttgtatgaaatttcagtgatttttggctacttttcctttggagacagaacataaaagacaagcaaagttatgggcatcacctccaatgggacctttggagcagcgatcagaccaggcacagggtgcaaatgcaggctgcccctggtggccctgaggggcggcttttgtttcagctttgattgttgcttaaattcttggctggccaagctgcctgtctgtgcacctgcgtgctgctaagctagacccggatgctgtgggaggattctgttactcagaggccccaggggtctgagcagaggaagggacccgaggaagcttctgagaacaaaagatgaaggactgttaagacatccctgggctgtgaacttttcatgatccctctcaccccacccccaccccccaccccgccggacagattctgccaacagctctcattacagagcaacagactgatagaatctaagttatttccaagttctcacaggttagaagcagtgctgagagttgaacttgccacccacttcagggatctctggtaccacaaggtcttgtttctctctctctcttggaggcaggctactcaggtctagctactggcggctctccacacctgtagctcatagaagctgaaggctgataaaagggcagtgggtggagcgccctcagcccgctcacctctttggcatcaggaggagcaacaggagggccctgccttgaaggtacatctgaagacaatgctgagggggctggtgtctttcctctcttcatcttaccttcccggtctttcagaatagttgttctttgtgcaaacttggagctggctctgtggaagaacagtcttgggtttggagttcaggatgggttctgcagaagagtctgggtctctaagtcacatctcagacatcctgaggtagactactactccggctaaactgctgatgtgtagggcaggctcccagcaagcctaggtgacgtaagacccatgaagtcctggcagtgaggactgactggagccctcctgaagccgggtttgcccttgttctagcagaggggcgatctctctgtccagcctctccaccaccgccccccattgccagtacaacccagaagagaactggaaatgtatcagcaaacaccaaggtacaagccagccttcgtgttcctgtgctaggatgagggcttaaaggtggaagtctcctcagcccctagccctgagaggccagcaggggtcttaggctgtctgttacagcctgacacatagggtgtctctgagatagactggggttggttgaaatgagctaaggaaagctcattggttgaagggtcagggtggggatgaactactctgaggagctggtgtggacccttcctagggaatagaactagggttggcatgtgatggataaagctggctttgacatcccaccccaccatgttcttttgccataaggagaatctgtttactgggaattggttacttggccaagaggctggctgtgggctgggattaaagctctaaacttcgaatccatattattaccaaactagcaaactgtatctaagtgagcagcttagatccattccttgcctggcctcctcttcagagctgctgtttgtttgtttgtttgtttttctttttcttctcttttcccctgttggtcagtttgctttctacattcctgcaatggtttgtaatgagtgccagatccaagtcttactctacattctgtgatgctgctctacacagaaggttctaggagcagccagaatatttcagcaacctaaggaagccttggagcccctcctccctcttcagtgcctggtggttggcaggagtggggtgggtgttaccttcctggtctttcagaagactaggttctctttaccatgggcttctctctgtggcaggtcatggcacagtggtggcagatcctcttggggttgtgggcagtcctacccaccttggcaggggacaaactgctcagcgtctgcatgaattccaagcgccacaagcaagaacctggcccagaagacgaactctaccaggaggtacagagcagcgctggcccaggggctagggcagcttcttaggattatttgagaagaaatacagaccaggtggtctctgtaccccaccacccctaatcatttagatccttaatttggggtccatctagggctttgccactaagctgttctggccgcttgggaaacaggtcatgtggtgatcccagaggctatgctagctaaccgtgggtcagagcaagcctccctgccaacatgcgctggcgagacagaccttaatttgtctccttgtcagtttcctaaaggctgtgggaggaggaacattccaacgagaagctcctcccacccgtgataaccacccaggttcctgaatctttctatttgctttcctggatttattgccccacccccaccccctggagcagacacctggaagctatactttgtggcaagaaggcagaggggagggaggtcaatggtcaggtgcgcctcattcttcagatactagagttcctcctctagagaggtgctcatatcccctctcctgacgcccttctgcccccacctcagtgcaggccttgggaggacaatgcctgctgcacacgttccacaagttgggaagcccaccttgaggagcccttgctctttaacttcagcatgatgcactgtggactgctgaccccggcctgtcgcaagcacttcatccaggccatctgcttccatgagtgttcccccaacctggggccttggatccagccggtgaggacataggagacaggaggcagactcatgcaacacccttccattcaatcctaggctggcatctacaggaggcaagtaggaacaggagatgctgcccctctagggataagagcagagccagaggtctctgctggagacagggatgaaaaggaagctaaaatgcctctgtccctgcatgataacatgacagacactgtctgatgagggccagtaggataaggcagggtggaatgagatgaatctgagtgtgaattctatctcctgtacttactaactgtaaggcctgggaccaatgagctgctctgcctcacggttctcatttatccaataattgatgatgatgatgatgatgccgatgatgatgcctagggctgagagatagcttagtcagtgaagtgcttatcactatgcatgaggaccttagttcaatccttatttaaaaaaaaaaaaaaagccagatgtggaggtatgttgctataatcccagcactgcagaggcagagacaggtgggtcccaggagcttgcttgccagccagcctagcctgcttggtcaggtctaggccaaagagaaaatccgaaccaatgtggatggtgcctgaagaccaatacttgaggttgttccctgggctctgcagagagaggcatgggtgctagcatgcgtgcacgcacacacattcgcctgcatttacagaatgtaaacacgtgcacgcggagagaagaaataatacttacattgtaaagaattaaaatatgcccctctcttctgcatccaggtggtcccaaacgggcaggaagagcagcgggtttggggcgtgccgctgtgccaggaggattgtgaggactggtggcgagcctgccactcatctttgacttgtaaatccaactggctccatggctgggactggagtgagggtgagtggattaactacgcacttgtggccctcagactgggtgaggctgcacggggctcagaagggaagggacagtggaaagttaggagcccgttctcaatccccacagagaagaaacactgccccgcacatgagccctgcctccctttttcgtatcacttccccaccccggatgacctgtgtgagaagatctggaacaacacattcaaggccagtcccgagcgcaggaacagtgggcggtgtctgcagaagtggtttgagcccacccttagcaaccccaacgtggaagtggccctccactttgccggctctgccttagccccacagctctcttacaccctcccagccttctctctgtgcctgttgttccatccctgatccctgcttccctctccaacccacatttcctgatccttctgggccatggccatctccatcctcaggctattcatgttgggggcaggctggcacctgaatttctcatgcctcccagggtcccctccatgcttggctccatctccactggtctggatggcagctggtacccagcagtctacggtgcctcatttctcctgcctttacaaatgggcactactataggactccggcgcttcttctgtccacagccatctcttttgtgacagagacaatgctgacagccaagcgacatgtcctatcatggtaccttcaataaaaggctaggaaactctactctccatgtgtcattctggtctagtcccatgagcaccaatccaagatgcatcgagagagctgccttgccttcattaagattttaatttccttgactattaaggggtatgagaattgttaatatttatttgtcatttggaatgtttttctcttatacactgtgtgtgtgtgtgtgtgtgtgtgtgtgtcccttcctttcttctctccccttctcttttcttgagaaagactctcatgaatcccaggttggccctggaactcaaggatgaccttaaacctcatcttcttccgtccaccttccagttctgggcttatccacatatgccatcgcccctggtctcgggctgtgctagggagctaacctgctaggcaagtaccctaacaactgaaccatatccacagtcatgacgtgctggtcttgaattttggacccttgacttctaagctgcttttttctactttctaatacacccaaccccccacccccgtgttgagaactgaccctggtcttatgcttgctaggcgcatgttttaccactcagctaaatccccaaagcctttccactgctctgtaactcttgacaattcttttgatcttcatgtcaagattgctttgattttcttttccactgagagaaatgaggtgttggaccagatgatttaatttacaaacaaagaaggggggacccagggagccccacttgctagatcacatccaaaagcctgaaacagaagtatagcattagcttgtagaagggccactgcctcaagtattccctatgagtagatccacggtgttgatctgtgtgctaggaacctcccagagtcagaagctaacccctcccaatgctagatgatggcttccctgtcacactttcttgtgacaagaggacacagcaggtattttctcaagaatgctgattctctcttgacacgaactctgtctctgtcgcaaagccaagtgtggtgctcagaatctggagcaggggacagctgtcagaaataacaaggacaaactcctgtataggatatctagaagaaaagggccagctagatgggtcctgaaagagtttcagagaagcaaggcttgaatttcagtggagaacaaaaaaatatgttctcaaagccctttgagacacagagaccccaaagaacagagctgcccatggcttataaatgaactaatacatacaccttcaaaattacctacaggaagccagacatggtgacacacaccatggagtctgaggcagaaggctgactaagtttgaagctagccaacatataatacagggacactcccacccccatctttctcttcagaatggagaaccatggagaaactgagggtgtcttgctcatgcagtcaagactttaatgattttaaagtgttataagtgtaaaactcaccaaagtagagttagaactgaggtgaagaaaacaagactagttctgttaagcagtcaggttctatcaaccactggatgcacaggaaggtctctaagtatgtaacaggtcaggttttccattggagtctcgtgaaagcactgatgcatagcctttatcttcacttttcagactagaacatggccaagatatgtttgaaaccagcaaaatctaactcccatctccagcagaccccaaagttccatgtgactgcacatccttagcctacacacccagtctttggcaactctcatctcaagctgaccctcatgtccagcttatcccagctacaaccaacccccatttccagctagcccccatctccagctgacccaccgctccagttgaccctccccccagctccagctgaccttcgtgtccagctgacccaccccatctccagctgttccccagctccagtgcttgtactgaacagcctggcccagggtggaatgaggcagaactgtagtcaataaggaaggaagcaagggtgagatgaggctggtaaagctgggagagctcgtatggctagagagactgattcctgcccctctccactttgggatagagaagtgggaggttttactagagagaagtgaactgttgactctcagattgtctggataagcactaacacacatgggcctaaggacttctgacgcctagctcaaagctccagccagcaccgtcttctactccaagaccatggctgagaggaacccacccctaaccatttatccacacaaagttaactcttaacctggtttttcttttctgctatacagactatctttctacactgtgtcctgatagtttcttgaattcatcttccaatctttttaatttcagcaatccatttttaattatttccaggagaggtttcccattcccttgtttgtcaccgcctgctgctctgggttttgaggctgtaatatcttcttaagtctcaccgaagatctaattaaatttttttttcaaaagctgtccctagtctctgaaagatgcacatcccccaaggttgctctgttctgctctctgatgttttctgtactccgctggttttccaagtctggtgacttcggcttatccgtctacacttaagaatgagggctgggtgtgttttatagagctggtttggttttgtgaatgcttgtttatatgctgctgggaatttctagatgtgggatggggctgtccactggaagactctgcttagtaagagtgtggaggtaaatgaggaccacttaagtgggccccagggaaggccgattagtcaggacatgctttgtttgaaggctgtccctattacaacttgcattttggcagagaatcaaaggcagagaaggaaggcttttggtctgccctgaaatctgtgctattggcagaggatgctggaaatgaggtagtttgggtcccatatgactgggtaaaataatatttgttttcttccacttggtcccatttggaatcatagattgaaaaactaggatagtggctggagagatgactccatttcacacaatcatggtggccagagttcgtattctatcacctacatgacaagccaggagcccaaaagcatctttggccctagctcagaggaatccagaacccctttctggcctgcttatcttctcacacgtatacatacccacacacttgtgttcatacctcctgcccatccacacaaatcattcaaaactaaggaagctaacagctgctcttctagttcttgctatctgtgtgtcaggaatgaagatattctaaagaaacactgtgcctatctttgtctatcagactacttgataagataaactttccctaggagtattaggctaggagaaggaacaggctggagcctgggaccaaccggaggaggaatatgttgtttcctggaaagagatgtcacacagttctgacaccttagcagatcatcttcagggaagactgcatctgagacaagtatgggtgggactccttgagcataatcatgcatacttcttgctctctgtttaaacctggacttcaagtcaagatgaagggtgcatttggtgcagaggtgttactggacccctgtgcccttcttccaacatagagatgcacactgagtacatttctctgggcttttcactacagctcgtctccttaaatggcttattgaggaaacagacagaattcctgtccttgaaaattgatattttaataaaagtagtgcaacaatgtaagaaaacaataaaaaagagacttcaagaactatagacaagacatctgttaggaaagggagcacaggggactctgggagggagaagaagagccaaaatagaagaaatggatatggtaaagacacctggagaactatttggttttctggggtgtatacttggggtagatgaggagtgctagcggagatgaagcaagggaacagaagacaggcagaagagcccaaggctgagcacaggttagtgggacaaccattctttgcctatggagacaaagacagaaaccatttaaatgcatgtgtagaatgaactgcttcagatataaaatgctggctcagttagcaccaagcttcggccatctgctgagattagatgctcaaacctctggaacctcaggggctttctggccacactgtggggtctgggcagctgatcctcatggctagctttccaagttcacagcccaggatgcttatctctcctccaccatatgggaggatgaacttttcagaggaccaaactccaccaaagagtgagattcaaaacccagagaggattcttttccggctaagaacacattatatgaatcctaaaagttggcagcagcaacagaaaagcccctctgagctttgcatctgcccacagcaatgaaggctatgtcagagcactctggaacagctgctgattgtgaagctgatgggctcaggccctctgcctgcttcatgcagaatgaactagtacttagcaggctgtgattacttccattcagtggtgagctttgggaggaaggagcaatttttcctaagctagaatccggtgctatagcaaaaagctgcaggaagccgggtctctgaaggggctcattgctcaaatagcttagttcagctaatcctttgtgggcataaatcatgtgtagcctccttccctcggagccctcagagcatcacaacagcacaggaagttgtggggtgccgtgggttcgttaattcattagtaagtaatctctaagttcagaacccattccccagctcggggaagctgagattatttcccaacatatctgtttttagtgtgacagttttaatcagccctctttcagtagcacagagcatgcaccatgaattgttatcaaacagagctctggatgctgaagagctgagtctgatcaagtcgaaagaaaatgggagtgtctggtggttggttagctgttagcaggcttggggggggggtgacctggggtggatcacacccttatgctcaaaggaatggagcagaaaaaaataataattgctagtccgaggaatggatcttgagtcttatctctggtcctaggaagaggtgtgacaccctgaatggccctaaaagtcactaatgggaaactctctaagctgtctccaggagccctgcacacagccgtggccaacctcttgtctcaacattacacaacactgtcacctacaaagttcacactcaggcagaatacccgagtttggttcccatcatcacctcaggcaacttccagcaatgccctcttctggccttctcaggtactgcactcacatgtacagaaccacatacatatacacatagttaaaaataaaaacaaactatttttaaaaagccactcgatcaggttataaaataaaaggctaataaacatcataatgttttaagtaagtttcagagtttgtgtttggccacattcatagctgtctctaggtacatgaagcccatgaggtacaggttggatgtgcctgctagcaggaggctttcttattaaatacgagacacggtgtttctttatataacactcaatctagactgtcaaatactgggacaaagcctttcgggaaaaccatggggcagtggtctctctggctactgtctactctctccccttggaagtctgctctattctgcaacagagttgccttgtcaagtggaatacagagatgctgatgacaaatcatgggtccctaaaacaatgatgtggggaagtagatgtcacagtgtctctctcctatctgctctcaaaaggctagcagcaagaggcaccttctacaccactgagcttcaccaacagtctcagagcactgctaaggaaatgtagccatttcttcccacacccatctcagattctgcatcctgagcctacaccagtgtgtggtgagtctactccatgctgggaagtttcatgcttagcatttctgctactctgcacaccttctgttttagaaaatggcacaccatccaaagtacttgtcaagactgcagaagaggataggaggtgataagaggacaagcaaaccagacgatgcacaggtcagagccactggcccatgcaataaggggcaggtgtttctctttttatcctgcaagtaatgctaatagcatgtcaggaagtgggggccaccatgccacttcctcttcaacaggaccactgtcccaaaaacacacccttctcaccatcttgcctataatgaagtcactttgtcagccaactagatgaactttgctaagcacccgatgcctgtctcctcgcctcccctgggtggggatggagaactaaaatccatctttactgcctgagaggcctcacattggccatcaactcgataggatctagaatcacccaagagacacacctctgggcatgcctaggagccaccctgaatgtcgatgtcaccatccaaggtatggtctcagactaaagaataaaaaggagaaatggagctgccgtcacttcctctcctcctgcctgtggtgcgatgtgaccacgcagtgaccatgcagaaggcaaaggtcacggtgcacacagataaacgcaaacatgccgctgctctctccaaagggagaagatacttggctcttctcctggaatgctcggagtaaaatggagtttacagttctctgctccctgttgaaccaggctctacccatatcacccagaacactatgtttgtttatctctgatcttttcctcctaaatcttgattgttgcttctaggccatagaagccaaccctatggatgatggcacttcacaacagcctaagtgacctctgtgttatcttagggccaggccaatcctgacacccactggcactgtgtttacctcagtcatgctccctagacctttattgtgagcactgtttctgagtccacagaacacatctttatgaaagagctacaaatgtaaacatgccttaagctttgctgtactcaaaggactgaggtaactgttatcaggaaacttccagaattgtgctgtgcttaaatatggctaaaataaactggtaccagactctccaagatttgtcccaacataagtacctaatttgggctgaactgagtttcattcttgtcccttagtggctcatttccctgctattcagaggcctgaagggaaccctcatgtgaccaagagactcactcctgccccatatattccccaccatgatagactgcacccttgaaccttgagccaaaatgaaccctctctccttaacttgcttttatcagatgttttgtctcagcaacaggaaagtaacagatacacaccccaaagtcacaccgagggaagatgagagatgtttgttaattaatggaccactgatctgctttgtctgtggaacagaatgaagttcattatccagaccttgaggtgtatccaaccccttcatagtcctcttcctgagcccagatgcccctgcctgagcctcccttagggtaacccctccctcatgccaggctgggccttgtggggtcacgcttgtcatctatggcttgacaactgattttaccacgtatggctctgctaggaaatgtgatggcagccttgagagagcagaatgctggagatgacagagggagtaaggttctactctaagctgcccatgatgccagcagcatggaggagccgagtcatctgtatctcaccggggagcaatcggaggttaatttcttctctggggctgtttcttagaaaggtggttacagacagcactctgcttacagcctagtgttgtctgccactgcctgccacaggagactgtcatagtttcactctgaatccatgtgtcagggttcagcaaaaaggatgggtttctttattccacagcccccttctcttttctctctgaaggctcatagggctctgtctctaaaacgatcaacaagaagctatccgacgctgtgggtagaaacagaaggcatccccaaccccgggggcaaatgagagcaagaaggctgttggctcagatgttgccatggcaaggctaccagccagcattccttgccaattggcagagatgcagagtcaggtagaagtggaaggactcatcatttaaagaagaagaggaagctgtggggattgctttagcatgctcaggtgggagtttgctgtggaagctgagggcagggtgatgaactgtggggcgtcttctgtgatagatctggctttctgggtgggggctgaatgggaacaaagagtaaggaagccaacatcactgaccaaggcatcaccaacctgcaactggaagtacaaagctgtacttcttgctaggttgcggctgatttcttgcggtttgggggtggggaacagtcaaatcatagataactctaggtaacaaagtatcagcaactgttagtggcttctgattttcatcagtccacaccttccctgggtcagaaatcagagtgtggtttagctgatcctcaggttcagggtctctaacaagaatgtaggattaccaggttctgtagtcatcgtgatgatgaaaatggagattgaaatgtgccaggcagcttagaagaaagggccccatgtccttggttctctctccagccagaggtaatgaaaagaaactctgatttctctcttcctggataagcacccttgctggtgctctaagtaggggtgtgactgacactctagcccagatgctaatcccttctggatctctagattttccccaggtatatcccatttcctaaatgattttagagctaattctatggaggtcagaatgttatcatagcagtagagactcaccaggagagagccatagtggccactcggttaccataacagtggattttcatcaaggaagaacgtggtggactctcaatggtgagggcagggccattcttccttccatacttgtttatgattccataaccataaaataacctctttgctcttccagtaatccctgactcgttggcacttaccatgttttaaactcaagctgtcagacagggcaaatgattttctttctggaggtccataaagtaagagagaacaaagcaaggtaattatataagcaacattaagagctgtttggccttgggtgaactgagaggtgagtagagaaaggcacagcatgctttcctattgcaaagcctttgtgctcagaagcagatttatgtaaattaacctctgtctacaaactatcaacacacattagcatgcattgtaaccacagcctcagaggctggtattgtggtccccattagtgaatggagagttaccaagctaaggtccctaagttgcagagcctcacttcagagcgtgcgaggtgcctacatatgtgtgcttctcttccccagaggcacggaaagcatttaatggttagaacaatagacttatagaaagtaccaatcagcacagtttcaaatgaacaacagcaaatcagccaacagtagctccgataaaccgagggcttagagtcccagatcaacccaggttctctgggttttctccatctctcagaacaatatcatgctggccagtaagcagtattgcccactggcttccaggtctcagttcttcagtctatgggtaagaaatcacagtccagaatggttaagtgacctggcaaaagtgtctcaggtaggtggccattgaattttgaaccaagaatcctaacttatggccttttctgctcctgaatgactattgtccaggcagtctgctctgtgcctgggtttttaatggccttggtggtagaaatgacacttcctgcaattatacagagaaagaaaagatggctcaagtcagaggtgacagagcctcccaaagtcccacgggatgctgatatcgccatggatatctaacttccaaaatgcaggctgatgttttatatcaagatgcgctgaatgaaatatctgtctcctccttagcttgaagcctgccgtagagatcctaaaaactcttggaatttcctgatgaatgctttcttcgtgctttaaagtggttactggtagctcccaagctagtgttaggatggggcatgagaaggtccag

SEQ ID NO: 104 - DNA, 1270 bp, Mus musculus
gcagtgctgagagttgaacttgccacccacttcagggatctctggtaccacaaggtcttgtttctctctctctcttggaggcaggctactcaggtctagctactggcggctctccacacctgtagctcatagaagctgaaggctgataaaagggcagtgggtggagcgccctcagcccgctcacctctttggcatcaggaggagcaacaggagggccctgccttgaaggtcatggcacagtggtggcagatcctcttggggttgtgggcagtcctacccaccttggcaggggacaaactgctcagcgtctgcatgaattccaagcgccacaagcaagaacctggcccagaagacgaactctaccaggagtgcaggccttgggaggacaatgcctgctgcacacgttccacaagttgggaagcccaccttgaggagcccttgctctttaacttcagcatgatgcactgtggactgctgaccccggcctgtcgcaagcacttcatccaggccatctgcttccatgagtgttcccccaacctggggccttggatccagccggtggtcccaaacgggcaggaagagcagcgggtttggggcgtgccgctgtgccaggaggattgtgaggactggtggcgagcctgccactcatctttgacttgtaaatccaactggctccatggctgggactggagtgaggagaagaaacactgccccgcacatgagccctgcctccctttttcgtatcacttccccaccccggatgacctgtgtgagaagatctggaacaacacattcaaggccagtcccgagcgcaggaacagtgggcggtgtctgcagaagtggtttgagcccacccttagcaaccccaacgtggaagtggccctccactttgccggctctgccttagccccacagctctcttacaccctcccagccttctctctgtgcctgttgttccatccctgatccctgcttccctctccaacccacatttcctgatccttctgggccatggccatctccatcctcaggctattcatgttgggggcaggctggcacctgaatttctcatgcctcccagggtcccctccatgcttggctccatctccactggtctggatggcagctggtacccagcagtctacggtgcctcatttctcctgcctttacaaatgggcactactataggactccggcgcttcttctgtccacagccatctcttttgtgacagagacaatgctgacagccaagcgacatgtcctatcatgg

SEQ ID NO: 105 - protein, 271 aa, Mus musculus
KLKADKRAVGGAPSARSPLWHQEEQQEGPALKVMAQWWQILLGLWAVLPTLAGDKLLSVCMNSKRHKQEPGPEDELYQECRPWEDNACCTRSTSWEAHLEEPLLFNFSMMHCGLLTPACRKHFIQAICFHECSPNLGPWIQPVVPNGQEEQRVWGVPLCQEDCEDWWRACHSSLTCKSNWLHGWDWSEEKKHCPAHEPCLPFSYHFPTPDDLCEKIWNNTFKDERRNSGRCLQKWFEPTLSNPNVEVHFAGSAPQLSYTLPAFSLCLLFHP

SEQ ID NO: 106 - DNA, 22056 bp, Homo sapiens
  misc_feature (1)...(22056): n = A,T,C or G
cagagccagtgcttgagaaatcttagttgccttccccttattcatggaatgggtaaggcacagctctgagaacaaccatcctcatatcctaggtttcttcacttcacccaaagagaccatttatccttcagtagaaataatcccagaacacttcctccagattcaaagaaaacaccatgccaagggatttggcagataaaggaggagataaaggctttccacatttctatgaatgaatgcaatgctttgtctttaaggaaaatacagcaagaggcctcaatgtttcctcttaagccccagtttgcatggcaaccagacattccacacactttgatcataaaacggaagcatcaactcaaatgtgaaaagacacttagcaacttaaaatctattatagtttcataaattggagtctttgaatattcccaactattaacatttttcagagatttaagtcttaaataaacttaaagcaattcaagagcttcacataatggtacatctcactggtctataataaaggtatctgaagaatcacaaaatttacttttctagaaatggcaactgcttaatgattgtattgcaaggcaatttacccacagcctcctggaaaattgattttcctctctctgtcttttcatttgtaagcacaagggcataaagagccaaatatttgccaccttgaaactatatactttccattattttctgtctataaaaactataaaatacattgcggaccttccagctcttctgcgagatttctcagatattttcaatgtaagacaaagactaaaacaaatccaaaaacatgcatatttgttttctctaggctatgaagtataacccaactgattccgttcttcaaacttgaaattgtgtacttgactaagaaaaaaacaaaaaacaattcaccaactgcatttgccaagcctcatggtttatagagctgtggggagtcaggaagatgagcccagcaagacacaggacatctagtgataagagaggtgaataaagagaagaaaaacaatcattttctacaaagtagaaattgaaacgcctgcaaatcacatatgtacatgaccatctaaatatgaccatacacagaaactcagatttccaagaatttttcctggtatgcttcttggcaaaaatgaatcataggagaaatcttttttttttttaaccaaaaaacaatcccttgttcatttaacaaatacctactgagtgcctatcatgtacccagaactgtggttataggtgtaagactgacagacacagtctctactggtctaggagcttacagccgcccagtggggaacacatgagtcagcaggcatctctggaatagtgtggcaagtgacatgatggaggtaacccaaaagctatgagagagagtacctggaaggacacctaacccagatttgggcttccttggatatagatatcttcaaattgaggtctagaaaataacaagttagctaaaggaagatactacatgttttgaggatgacgggggaggtcccatgtgaaatggaacagcatgtacaaaagcctggagcaacagtgatcatagagagttcaaagtattgaagatagttccgtttagctggactttcccacactaggaaggataggattgtggatacaattctaatgctgccaccaacactggcttacatccttggaaagtgaaggggagagatggggggaggacacagccacactgagagtcatgctttgggcagccttgcctgcagggggccactgaaccatacgtattatacccatgtaaaattgtcccagtctaaaagaacatatgtaggggtgtttcaaggtcctttgagaggagctactgataagtttgcacctattcaaatacttatctttttaagcatactaggttggcaggaggggcatccactgaaaattggactgtgaggaaagagcatggcctgtggagtcagaaacactgagttctaccccaggttcaggccctgtgggttgtcacacctgacacatcccattcactcactcactcattcatgtgttcaaatattgagaggcccttctatgtaccataaactggcaggagcaggtgacagaaggtgatatggttcggctgtgtccccacccaaaatctcatcttgaattataatccccataatccctatgtgtcaaaggcagggccaggtggaggtaattagatcatgggagtggtttcacccatgctgttctcatggtagtgagtctcacaagacctgatggttttatacgcgtctggcatttcccttgcttgcactcacttggtcctgaaaccctatgaagaagatgcctgcttctcctttgctttccaccatgattgtaagtttcctgaggcttccccagccatgcggaattgtgagtcaattaaacctctttcctttataaattacccagtctcaggtatttcttcatagcagtgtgagaacagactaatacagaaggataaagcaaagtcctcactcttaaggaactcaagagtctaaggagggaggggcaagcaaatatgcagaagattgcatcaccctgtattaaatacgatgctgaaaagaagcattgaatgccatgagagtccacagaggaaggggcaaaagcaggctgtcttgtgatgaaggtgcctgagcagagcccgagatgatgagcagcctggcggagaagcagggaaaggtcatccccagcagatggagctgcagatgaaaaggaacagagcagtggtggctcattcagagagcagggagtagctcagtgtggctggcctgaagggtgaggatgggatggggggtgagaagtttctgttgtaacccatgtcagatgatgaagagcctcgaatgaccatgttaaagtatttgcatgaggtggcagaggaagaggggtccaggatagctccaggcagggtgactggagggaaggggtgccattagccagcatagaaaagcagattgaatgaggagctaaaacaggtaagtgtaaggtgcctgtgagaaattcaagtgcaataccactggaagtatgtagatatgtaattctacaggtcgggactgtatagagatttaagagtacccacatatagatgatcactaaagccatgttgggggtgagattgcccagagagagagtgtgtaccgtaagaagagaagaggtccaaccaagaacagagccccagaaagcacttaaagggcagaaggcggaaatggaacctatcaaagggaccaacaaggaactagttgagacgcaggaggaaagtcctgagaatcaagaagacatgactttcaagaaggccagggggattgagtactttggtcaaaggcagctgaagggtcaggtaggatacagatggaccttacccactggattggataatttagaagttgctgctgaatatggccagagtggattccagggaacggtggtggagccaggcagcagggagggataatgagcataaggagacacagaggagccaccatgaacatacacaggttttatacaaaacatggctaggaagaaaagacagtttggtagctgacgtggaacttagggtcaaaggacagttccaggacgggacgttgggtggattgaaaatatatgaagaggccgggtgtggtggctcacacctgtaatcccagcactttgggaggccaaggcaggtggatcacttgaggtcgggagtccgagaccagcctggccaacatggtgaaaccccgtctctactaaaaatacaaaaattagccaggcttggtggcacgtgcctgtaatcccagctactggggaggctgaggcaggagaattgcttgaacccaggaggcggaggttgcagtgagctgagattgcgccattgcactctagtctgggtgacaaagcaagactccgtctcaaaaaaaaagaagaaaagaaagaaaatgtatggagaacagtgcaaattgtaaaactgcatgcaaaccttagttactagttaataatgctctctgatatacccagcagcagcctggtttgaatgtgacaatgtgacataagtgtaatggtgagcaagggagccatcagcccgagaaggaaaatatggagagtaaagacatttgttctttctcccctgtctgtaattttcagttaattccttgtccatagaacactggtgttttgctctctgttctccccttccttggactctcttcaacagttgatgagcttcacattcatttcccttgtggtgattagacctaaaaagtggccttcttcaagtggcaatgagaggccccagcattaacgctctgaaatatcacggaaattatcagaaaatgaagaggctctggttggaaaatctgggagtgaggaagaaaactgagagaggaaaggcagggaggggaggggtgggagaaaaggctgagaggagaggtcactataaactaaaaggaggaagaatagaggagggaaggaaaagaaagaggggataggaaggaagagaggagaggggagggagggagaggagagagagaagggaagagatgggaagaaggatggggagagggagaaaggagaggtcaccttaagttggagagaaaaggataggtgagcacatgataaaggagaagagagagaggaaaggaaggaaggcaggagaaagggagagatgggataggtcaggttaaactagggaggtgtctgaattagtattccaggaagagatgctgggtggattgaaaatgtatcaagaacaattgcatattgtaaaactgcatacaaacctcagttacgagctattacactcagcagcaggaaagaagagaggcagaaaagagagatgggatacgtcaggttaaactagagaagggtctgagttaaaactatgtttttaagaaatgcagtttgggccaggcatggtggctcacacctgtaatcccggcactttgggaagccgaggcaggtggatcactggagatcaggagtttgagactagcctggccaacatggtgaaaccccatctctactaaaaatacaaaaagttagctgggcatggtggtgtgcacctgtaatcccagctactcgggagggaggctgaggtgggagaatcgctggaacccgggaggcagaggttgcagtgagccgagattgtgttactgcattccagcctaggcgacagagtgagagtctgtctcaaaaaaaaaaaagaaagaaagaaaagaaaagaaatgcagttttattctactcgggtatttctcctcattgcagacaacaaattgcagagtatgcactctgggccagggactgtgtttgaccctgtgactattactgtctttctggagctgcttacagaagaggcaatgtcgagcctgtctgcaggcattcatttccaagggcaggaggtatgtgcaatgactgcagcagcataagctccaagagacatctcaccagcccatgacggccatacaagcttccctgacaggaagccttcagttctgagagctgaggggtatgtatccctagacacagaggctgggctatgacagaacagccctggaagtggggcccctgcaagcggcaggacaatgacaggccgtcaggcctcaggagtgcccagagcatcaatgagagcaagtacaacagattaagatctaaaagtaaataaaaaccacatttaaaagggctggtgtgccatgttaaggacctgggacttaccttaaggtctagaaaggttttaaacatgggagcatcataattgtctttacatttttaaaagatcattctgaaaaacaaagactgcaaacaaatgttgaaccctagttaatgatatgcatgtttgaattacttaggaagacatcagtttactgatatctgcaatttactttgaaatacataaaaaataataagactgatacctgaatagagagaaggatggttggctaaatatataataaagaaaatataataaaatggtaatggtgaaatctaagtggtgggcatatgagagagagttcactataaaattatctcaactttatgtttgaaaactttcataattaaaatactgataaaagaaacgaaataattatatgaaaaatatacctgcattcttatgtttattacagcactattcacaatagtaaagatttggaatcaacctaagtgttcattaacagatgaatggataaagtaaatgtggtaaaatatatacaatgatacactattcatccatataaaagaatgaaatcgtatcttttgcagtaacatggatggaactgaagccactatcttaagtaaaacaactcaaacaaaaagtcaaatactgcattttctcacttaaaagtggaagctaaataatgtgtacacatggacatagagcatggaataatagatgttggagactcagaagggcgggagggggtgaggtataagaaattacataatgagtacaatgtacaaagcacagacttcaccactgtgcaatatatccatgtaaccaaactgcacttatacccttaaatttatacaaatttaaaaaaattctgagaaattagatcattatggctgctacttgattaaagctctggaaaagggtgggagagctagttaggaggttgttgcagtaactgaggcaagagccgatcatggtccagacagtaagtaagggatgtgaattcaagagatatttagaaagttaaatcaacagcttcggcgattggatagacatagagtgaagaataaattaatatccctatttacctccctagacagaaaccaattaagagtttacatgaggatggtcaatcaggtttggggtgagaagaattcatgagacccagtaagaactctgaatcactgaagtccccttcggctggcctctgacatcagattctcaccaggagactcctggctctagctcttcactttcgtagtctgttctcaaattcagtgggggagtgacctcaggatgggagaggggaaggaagtcatcactgcccagcatctccagtggccccaaaccagagccaaggctgggttgcttcacctactgccctgccctccttgtcctccctcagagcccgctgaaggctgctgtacctcttcttttggaaacgcaagtgttggttttgttgtgtgtgtgtgtgttttagaataaaaattgtcttgaatcagccacttcaaattgcttcatctacagtcagctttgacttatctgctttcagtcagaaaacagattgctatggaaggctcagtcacaataaggcaaaaatgagctttgctcaagggtctcaagctgcatctcccgagagcagatgctggccggcctgatggttctctgaaaggcagcctcactcactgggtaattccttcctccctccctccctccctccctccacctgcatatgcgctggctgcaattttagctcatttcctacagctttgtcctggagactgttatcaagcaagccgcccttcgtccttcttcacaccctatgaaggacagttgtcagaggacctatttccatttcaataattactcttgtgattcatgtctggattctcggctctggcacctccacagccattttaaactgaaccttaaaccccaaatctcttaccttatcaatgcttggagcttcctgaatattcatgaggaactgaacagaacatgacagcctgcttctccctctgtcaggctatagagatgctattaccatttggtatctgaccctaaggaggagactccaggctctgcttaacgtggggacatgggagactgggttgataactgtcactgttctagaataaagccaacacacgcctcccaatacatgcacaacctcattatggcatttaacgttaaaaaaaaaaaaaaaagcagacctcacttgagacccaggcacccaggcagtatctactcttttagtcccggaggtttctccctcacctggtccttaagcattagatagggagtcgagaatacctgaaattatatcccagctctgctactcaccgctgagcctcagttccccacagctaaaacaaggagggtgttcatattggaggtctttttgagacctcagatcctgtagacagtaccaggccagtgcctggctccttgtttgtgctcagcattcagtggctgtgattacccaggtgtggagaatgtcattttccaacattagtatatgctttacacatcagttgtagctgaacaccacagaatgtattttattccattaaaaaaacgcttttagtgttttgttttcatttcctttgtatcaataaaacttcagtgatttcagctacttctctttcagagagagaaagagaggacatattataaaaacaaagaaatatgctccttttccagcatttttatcatctttgggactctcccaagaatcctatccaagtttccaatctctccttagctgaaaaggatagtcttgcaaatatgatcactgctgagaacacttgtagaatatttcacaggacaacgattcctgtatgctaagggaggctgcttggcgggttatggagggactttctttgttttgtttgctttggctttgtttgtatgtttaaattcttgggtccccaaggccacacttcatctctgcatcctgtgtcctcggtctgtgctccagcagggaccatagttcctgtgggctgtgcgaggacactgtcagaaaagccaccaggtgactgagctgatgcttggctaacagtgaaggggcaggtagagctacggaacagaacataggaggggcgtgtggagagaggataaaagaataaaatttaaaaccattaagacttcctctatcccaggcacaatgccaaggtttttgttcatgaactttctctttatttttccaatcccataataaaaacttcctttacagagagagaaactgacagagaatttgagtcattttctccagggcagccagctagtaagtagcagagctgacagccgaacccggtaacttattgtagagccccggatcttgcctacgatggggtctgtttctctgaggaagcaaacttcctcggaacccacaggcctgcagagctgggtgagacagatgctgtttaatgagagccacgtggagttctcctcctgcacctggacctagtagaaatcagactgggtaataaatgggcgggacatggaactcccctcagcctcatagtctcagggggaggagggagcaggagcacctgaaggctcctgccttgaaagtgagtatgaagagagtgctggaaggggcagcatctttcctccttttacctaacagatctgattctttaaaaatattcaaggccatggctgagcttgaaactggttgtctggagagagaacagccttagatttggacttcaggttgggctctgaagaggggggctgggctcttcttccccaggatgtttgaggctcttagaccagggtaggctagaagtttccagtttcaccatgatgggtccaggtcaggctcctgccagacctgggggactgggggagccatgggctcctgggctatgaaggtgaggggccctgtgtcctaagaggttgggtgcttgaggcctggggcccctctgccttttgctttgttttgtctctctttccactacctctcattaccactactacccagaacagagttggaaataggaagggccctcctcctcattcctgtgatggggatcaggctttggatgtagaaggctcctcctatctgactcatgcctcggcatgcccctggctctgcagggccagcaaggcctccagcactgtgtcaggcctccaaggattattctacctgccctgacattctgtgatgctgcctccaaaagaaggtcctaggagcagccagagtgttgcaattatttgagggagattgaagcccatccccctttcccagtgcctgctatgatgaagggggtggagtggggtgtcatttccatcaagtgtgcagcatgggtctctctgtagcaggccatggcatgctggtggccgctcctgctagagctgtggacagtcatgcccacctgggctggggacgagctgctcaacatctgcatgaatgccaaacaccacaagagagtgcccagcccagaagacaagctctatgaggaggtacagaggccagacctgggtatgggatggggaagatcagggaagggacacaaatgccaagatggtctccgaacctcatcaaccctgatcatttggttcctggggttaggagttaagcaaaggcaactagatggaaagagactatgcctttttgagaccataagagccaagcgattcaaagttcccatttctgagctgctctagccactgggaaagcagggaccgctggtgatcccagagatccattgttgactcggcacagatgaaaacaagccttcctgccaacaggtcctggggcaacatatgacttatgtgacccctccccaagctcctaaaggcaatttccagggatatgggaggaagaacacagctggcatttggcctatgagaccctcccacccaatgcaaccccagattcccctgggtctctctggggctcttctacctgctttgccctaaaaggcttctgctgcctctcaggagctgagagcccagaagttgtgtttctagaggactgtagcagcctgtggcagggggtcattgtgcaggtgcctctgccctttgggtaaatattgagagattatcagggttcctcttatgtaggggcttactagctaaaggcatcccacttgctcaggcctcctaagggacattttcatttcaccacctttcttccctagacacttgccgatccttgccccttttgcctgggccttttgtttcttcctctgccttcagtgcatcccctggaaggacaatgcctgctgcaccctcacgacaagctgggaagcccatctggatgtatccccactctacaacttcagcctgtttcactgtggactgctgatgcctggctgtcggaagcacttcatccaggctatctgcttctatgagtgctccccaaacctggggccctggatccagccagtgggaagcctggggtgggaggtaggaagcagatctgtgccatgccctgttattatattaacagccagagctttcacccgatcttatgctgatgccgccaggatgctagtaggaacaggaggtgttatttccctatggacaagagcagagccagaggcccctgctggagaatcacatgggggagactgttctgacaacagtgggatgaggggctatcaccacaggaggcttggtggagttgacagacctgagcttcagtctcatgttctgtccctaccagctgtatagtccaggacaaactattaaatctcttagcctcattggtattatttgtaaaataacacttagaggctttatggaagatgatgtacatatggtacctggtacaaataccactgtagctattagtagtcttcacatctctgctattaatgttctaatctctggctatgactgcacccaggtggccccgagtgggcagggagagcgagttgtgaatgtgccgctgtgccaggaggactgtgaggagtggtgggaagactgtcgcatgtcttacacatgcaaatccaactggcgtggtggctgggactggagtcagggtgagtggtgctgacaaggccttggtcgggaagaggccccttggtggtccccacaagggtgcaggtgcaaaggctagcaatgagggagtaggaggtaagctgtccctcctccatcccctgcagggaagaaccgctgccccaaaggggcccagtgcctccctttctcccattacttccccaccccagctgacctgtgtgagaagacttggagcaattccttcaaagccagccctgagcgacggaacagtgggcggtgtctccagaagtggtttgagcctgctcagggcaaccccaatgtggccgtggcccgcctcttcgccagctctgccccatcctgggaactgtcctacaccatcatggtctgctccctgttcctgccgttcctttcctgagagcccttcttctcccactcacattcctgcatgtccaccaactgtgggtcaggccaggccatggcctacctccttcctcaggccctcccctaaaagcagtggcatctctacaaggaaaactnnnnnnnnnnnnnnnnnnnnnnnnnnnnnnnnnnnnnnnnnnnnnnnnnnnnnnnnnnnnnnnnnnnnnnnnnnnnnnnnnnnnnnnnnnnnnnnnnnnnnnnnnnnnnnnnnnnnngctagggactgcaggcccacgcagtccctagcccatgccactgcttttaggggagggcctgaggaaggaagtgcccctgaggcttcagcggctggtgcctgcaacctgcacatttggtccgagaccccctccactgctctgctctatcttagctggcctaggaggcagctgggggctggaagtgccaaggtgactggccacctcctgccttgagggatgggagctttcaaggggctcaaggactttcccatccagtgcacgcctacccctttctgtgacagagctgatggtggcagacctggcctcccatcctccgacggtgtcttcaataaatcggcactcaacctctcctctgcttgacttcctgtgtcttagctttatgtgcagggacccaacatgcacacagagggagccagtttgcccactgcactgaagtctcaaagttaggttgttacttgcctaacaattattaacttcttaatatctgccacacatcctcacaatacctctctgatgggagtactttcaatgcccctttttttttcaataagtgacaccacacaaaggacccaaagccagggcgagagggatggggccacccagcacatcagctctattttggctgccaaaattgaagcagctacctcgactgccttcagggttccctcttccttttaacccattcattttacccccagaatcacagcacactggtctaacattttggaaacccgagttctaatctgacctttttgctttctatatgacttttggcaactcctgtgatcttcattaagactgccttaatttctctctctgctgaaaggaatgagttagttggatttaacttatgaaaaagaagtaagaaaaaggaaaaagctagcaaccttgtttgccaggagatagtgtgtgcttctcagatagcatactatctgagaagacctcaagaatgaagtattagaactgaactggggatggggccctgacctcgcaccccagctgtaagtagacaagcagctgacctgcccacccagcactttccggagcctggagccgggcagcttcccagcagtagatgatgctttccccacaaccttttctttgacaaagagaaagttctagcatggctgcacttgatttgactggcttttctaacaactgtccattcttgccagactccagccagccctgctcattgcttaaactcggcctccattccttctgcactcgcctcacaggcccatccacagagcagatcttgtctcaggggaggcactggagtcacaaaacctacaaagagcgtccttccaagtgctgccctcggtgtctagagtagtagacagatgacagctgcagtggggacaaagctgttcataggaagtctgaaagaaaggggctgggtgggggtctctgagaaggcctcacaaaggggtgaggctggaaccccaaaaaaggagagcagctgagaacagaagggaagtgctagtcaaaacccagtggaggccccaaagtatgagccagacaaagcaggaccttcaattgctcttaaattaataaattgtggcttaaaaagtacatataaatgtatcaaaaatctcttaaagagcttaagaaatttaaaatctcttgaaaactgaggtgtctgtgggtgtgtggttgataataaagctgagaggttaatgccctttttaaagtgtttttaaatataacgaattgccaaaagaaggttaaaactggaatggacaaaacaagagtaatctggaagccctaataatttgatacttattgatcacttaccatgcacccaggatctctgggaagtacataatatatgttagctcatttgatcctcacaaaagccttattatccttgttgtattataatatcattttttactattctcatttttcagattgggacataaatataagtagaaaccagctaagtctgaacccacggttccagctcacaggcttacactgaacagcctgatctgtagttgagttgaactgatgtggatttgggagtggtgggagagagggagggatagctggtggcaagtcacagtcaggaaagagactgagttctaccccttcatgtgattaggagtcataacccacaggtcacactgacagtttaaaagtaaaaaggcttccaagttaactcacctggggtaggtcttgtgattcatggtgacatcctttccttgagaaagaatcttattatgagttcccaaattgttgacatactgattaatgtgtagcctaccgacattgaaaagggtgatttttttttttttttttttttgagacagagtccagaagactcccaactttgttagtgtgtcttcctgggtcattattcacatttggcttccaataaacctttacaaattatttctgcttccaataaacctttacaaattgttacaaatagccttaattttgatcaacaggaggagtgatgggttttaagcaaaggagtagaactgtcagatttgcagttagattgtgtgttttaatcagagtgatccatgcacatggctcacaaacatcggccaagggatttctaatgcaaagcaagagagcagctgccagctcactcatccatcaggttcctaccctgggagcaccccttctaaccatttttgggtttagctataaaaaagtgacaaaatgtgacttaccttttctgccacacattcagactatctttttgctctctgttctgtttgagtttctcaacttaatcctccaatctttttaattctggcagttcacttttaatttccaagagactttttttttttccacagcctgctgttttttgtttcatggatgtaatatcttctcaaatgtcactgaagatctaattagaatgtttttaagcttgttttgagtctctgaatgacctgtttcctccaaggtcaatctgttctgttttctttatcgtctcctacgtgctgctcgttctctctgagtctggtggctttggctgtctatctttggctgtcatatttaagaatgaggagccgagttgattttatagcaagctagtataggtttcctccatggttttatataaggatcttcatttcagtgctgctatttgtaacaatttgtaaaggtttactggtatgtgagaagagcttgttgagagaaagaccttgcttcagagtgtgaaaattaatgaagagcactcaaataagaacaagcaaaggctatttgttcagagcttacaagggagtcagccaccatcacttgcattttgccagagactcaaggcagggaggagagtgggaaagttttagagtggataaaagggaagccttcggctgggcatggtggctcacgcctgtaatcccagcactttgggaggctgaggtgagcagatcacaaggtcaggagattgagtccatcctggccaacatagtgaaaccctgtctctactaaaaatacaaaaaaattagctgggcatggtggcgggtgcctattatcccagctacttgggaggctgaggcaggagaatcgcttgaactcgggaggcagaggttgcagtgagctgagattgcaccaatgcactcgagcttgggcgacagtgcgagactccatctcaaaaaaaaaaaaaaaaatgggaaggctttaggtctgctaggctcagaggctgtgggcaggggcaagctgtaggcaggctaactagaaatgggcatcctatgtgtttggttcagggaacatacttagctttttctgattggtcctaagttggaaatggagccaaaaatgagaaagctggctattaataaattcttggccatgttgggtcaattgtgatagggattattctttggcttcctggactgtatcttcctgaaggtaagatcccttaccaagtgcagttagtaggttggcttcttgggctacttgtgggtcagaatcctgttttatatacagctagccattgttcatttgtagattcagtctttcaatcccagggataaaaattagggaacctaacagttattaatcaactcctggctgtttggggctactgcagggctgattgtttggctttctgggctaattgctagagagacagtactgatgtcctacgagtctgacttgcaagatagtaggatggcttctgggctggttactatagataatgggttagagttctattgttatatgtggtctgaccattgtccatctcgagaccaagttagcaggagctatatagctatattggggtatggagcctttgcatgccagaatagggatggttctctctgggatgctaacaaccatatgtgaaatttcagcactatccaattagctgggtgtggtgccatgcacctttagtcccagctacttgaggggctgaggcaggaggactgcttgaacctgggaggttggggctacagtgagccaagattgcaccactgcactccagcctggtgacagagtgagaccctatcttaaaaaacaaaaacaaaacccaacttcagcactatccagaatttaattttttagagaaggttcttctaccccaggggctaaagttgggttgcctgagcactagatttgggcagaggacacgtgggccaggggcatgtagagactttcttgctctgcccccaacacctgccaactctgagcccagatcctctcagagtttctgcgtgatgaatcagctccttcgtccactacagctgccacctccaatttctctggcctccttgtttcctttgatgtgccctcatgtgctttctgtcttctaaatatttgttgaaatctcttgttcactgatggtttccttcacatgctcttgaaaaaggaacatggaaataatctttttagtggaatcccaggtattcattccactctctgtaaccagaagctgtagatttattaaagactcaacggttgtttaaacagtagattagaagaaagccaaatggaagacaaggaggataaggacaatatgtagaatgaatgtgcaggaaagaaagaaaatcagaaggcaggtgctagaaacctaattgtgagcaactttctaggaggcatgaagccaagccacagtagaggcagtggacacaagaggggcagattcaggaactattagaagatagaatcaatagaagcttagagcatatttttgcataaagtgccacaaaataggtataagacattagggacagagaactatcacaaagaaaccaacagccttggataactgcactctgatgcttccatttataagaggaactttccccactttggattgtactaggtcttggtagcagggagctactggagggtgttccttctcctggaggcaacccagtcacttttgatgatgtgggaacatcaaaccctattcaagtccttcctcagggacaatgggaagtcctggggggcaaatgaaaaacaaaacaaaatggccctcttttatgctgcccttgctttaagattctttctgagtaactttcctcagtgaggtcccttaccaagcgcaggagttgctgcagcctgacagtcatgcacagagatcttgttcctagaccacctctgctgcctgatggaggagcactgagcacccctgccattcctctcccaccccacccctactgaactcctccacaaaaaggactgcttccttagttgcttcccaatgtcctgttgctttgtctgttggaagacccagaaatgaagattattttggtgttccaggctggtgttggaagctaagctacaagtgggagctaagctacaaggatacaaaggcatacaaatgatacaatggactttggagactagggggtaaggagaaaaggtcagatcactttccccagctccagcccttgagatagcttgagtgtccactcccttcttgcatccccaggggacacttttcctgccaacaacaccagtcgccctttttttgtattccctcctactcggttttccttacatccatcctcagatttactctcccacagaatcagaaaccatgttcaatagtgcttttgccacaaaaaactaaatagaaacatctggagggccgggcgcggtggctcatgcctgtaatcctagcactttgggaggccaaggcaggcggatcacctgaggtcgggagttcaagaccagcctgaccaacatggagaaatctcgtctctactaaaaatacaaaattagctgggcatggtggcacatgcctgtaatcccagctactagtgaggctgaggcaggagaatcgcttgaacctgggaggcagaggttgtggtgagccgagatcgcaccattgcactccagcctgggcaacaagagtgaaactccatctcaaaaaaaaaaaaaaaagaaagaaacatctggaggaggaaagaggatttcccagtgaggaggagctgatgatgggctctgagatgctggcaggatgtcagcgaggagttgtccatcagccaattgacccacagtgcaggaaagagatgtgggctgcagataagaatcctggactcactttcctagaagtgtggaagtagatgagttctctaaggaaaataaagagagaaaaaggaaaagcttgtggagagtctctctgactcacctacagtcaaggaagtgacagggaatggagctagtaaagacacagggatgcagaagccgggtagaaagaggatggaagggagctgcacctctgaggggcaatgtcaaattcgaagttgcccgcttcatattaattaactcataattactgcgttcttactctatgctggaaaatgctggtcctgggaattgaaagattgaatatacaaatgagcaatgaccaggcaatgtataaagcaggactctgacccacaacctgtaacagccagcccaggaagccaacttactatccacagtatccattccaggaagccaaaggatagcccctataacgattgacccaaaatgatcaggaattgattaataacttccagctttcctatttcagctcctgcttttaacttagggccaactggggaaagctaaatatgccccctcaccaatcacatggaatgccctgcttctagttagctgctgatatagtctggacatttgtctccagccaagcaagtctcatgttgaactgtaatccccaatgctggaggtggagcctggtgggaggtgtttagagcatggaggcagatccctcatgacttggtgctgtcttcgtgataatggattctcatgagatttggtcatttgaaagtgtgtggcacctctgcccctccacccacaattcccttccttctatttttgccacataatgtgcttgttccccctttgttttctgccttgactggaagtttcctgaagcctccccagaagtagatgctgcaatgcttcctgtacagcctgcagaactgtgacccagttaaacctattatatatatattttatatataagccagtctcaggtatttctttatagcaatgcaagaacggactaatacaactgcctacagcttgcccctgctcacagcctttgatctgagcagatctgaagcctcctcttttatttactctaaaactttcccactcccctgcttgccttgagtctctggcaaaatgtaagtgatggtggctgactctcttgcaagctctgcttgttctcatatgggtggtctccatttatttccacaagatagaatagcaaagaagacaaacatcattcctgcccacaaggagcttatactatgataagaaatacattaaaaaatataagcagatggttaaaattaaaggaactacaaataagatgattcttaggaaagaagcatacaaggacccagagagagttgaagaagtggataatttagataaggtggatatattaaaggaataggaaaccatcagtgaacaagagatttcaacaaatatttagaagacaggaagcacatgagggcacatcaaaggaaacaaggaggccagagaaattggaggtggcagctgtagtggacgaaggagctgattcatcacgcagaaactctgagaggatctggtttccttcacatgctcttgataaaggaacatggaaataagcccaggttggtccccttccccctcccttactctaggactccaaaatagccacagcaaggcattaaataatagttgttgctatggttttattattaagtaagaggtatgacaccacccagttcttaacccatttcctagcccaaggacgttcagaggtaagataaaaacatttgtcttacacatgacttaataactacacaaaaaaaaccttaaaaattgatggtgtgtgaaaataatgagtacaatagtaattttggtgaatattttcatagttttgatgaggtgagttttctaaaggcagtagctataaagtaaaagattaatatatttactaatatttttaaaacacaagaaagaaaaaggaaaggttttttttaaaacactctaaataaaattcaaagacagataaaaataggaagaaatatttgcaacatatacatacagatgttaatatttttagtacaataaaagtttttaaaatataagcaaaggatttgtataggtaattcacatttagaataaactttaaactcctgactagaactctgaccttagctcctaagacttttgctcctacttaccactctccagtgacctgggatttcttctcattctcaaacaaactaggctcatttatacctcagaacatttgtacttgcttgttttctattcctttgatgcttttgcccatctcattgcatacctagctctttctcataatttgggttttagttcaaatatcacatcttcagagaagccttctgcaattactcaagtcaccattccaagtcatactccatgtcaccttgtcttattttttatagcttatatcaccatcgaaaattgtgtgtatgtgtatctgcactgtctccctcacctcactcttagaaagcaggctccatgaggggagaacctcacctgtcttatttactgctgtatccccagtatatggaacatttcctggcacatagtagcggctcaacaaatatttgttaaatgattaaatgaatgaataaagaaaaatgagaaaatataatcaataaacattaacaaaaattttgtttcatgagtagttaaataaatgcaaattaaaataatgagaacctttttaaaactaattagattggcaatgattaaaaaatagtataaggatcaacaaaattgatagaccactagcaaaactaataaaaaaagagagaagaatgaaatagacgcaataaaaaatgacaaaggggatatcaccaccaatcccacggaaatacaaactaccgtcagataatactacaaacacctctacgcaaataaactaggaaatctagaagaaatggataaattccttgacacatacactctcccaagactaaaccaggaagaagttgaatctctgaatagaccaataacaggatctgaaattgtggcaataatcaatagcttaccaaccagagtccaggaccagatggattcacagccgaattctaccagaggtacaaggaggaactggtaccattctttctgaaattattccaatcaatagaaaaagagggaatcctccctaactcattttatgaggccagcatcatcctgataccaaagccgggcagagacacaaccaaaaaggagaattttagaccaatatccttgatgaacattgatgcaaaaatcctcaataaaatactggca

SEQ ID NO: 107 - DNA, 753 bp, Homo sapiens
atggcatgctggtggccgctcctgctagagctgtggacagtcatgcccacctgggctggggacgagctgctcaacatctgcatgaatgccaaacaccacaagagagtgcccagcccagaagacaagctctatgaggagtgcatcccctggaaggacaatgcctgctgcaccctcacgacaagctgggaagcccatctggatgtatccccactctacaacttcagcctgtttcactgtggactgctgatgcctggctgtcggaagcacttcatccaggctatctgcttctatgagtgctccccaaacctggggccctggatccagccagtgggaagcctggggtgggaggtggccccgagtgggcagggagagcgagttgtgaatgtgccgctgtgccaggaggactgtgaggagtggtgggaagactgtcgcatgtcttacacatgcaaatccaactggcgtggtggctgggactggagtcaggggaagaaccgctgccccaaaggggcccagtgcctccctttctcccattacttccccaccccagctgacctgtgtgagaagacttggagcaattccttcaaagccagccctgagcgacggaacagtgggcggtgtctccagaagtggtttgagcctgctcagggcaaccccaatgtggccgtggcccgcctcttcgccagctctgccccatcctgggaactgtcctacaccatcatggtctgctccctgttcctgccgttcctttcctga

SEQ ID NO: 108 - protein, 248 aa, Homo sapiens
MACWWPLLLELWTVMPTWAGDELLNICMNAKHHKRVPSPEDKLYEECIPWKDNACCTLTTSWEAHLDVSPLYNFSLFHCGLLMPGCRKHFIQAICFYECSPNLGPWIQPVGSLGWEVAPSGQGERVVNVPLCQEDCEEWWEDCRMSYTCKSNWRGGWDWSQGKNRCPKGAQCLPFSHYFPTPADLCEKTWSNSFKDERRNSGRCLQKWFEPAQGNPNVAVARLFASSAPSWELSYTIMVCSLFLPFLS

SEQ ID NO: 109 - DNA, 43887 bp, Mus musculus
  misc_feature (1)...(43887): n = A,T,C or G
acaactaagacttgacttcaagttcctgatcccagcagtggttcccacgctgagaaaaatgtgtcctgcgggacaaaagcaggataagagacagacttgccgtggcatttccaggtgctctgctcggagatagacttacttctgatatccttatttgattttgtatttattcacctgtcatctgagtcctgtgagcattcttgagcagtaaagctccaacagtaatttcacccatcatgcgcatcacacatatgaataagagcccgatagaacttacgccaatatataaatcagtttcataaaaattgttaattacaatcctattactagtcagccacatacataatataaagaactagataaaaactatagtttctggttgaataaaccttttgtgcttttcactggtaaacataaaaagtgtgcttcatacattatcattagtatggctactatcaccaatagtaataagaacagtcagagaatggatatagaaaaattggaatttctagaagcaagaacgtctagtgtgaccattatggaaaatgagtaacgggtactcagattttctaaatgaatattaacatatgatccagtaatcctatgtgaaggcagtacttcaggagacgaatctagcgctgtttgtttcattttccacaacggcaatccgcatgcccatcagtgactgaagtgaacaaaatgggctatgtatacaataagcaatcttaaaattatacatgatctgacatatgatttattccaatagggtaagacattgcactaagctaagagagtaagccagccacaaagaggccattcacatgtgttacctacagtcaaattaagagacaaagtttgggctaagaggctgagggttgggctctgtggagaggggaggtggatgagggagttcccagcaagcagttgaagttctggaagatggagtattctgcaggtgagtagtggggatggtaagatcatgtgaatgtccttaatgccagtgtgacacaccatttaaagtatagttccgatggtaaatctttctgtgtatcttatcacagtagaaaaaaagttttaaagtgcatttcagaacattccttgacaccaaggactacatctagctcatctacctatttttgtccttggaactgagagttaatctcaccgtcatttagtaattacaaataatggctctccctaaatatcatcactgtgaactttctttctagagtatgtccctgatcagagacctggccagtgggaatgaaagcactggacactgcactgggacactgcagtgacaagcttccgaggtggacaaagccaggttccattactgtgcggccattcattacctggcattactgaaccccgctgagactcagtttcctcattcttgatatagaaaggcttattatgcaaatgagggaccatgtaacacctatctgtcgggctacctggcctttcatggtaacaagttaatggtagtcacatgtcttttctttccccaagaaaaggaaacaaatccactgatttattttactcactaagatagttaggtttgcaagagttaagagtcaatacccagctcagatggtgcagatttatacaacagtactttgagtaaacatgccagttggattttacctttgtagttagtaacatagcagcatgttccatccactttttctgttgcaaccgcattgtacacgtctgcatctaacgccttttcacttagagtttcagttgccaaaactttaaatggcttaaaagaagagagagaaaaacgggtgtaagatacacagcctctgccttcacacataggctcacctgaactgtgcctagtttcatcagttctaaaggtcggtctgtctttccattctgtaagaaaggttgaagtcatttatgaagtttcctgaattatttgcttttttgttttgttttagtttctggtttttggttttgttttgttttgtttttgttttaattcttttttaggactgtgtcactctgcagcccagactgcccttaatatcctgacccgtttgctttaggctgtagttctgggacccccttcctgttctaccacaccagctcacctaccctttttgtttaaaaatgtgatcacagtaaaattcgacttctagacagactgttgggtattggcgtgcatctcacccaccacaatgaagccgggagacatgccttactctgtgttgcatcctcagcacaggttcaaggtgcacgatcctattctttgtgaccatgcattatctacaataaacactattcttgacactgggaatacagagacggataaagaagtgctcagctttggtgggctacaacaccgagaagtaccaaagaggaaaagggataggagaacggctcagggagtcctctgtggagaaacatcaggcctgatagatgggaagaaaaggcccacagtcaggacattctcacatctgtagaatgcaagtccgtacacgtgtttgggtgtgtttggaacaaagtacaggtaaagttagatctcatgcttgcttaattccagaggctgttctggttcaaccagtgtatttaccagtcatgattccccacactccaagattaagtcttggagtcattaatataatgagatatttacaaaattcattttttcaaatcacacttggctctcagttgtagtgggggtctagcagagatggcctctgtctcaggccatattttcagaaaatgataaaaacatggctcctactttccatttttaagacttccttgcaaagctgaaatccacacgcttaccatagaaacatgttagaatatatagaagtaagaacaagatgtatgatctcatcatagagatatgtatcactaagaactttctggggtaattctagtcttcctttcaatgttcctccaaaacaaaacaaaaccagcagttcctaaaattgacaatttctttaaaaagccaaagtcaaaatgcttcatgaatgcacccttttcatgactgatctcctcaacaacatgatcaaacatcacatttctcttctcttagcatgtcatctctggtcagcatgtcagctgtgatggtcttacatgatgatctgcataagaccttcaagtcacagagcatcttacaggacagggatggagctcaacgggcacggggaagcatttctcatctagcatgtgcaatactctggggtttatcctgagctactaacctgtgggtctccccagtctcttggatcagagaccaatatggtccacaagcgaacagagatggcagaggtcgcgtagtgggtgcaagaggattcggaagccctgtgaatgtatactgtgaatacccacacggcgaccaactatcaggaggcatattactttgggtgattcaaggcttatgttttgagtgtctgagggtgggatgggcagaaaggtcattcattggctgagggtttaggttaccaaaatgcctcattagggaagaagcttttaaggaatctcaagtgctgttctttccattagaaagagaatggtcctgtgtgctaattgaggctgcaggctatgtgagggcttagaattccccaacaaggtcagagaagaagcccccctctaatggagtctcccatattgccccagcccagagtttatctgttcatctgtgttaagagtcaggctctaaaggtgatgggagagtgatagagcaccaaaatggtagcgggagtggggggtgggggagcgagctggagatttggagattacagggagcttgtgaagtttgttgaaggggagaggggacaacctaaattattaagaaaatgacacgaggaaacctctttgtacgctaattacaaaaaataaaaaaataaaaagaccagagggccaaaggttcagcggtaatgttgaaaagtcacttcagatgcacatgcagatcctgagtgagaagttaagaactgctacatatcaaagaaccatactgatataagctatctatatattcattctcttactttcactaaaggctcactatgtgtaaaacacgtagcaatacgactagtacaccttcggatgagaactcaaattaagcaagaaattacacgaggtctgatttgcgtgacctagttaggctagctgtcagcaatgccataggtgcctagcacacaacaggtaaacaatgccttctcatcagacttttgacagtagttccatgttagactaccatgatatctcattattccagtgctgttaagggaagatgaccaagtaggttttcaaatctgccagaacacgtttgaatcacctgatcggggaggatacaatttacaaaggactctcccacactccttgcaactaagaagatacaagaagctggaggtcaggggaaatgggaacttcacccagacctcccgggtaaaacgtgctgggctccggggcagcagcgcagcactggaggagccgcccagcagcactcgccgccgggtacctgatgctcccgcttggctgaaggctcagctttcacctccgtcacaaacacacacggcatcttccgctgcaccgagcccaggcgcttcatgttgcccacgcgcaacctgtctccactgcgctgggccccgggcggaggaagtctgcagaaatgagctagaatccaaacaccagccagaagatcctaactgcaccaccaaggtccactccggagagaggcggggactcactaccggaagcgaccgcctagtcgcggtgcattctgggaattgtagtgcgaccgcgaggctacagagcatgcgcctccacatgcgtgattcccctgtgttttgatgtccaattaaaaataaaaataaaagaaccgttacccgatgttgtatacttggccactacttagtatcgatgatgttttcgggaattaatgttaagttataagtaataaatcactttaggatgcattttagcatgtttctaatgaaactctcttacctgcttattttctatcaaatgtaagggattggaaacccagagaagtttagaaaatactttcagacattccctaatgttctgacagaaaaactgacttcccaggaaaaacattcaaacaaacaaaccttacaatgaacaaaactgaatttgtttgaattaatcaccacgcagtgtacagtttgttttttgataacctttccaatgagagtaaaaattaaacaagttcaaaaacatagaaataacaaaaatctctgtcgagtttttcttgggaatccaacaaaagacttgaaacagcttcatttgacttactgtctaaaaggacattacaaggaaataataaaattgatgcttgaataaaaaatatattctagtagtagacctatctcattaaaacctgaaatcacagggagatttttgcccttactatcttaggtaattgaagaagccaatttatgtttccacaattgttttataattccaattaatatttttataaatgtttaatcagcaggtatcctactgcctagcgttttacttacttagttcttgaaaaaaaaaatcaaataaccttgtctcacttgaaagcatgtatatgtcaggggactctcaaagaataaaatgttcttaaaaacaagtttacagttttgtgtttactgactccggagggaaggagggagggagggaaagagggagggaggnnnnnnnnnnnnnnnnnnnnaatatacctaaacacacacaattttacacaaaacaaaggggttggtgtagggagagaggacctacaagttacaagtttctggctgggttgtattgaaactagaaacgttttagccttttaaagtcaagtgttggtaccttctttgaggctctagaggaatcctaagcaacagcccatcttgtaggtttcagacaattaaatgacctttgaaagctctcaactgtcatttcccaaactgccacagaatattctagatccaacattctgccatttcttagaaaagataatcttccaaaaacattccacttgctctaagtctctctctggaaggaccaacagctatattttggcttcttaaatgcctggagaaaggtttccaacaggaacagaagagtccacagcaggaaaacatcacaagatcaggttatagatgtaaactgtgcttctagtctaatggatgccagcctttagcttcccctgattcccatacagagctggtagagccccacccacccctgcccttagaggagtgctacagaataaattgaaaaagacttttttttcttcttcttctctgatatgttattaagctagcacacaccaagaagaaactccatgtgaatctatcctgaccagcataagacagaatttctgggtctgttttcgaagacacatttcctatcacttttcattacagggagtcaaaaaaaaaatcctctcaagtagaatcatagctttctgtagaagactaaaatgaaatctgcaacaggacatggggtgagagtgggaaataaaaagaagtgataggaaaaggaacgaacctaaaagaggaaaaggaagagtttggggtattctaggattaacaaaagttacacaatgaaggaatttttaaaatttttattatttatttatttattcattcggagggctgattttgccatgctgtcagctgtcaagaggtatcagcacttttcagatcttttccagtgtgaaatcacttaactaggtttgaaactctgcccttcatcagggaactcatctggaggagactggatgagcccctcttcttagagctgtttctcccacttgcctgttaagatgggcactttgctgttgcagagctgaagagaaaaagggctaaccgaagggcaaggcttatgtttacgtatttatcaacattttcaagggcggtgacgaatcttcatctgctcctttacttttaacactgcctccatcctattaattataagcaaaccatcttttttctaaatttagttttatttccaagattaatactctatactatggattcaaaaaattcatgacaatttaccattttacttaaagtggaaatcggtgtttgtcttgatccgttgagatttcaatccaaagtttgaagtatttcaaaacatgctttgatccaatgtgttcagttgtctccagtcaaaccctaggtgccctgtgatgaatattcctcacttatactaggttctgattaatataggaaaggtgcatgaagattttcaaaactgctcattaaaatgtcttggtctgggaatcagaggacttcccatggttttccacaaattctacaaatttttgagcactctggaaataaagcatttgctattggatgacacgaattctcttttcaggatggatgaaaatgtaataaagccaccggatgaataggtacccctacttattttaatgaatattactgtgttaaaatctgcatgtgatatttcctaagtcagtgtatggcaccaggtacataaataatcaattgtatcataattaatcaattgtatctattttcttgtactgtgtgtgtgtgtgtgtgtgtgtgtgtgtgtgtgtgtgtgtgtagcatagttagcttagttctatttccaaaccacatatagaaataacaactttcttataaaatacttacccaattttaattttgaaaacatgaagttatatttctttaatcagaacactggaagataaaacacagtgtaatatctacaagtagtgcttactatatttgataaatattggataggggaaataatccacttaggtggagtagcctacagttgcatatgaggtcacttatgatgagcacacaatggattatgtaatagtgaggaaaattctggaagtttgagtttgtgtgattactagtaaccactttcaacatttctgcaaagctagagaaggtatcttctaatttaaatttatttaagaattatctattgtgtaatatactgtcaacaggaggtcagttttaaaggaatactactgatagcctcaaaggctgtggaaaagaacaagttttccccccttacacactgatagttcttatatttgcgttcctgcaatttgtacatatttataaaaaaaatcattggattagcagcaagagattgaaaatggcagaagttgggaatgactgctatttctttgttaattccacatgcataaaggtaaatattgtacaacttacagtccacatacttaagctttttaattgaatgaagggagagacagcaataaaaagataccttaactcttatggaaaagcctatgtatttttcatatcctgaatttatgtgaggaaatttgggttaatttaaaactatgatctgttgattatatatgtcaattttatgttagttttcatataacatttttgcatatattattcttttcaaattcctaatactatataatggtttttatattatagcatattatgttggtgaatgtatttcagtcatacataatccaatagttgaattcaggttactatccaccgtgtagtatctgttttcttatttgaaattaataaacctttattgcattttttctgtcagaagtctaaataatagaaagtaattaaataccatgtaaaggggaatagagtgtaacataaacaaatcaaccaagtggaaaagtgaattgggattaatgagtctttaataaaaactgaataaatgtaggaactctcttgttgctcgtgttccaagtgaacctaaagtaaatcaaaatatgaagaacactagaagctctgtctggttaagcatctttcagctctgcttgaaatctgtagcccaactcattggtcatgagaactcaacccaagtttgtcatgttacctttccaaagagatcttagatgacacactttttacttcagaatggcacagagttttgtctctgtttttctcccaaatgattgatgaacaataacctctaagaatgatagatagatagatagatagatagatagatagatagatagatagaggtgagatgagatgagatgagatgagatgagatgagatgagatgagatgagatgatgagataaaaatctagaaaccattgtaacttacattccacaggttatcacagcatcctgtgatagtatacaatttcattttttagtgtaaaaataaacagaagaggagtggttgttgacaagtagtgaaaacatggtgataaatccctgtttgtatgaatccaaactcagagctcattatcccatgcttgaagagtccatctttgaagggattagaaggtgaagaaggaagtagaaagaaggcatagcttatatgtcaaagagggaggaatgtaatggaatgtcactattatctacaagacagaggcctacagttcatccaactctggatttatacaccaaagaatgcataattaaaaaaaaacaaacaagtaatagtagactgttgacacagtccacatccactttcattggtacataaaaatacctgcgtaaatatatttagtcaactgtcttaataagttacgaacataagacatgcattttatatgtgatataattcaaatttcagagcatcacacaatcgaggttctaattcctcgatatcaacacagcttgcagcatctccacagactgtgcatcttagtggttggtagagactgtcttcacatgcaggatgtggctcatacttcttagatagttgccaagatttccccagaaagaaaaatgaactttccctgttattgtatcagggttatctctattcttacatatttgctcataatgaattctgggggctaactgacaggaaaggcagtattttgagagtaacttgtgtacctttccttagcagtttttcactaaagagagaaaaagttgctacaatttagtgtttacaggtgtgtattgattgtatgttttcatgattccaatttcgtggactccttattccttaattggttaacattttgtgattaaacgctaacattaatatattgtgtcttgtgcactgtttgtttcctagggttcccagtgccgattccgacactgtgaagaagcccttggcagtgacactgtgtgctcattatggagagagagaaaatgtttagacccactttgcagatttagacacatggaaatgcaggtaaaatgactgatcattttctttaaagcaaccttccttcctccatcgctgaatggagtttaagcaaaagagggaagaagtagttcttcctccctcaaaaattttaagtgttcttcactttgctcaacctaaacatgtaggagagagagagagggagagagagagagagagagagagagagagagagagagagagagagagagagagagagagaggagagagagaggcttttattttttaaatagcaaagcttagaggtggcaaaatgtagaaagcatgatgaccttaagtcagaaatgaaggctcttcctgtcacgtgacatcagtgtgcatttattggatgcctaaatgtattttctcccaccttccttttcctagcaaaactgcagcatttcatgcttctgggaaacccaacctctgggttgtgtgaagatcagttgtatcttttaccacagcaaaccccgaaatatcaatggattgtttttgccaccaagtagcagtgagtatatctgtaataactggacatatacattattatactgtgatcttggagtagccacctagagtgacacatttgcatgcattactgtaagactttgagaagttcaggaatctatcataggtgcagagagcacagacattctctggggtaggtgtctcagttctagcagagcagctatctgctgtgataccaaaatgctcctccaaggtgagacttagaatagattcttcgcataacacaaaagacctcatatttagtggagcctcgttggaggaactggtctgttacgctcaccatatttctctggtggaagagtcctagatatgagcagaatatgatattagtcctttaggatttgaaagattagtttcatatttcctcaataagcaggttgctaaaacttactcccttttattatatactttgggaaatgtttgacctcataatacacatcgtacatgcaatacttttattatttctctcttcttcacagggctataagcatctggagataggaaccacaatttccttaaaaatttaaagggggagagagagagagagagagagagagagagagagagagagagagagagagagagagagaggagagataagtagatagatagatagatagatagatagatagatagatagatagatagatagatagatagatagatttagatagataaatgcagttgattggttgcttagacatatgaattaagagttaaactaagcagtaacttgaagtcctgaaggtatgtaatttgttagctttgtctttttagtttacaaatagtatgacacttacacagtgggaaacattctcagtacgttattttatctggttgttcaaatctggtgatttcattaactcctttaagactagcaggaaacaaaactcagagcagagctggatgggatgcctgtgcaaatggcaatcattggtcaccccacttttaaaataagctcttgactaagtgctatagtgttgttggatggactatttttgtgtgttgtaaatagaattgacctttctgaaagtctcaactttcccaataggagttatggctgagcctgactcttggagtaagcctcccttcaatagggccatatctatattccatggactgggtttgaccccttcccctaagcattttagctcacgataaggagacactaaagggatgtgcagagtgatgatgcccagtgccctggaatcttcctggaaagagagcagagagttcctcacactcatgacacttcatccagcataggctcaacgcatgcacttgcatgttttatattctgaatagagctaatttcattctggctcattctggttttccttttgacgtcaatcagaacgagacaccctaaagtggtccttgcctgtccttcctttgtattcactcacttttctctttggtagacacagttccaccatctctgaattttcctctcatgctcatacttttatgtaagaagttcttccttttgagaactctagctcttctgtaggactcttcactcttggttgcttccatcccactgtctctcctttgaacctcaaggaccaccagctctggtgtgagatgagggattttccttggtccttgctgtcagtttcagaccgtctctcatactcctctctaacaccatccagcatgaatctgatgttaattatttatgttgtttggtttcttagtgtcatgtcgacgttctttgtttttgcttacgttcttctacactctctcattgttttcagcatgtgcataactcctagttatattaggactactttattaattattgctaatttcaatatgaaaatgtgtgccctattatcatcctagcccctctatgtttttaattcctcaataacccctgtaatatcctcttcatgagtttccctggcaactaatgtttttcagacacttcctaatctgttagcattcacaaactgcagtaaatttttcttccagccataatattggtagatgactccctacctcttttgtatctgaatacattaaatggcacatgtctatagaaaacaaatgactatgctgatggggtttaagatcctgacacagccctcaatgggttcatgctctaggataggcccccatatacatctctattctggaatatgtttttgtaaggtcctcactctcatctatatcccaacatctcctcctcctagataatgaccttgatatcttactgaagaacttaatgagtagagaaattctctatattttcatccccccaactagctaccatctgtgttagtctcctctttccacttcctagaacgaactatcattctctgtctagtctactgttccacatggtaactaaatcagcactcaacaattcttcttgtgatgtctacaccatcaattttaaacttgccaagtcattcctcgtacaaatatacatttatctttatcttctttgttactaaatagtattctcaatccagtctctcataagtagcaatgctgttttcttctcactgtagtatcttttaaattatttgtttattcttgctataaatatattcttccatccctccctcctcctctcctctgctctccttcctcccttctctccctccatccttgcttccttccttctttccttccttcctttcctcctccctccctcccttccttcctcctttcttctctttactgataaccaggcttcttccacctttctactcactgtatgcaggctgttaaatgcaggagtcaaatctgagtccttatgtaacttcagccattagaagaagtgaacacatttggcaccccttcctcccttcacatcattccttagcagcttgcagccctcaccactgtcttcattctgtatctgctgtgacttgccctttcctgttactcctcatgagtcgtatccaaggagtcagtcactgactctccatttttctatcccctgtcttgtaatatcatgtcttatttttgctttttaatgtttattattgcatgttaattatacataacaatgggtgtttatactgtcatgcatatacataatgattcttgatcattgtccccctctttattatcttgcccctctccctttttgtctcccttccttttttctaactagtaattcttttccatttgtttattttatgtatttccatgcatgtctccgtgagtgtaaatgcatgtattacatgtgtgtgttagaatgcacctacctgtgtacaagtagaggcgagaagaggatgtcagatcctacagagctagagttccaagccatcccaggactctagcttgtcatatgggtgcaaggatctgaactttagtcttaatagttgtgccggacaaggtattaatcactgagctgtctgtccagtcccaagcttgtggcttcaatgattcatgcatcattaactctgaagtttatataaccacttgatctagacttcactcccgatcccactgctattagatgtctagattcaatttcttactttatctcttgacttttttgaataacaaacatttcacacttaacatgcttactgctggcatcatgatgtcagtctgtactttttcaaactgctcagcccatagctgttctcatcacgatggtaagcccatctttgtagttgcttaggacatctaaatctctctccggaatttctgtcattatcccatatctaatccatgcaggaacataattctatcatccagttagatcagagtcagacttccccatcatctttgcaggctctccatgggtcaagccaccattatcacctcataactatattgtcacagctgctccccgattgtgttgctttgtctctattcatgtctattcaaggcacagcacctacggccctagatcaagaagattttactcctctactcagaatcctccagtgtcttttcatcatcttcagagtggtcagcctcctaacaggagcttgaattcggggagttttttgatcatgcactcatttagttccctagcaccgaggtacttcacatcctgccccaacagtgtgtttccctactttcctttgttagagcagcttagtatattcctgtttgcagggctttttctgatgtgccctgtgcttagcatctttatgacaaactacactattcttcaaatctttgctcaaatattgcctttaattagtgccataattaaaatgtagcctgctgtcccacctccttcatatacacagccaatcttccttgccctcctctatttcctgcttgctacagccccacgactttctcagatgcagtataacttgtttgctatgtgcactgtttattctctaatgtttccttatagaggaaaagctccatgagaccaagactctagtttaacttaccaatgccatacagttaacaagggtattacctctcaacagttttaccctgggaaatcctgttaagctgaaaactccttcttgttatggtttcctctgcttcggcacagttctagtctctagaaagagaatcaaatttctaggtagtgtgtaaactgctattctagactgtttggtgttacaaagcaccagagggtgcttagtatataaagaaaagaggttgctctgccttaaaaatctagtggacccatgtccaacaacacagtacagacgtcctgtgaacgtctcccagctacatcacaatatggcagagaagtagcagggaatatacaagtgtaaatagcccaaagggagatgccagccccatgtttaaaacaatcgactcatgggagcgcaatgaatctcaggacacttgacccttgcacaagagagagcattaatctattcatgagaacagcagtttcatggtgttattccctcttactggcctcccctcttaaaagttccaccacctcatgccaccacactggagcgcaagatttatgcataccaacctttgtgtctcaaacataccaagtatcaaaggttttaaaaaatatatctatggcacttattcctcgagagacttgaggactcaaggaagagggaggcctggtgggaatgggagcactctcagaggcaagggaaaggagtaatgggatgaagcattatggaagatagaccaggagggggacaacaactggaatttaaataaataaaataattttaaaagatattgaaccaatatattacctattcattctagaaatattgaatactatagaagatataagttgatccctggcagacttgataattgcgacagtatttgtagcaaagtctgtctaccaaatgctatgttgatcagagctagaatcttatttttttttaccttagatcattaaactgtcatatgtacatttatgaaaaaatctaccaacatttgtttcattaagtacatacagcatgcactcgtagtcaataaaatttaacactcagtcctcaaaggctgacctgagccaactgcagtccaccactggctttagggaaaaaaatatcccaatttgattggatttaagggaaaactggaaatttggggtttacatagcagaagagactaaggacagagctgatcttagatgcaggttttccttcccctgttattgactcagaggtgtctttccataagctattgttgctgcagaagcaccagacatagactttggaagtaaaattagcaaatgataaagatcagactggagagatggctccgtggtgaagagcactgactcctcctccagaggtcctgagttcaactcccagcaaccacatggtggctcacaaccatctgtaataggacccgatgtccttttctggtgtgtctgaagacagctacagtgtactcatataaaacaaacaaataaatgaaaagataaagatcactgtctacatcttagactgggtttaaaatcatcagccagccacatacacttgacaatgtaacactgggtaactctctgtgccacagtgtctgtgcattggggttgtttccaaaatgtaccaccattatcattaccattgtaaattaactgagatggttaaaataagctgtgtaataggaaaaggctgttggaggtatatgcaattaaaaaaagcctgtttttaggttcatgtggtatcaagggcaattctacaggtggctcagaaggagtgactatccttaaccacacatgtctctttcagcactgtgaccctggctagttatgtggtttctctaacatctgcctcctctatatagttcttctgagtcatattcaccagccactactctgagctcctctgatatccactccctgcctcccacatttcttctcatttaaaaaaataacttatcaggaccagtttctactgtccacatactcatgtgtgtgtggccatccactggaatgtgattagcctaccaaagcccatattcatcaagaaaaaaaaatcatccttccttctagaaatcattaactgtcaatagctcctcagttagggaagggtccttggaagcccctattcttgccatactggaaacttgacccacttgattttgaacaggtcttattcaggcaaccatagctactgtgactttatgagtatagcagctctatcatatccagaagacatggggacatttctatgtttttaatcaaacaatgaaaaacataatgaagaatgggtggttactgaatggatttgtaatgatggttgaacagactaaagtgttgggttttctctgtagataccaccttacagaaagaaagtcaggaaggaagcccatccccaacccagagtcaggaatctctgaaacccatggagaacgtatcaagacccattcatcatccattagttttaaaaactaactttgaagaagaggaggaggaggaagaggaaccaaatggttagtatcccctttcttggattgcagtacacatgtcaaaacccacaatactcctaaactactagaggtttcacatgcaatatacagactgttttgttgagttctatttattggccttagaggttctgttgtaaggtgatcaggagacatatctcacgtttacattcgtgcccgtacttacaaagaggtacaaacagcttcataagagacaactactctgacactggcatacgtacatctatttcttgtagaattcactcctccaagtttcttttcctgtattttattgattattttacttatttacatttcaaatatggtaccccttttcggtttctcctcctcaaccccccatcccatcctctctccccctgactctctatgagggtgctcctctacctacacacccactcctgccttcccgccctagcatccccctatgttgctgcatcgaacctccataggatcaaaggcctctccagccattgatgtcagacagggccatcctctgctacatatgtagctggagccatgggtccctccatgtgtacacttttcttggttgtttagtccctggaagctctggggtgggggtctggttagttgatattgttgtccttcctgtggggttgcaatccccttcacctccttcagtccttccactaattcttccattggggtccctgtgctcagtgctatggttagctgccagcatctgcctctgtattggtcaggttctggcagagttctaatgatccagagagtagcttggaatttataaagccctaccatctacttcatccctgatattccttagagaagtatggacaagattaggacccatgtgtgctgtgtcctggtccttcctttcctccccatatcatcatagcacagataaacttcagataaacccttgaaaaaacaaatttactttgtctctgccctggaatgcatctttctgtgggtacccattgccacaacttctgggtttaggaatgcccacaaatcttcatcgttccttttgccaggcataagcccactctcttctacccacatgctccactacacctgtgttttcaacctctcatttcttgacacagagcataaaatacaccatttctcttcagtgattcttttaactactaaacatagaagcatcttgaaataagagtttgcacactttttttttttacttcaaacattagataaagaacaatccacccatgaaaacaatactggggatttttctttctggtttataaatgctcatattatttggaattagggcaatttaatttttaaaaaatatatatcttatagatgcttctagtttatggacaaagacccctgaagaaattgaagagaaaagagcaataaaggagatgtgttataaatctggtaagaaatcatatttttgtggaatttccaatgattgacatgatccacatgctaaccattcttttctcacgggagtttaggtgaatactatagattccacgctcctccagacatcccatcatcaaaaagcgtagctccgacagtggagaaagagttagaaaagcctttggaaactggcagtgaattacaagaaggtaagaaatgagatggcaatattcaaagtgacatgtacgagatacttaatgaatagatcctgaattattcagtgcagtgtacactagagcaggatgaaatgataaataatacatccagtttgtgagtgagaaaggcactctctactgcatgacccaaatttcctacgaaaggatgctattaatgtaatgatatttccccagagaaaccccgccgaatgaacagaattcacagacacaggtaactctcacactccacacaggaactccgtaaataatttgcctttctgtctcatcggtatttcagtgaaatagaactcaatgttttattttgaatgaaaaggagaacccagatcagggtggacaaaagtgaggtgacacaatgatgttattggcagattacgattctgtctgttgaatgaacgtcttttgtgtatcaggcaatgctaaggccattttgatggataagtcccagactctttgatgatatatttcctttaagcatgtctgagtgcttctggtccgaatcttgtccttaaaaacaagacaaagagcatttgtattatgtatggaaaagcaggcgcttgaaaaaaagtacatggctgttataagtttatgtaggttttctgtctttagagtgagcttacgtgtacatagtgtcatagtagaagactgctccctgcttctctgaaggtcaggaaggaaggagggctcagagagagagaggagctatcagagagaagggacaacaaagagatgaaaaggctcaggctggtcagttggatacagaacagagagcatccatacctccttccctccttatgtagcaagctgtttaagtgcctggcagaaggtggcagtaatagactgtcaaaaggtggagctggctggggctcctaataaccacacttgagaaaccttaaaacaagcaaacaaaaacaaaagacacacctgccgatcaaagacagataatataaacatttgtatacatataaaaattggcttgaattgctttcaaaagtggactcttgtgtttcctgatcacatagagcagtggttctcagcctttccaacactgcggccctttaacacagtttctcacactgtggtaaccatcgctatctttgcagctacctcattactaatcttgcttcggttagtaattttaatgtaaatatctgttttccaatggtcttagggaagccctgtgagagggctattcaacaccaaagatgtctcaacatataggttgagaatccctgacttaaactgacaggaaatgttactattttactacacttgggttttaaattactattagagcaattatgaacacttccactaagattctctgaagtactaaaagtaagttgaaaatatggtgttattcattcttataaaactagggcaaaaatatcaaagtcaggaaattgcctttgacacattgttatatttctgggtcccctccacaactttccccagcaatgctactgatatctacaaagtgaatttattctttcttggtaaattatcctgttcacaagctcgccgcatcaggcagccattttgtttgtttgtctcttttttttttttaagttaacagtttattttcaaagtagattatctggatatatacaatgaaagccatgaaaataatttaatgaccaactatcatcagaacttctaggctataattctctttgctaaattagtcatgaagagatagaaactaaaaatttgttacagtgaaacaccaattaaagcatagtgtgcattgcaatagtgtaagagtgttaaaactcaaattgccgattacttaccaatccaagtaagagaaaaaattctactagttttgtcattcacaaaatgagcttgaaatcaatgtgcttatgtgtcatttgccagatcatagtgtatatattaatgcttaagtttcttaactgtcactatgaattccattacaattgtgactttttttttttttactttcttcccattcctaggagatggtcttacagttccaacaaagtttagcctatttgaaagggcaggagaggcaaaaacatcattggataggaaaccaaggactgacattgctgcttttgaaaatggaggtgagctggatggttccaaatatattacttccagggtttgtccttaattttttcctatttgctaattaatgcagggtttggagatacatcataaaataagatgccctgaaaggctggtatctctaccaaatgccttgggaaattttacacgccatggacaggccatttcagcttctctaccatccattatgagacatctggtgtgaatgtgtgcactctcaactctaggctacaactaattcagatattaagcacatgcaataacatactaactcacagccaagtgcagaggaggtggctaataaatactcggagagagctgaggtagtgatgttatgaatatatgtatcatgtacaccaagatacacattctcattgtttgtcatagcttaaatattttaaaatcttcatccattagcatgcaggaaaacccatcttctgatagaaataagttcttgagaagatgtagacgccttttcctgatatggaaaggacaacaacaacaacataaaaacaagacagataggaatagtgtatgcaaaagaaaatcacgtttcactgaggccagagcacgttggtgatgttctccacaggcctgatgttcagccattctcttctgtctacctctcctctctgtgctactttgatgctgtcttcttcttcccgtatatgctgtagacctaacgagagccagagggcaaagctggcaatccatatcctctgaccagccctaattttccatgttggcaaaatattactaaatcatatgcccttttcaggggtggggggtgggaacagattattttcagtcattgagaagctaaccctttcctgtaaagcattgttttccttcatatgcatttcttgctctgttgggacttaggaaatgtgagaatgaatggctttacactttcataatctttctaataacacagtgagtaatatcttgcttagcagcagtgtggaaggatgtcaagtctctcattcatctggaagactaggatcctgacatagtgaagtgagtcttgttgattctccagataccatgggattctttgtttaattagaaacatcccctgggtctttgcatatgagagtaacacactttaaattgataattaaatttttttaacagtggatagaacatcttgagaggaagatggtaaatttaatagttatagccagtgagtccagattcaatttaaacttgtgaagtattgtttttagttttactatttttaatgtattcttgagctttcaatgtaatgaagcatgttactttgggatggatagtttgagacaattccacatgcgtactcatctatgtttccatagtttcatgaactttttggctaccttgatgccctcttttgtcaaggtgctctgttatatcctaatactacttaaaattaggtctttatcatcagtcactaagggagggttcgttctagttaaagcaatagtccacccctcattggtaactgctgccagttgagttttgcatttttaattgctatttaagtggaaatatagagtttgagctcatttagtttagtattttagttaaatatttgagttgtttgagacacagtttcattgttgattgttgaagtagccctttgacattgttgtacatacacattgatatataaataataaggtaaatcacatatgtatttagctgtgcctatttaaaatataatctatatacgtatttatttctttctgaagacacacagagaaagagaaaggagggagggagagaggatgggaaaggagagtgagcaagagagagagagagagagagagagagagaggaggattcccatgagcaaatattaaactgcttattttattttagagaggaaacagagtttggagcgttcagtgactctgctactgctgtgccacaaggcaggaagcaacgaacgtcagggttcagatcccttgcagcttcccttgtagcgttagagtgatgacaggatgctgtgctgtcctcctgaaagccccatcctgtggtcatctctgcatgatgtaaacacaaacaagaatgctgagcctatcaccttgttgaacctcagcggcggatatgtgcagctgagaattcaaagtccttaccactctgcgtggtgtttgtgaaaagtaccagagaccataggcatcatttccagcctgtagccttctggaacaacccccctctgccaatttcatttttcttttctgtctaaacttttattgatttttttgaatttcacattctgtaccccgatcctattcatctcatccctccatatatactctttgcaactacacacacacacacacacacacacacacacacacacacacacacacacacacacacacatttgccatggacgttccagaaggcaagtggaacagcagtaggtcactttgactctgttgggtgtggtctttgaggccttattaaggggtcatgataggcgatatactgtttgtcctttctttcatgtgacagcagtcactccaaagacaaagctgtctctcctaaagcctaatttttccaactttaactgagagcttactcaggctagtcattaagacctctctaccctggggaggcttacattatagattttgtctcccaaacagtacacagctgctgagatctctgattggtgccagagacactctcgaggctattttttcaatggtatcttttttattgtttgagggctccatatacgcaaaaaatgtgtttggatcaagtatatgccattttgctcctttccagtgtgtgtgtgtgtgtaagcccatggagattaatacaaagactcacaagtcattgacatgggggaaaaagagtgatagagtgctcaactctcaatgtgtcatctgtatcacatgcttacaacccaaggttcagtgatggtcatgtaacatcaggtaagaagattgagaaaggcagaaatagtggatgtctgtggcaaaacagtatttgcctgacacaacagcactataacacacacacacacacacacactcacatgcaaatgcacacacacacacacacacacacacaaatgcacacaggtgtacatgtgtacataaacacatctctcatacacaaagacagtggtttttcaaaacagtttgtttgcttaatagaataaattgcatggtgaagttaccattaattatatatgtggtttttaaagcaactctgcatatttattttgaaaaaaaaatcgttgccctggagaaaaagaaacttccttcatatatctggagatcttatatgaaaagtaagttagatgtactatgaatatatctaaagatcactcttaaacagggacattgggaagatcattcctatcttgaaaggtggtcacatgcctctttttgctcttgctgcccctgtctgtacaattttattccaggaggtgactgctatgctccacagaggatcatatttcttggagtggatgaaagtgaagcattagctgaagacaaagaagccacctcaaaatgctcaaatgtcaaaggtaattgaatcacattataacattgacacatctgtacttggggtagagaaattaaccatacaccctagctgttataaaaaccaaatgtaatcaagagataatacatcaaaaaagtactaaataggacaccagagccccaaggctctagaatggctgtgtactgaattgttttatgttttatagcctgcttcctagactgaaaagtttgtctgttggaggatcctgcagctataaagtgactggccttcttaaatcgtaataagacctttcaagtgttcttttagcaacttaaggcataatgattgagtttccttagaaatacttcgaagagactcattctcatgaatgacatacgtgttatacaataattgctaaccacagcctgcgagtactccagggtagtggttctcaaccttcccaatgctacaaccctttattacagatccttatgttatggtggccccctgaccataaaatggctgccactgctacttcataactgtaattttagtaatgttatgaatcataatgtaaacatatgatatggaggacatctgagatgtgacccctgtgaaaggggttatgaccagcaggatgagaatctgtgctctataactcgagtaaacatctgctctagagctctgagctactttgtctgcaacttggagtgctcacgtgtccagatgcataggaaaagacatttgtgtcaagtgatttagtgaaatatttatacaaagatctcttatattgggagttaatattttatgtctaatctaatgaaattcatgtaaaggaaaaaaaacagctagttttaagtttagttttaaggctactagctagcgagctatatatgagtgcctaatttaattataagtaacaaagctctaagttaagcttttcaacttcactagccccaacaacaggtagcaaatagatatgtggctactggctgttatatgaaacagcaccgatttagaacattcttgtaactggggaaagtttattggatggtcccacggctactcacagggaaaatgaatgtggcttgactgaaagggtcttgagaagttaacataaatgggctcaaaaaatatgagattgactaaaaaaaaaaatctcatggagatgtcaaaatgttagcacaaaattctcattttttgcattgcaatgaaagctagttttagatttttgtaaaaaagaaaaagttttatcagtacttgaggggtagggttggcaattagaaaagtttacccgtgccctctagtaaacgccaggtacacataataggtgcactcacgaacagcttctaatactggcattttatcctcttaacttgcatagaagaaagcaagaatggtcttcacccgaagcatcctctaactactcgcctcatgcctacaacacatgtgttaaatgccactgagaatatcagcatgaagtgcagagagaccccctcttcaagtaagacagtcttatccctttatttgtcttatcatgggtgtacctttctgatttgagatagaacttgaaaaggaaaggaaagaaagggagggggaaaagcatcctttgaaaagtctacactaagaagtaaacaaatgatatctttaggttcagagtccagattctgatataggtggtcgtcaattatatccaccagttaaggtgcatactgacatgaatgccaagcgcctctgcagaaggtcactggtacatcatgttggattttgtctgtcatgcaatataatatattggcagctttgtaataactgcagatcatcgttcttgatttggcttctccttggcagtggtgctttgagcagcttcttggttccttctctccttccctcttagtgagggtttccattgtcgttgaagagacaaccatgacccaagcaactcttacaaaggaaaacatttcatagaggctggcttacagtttcagaagcttagttcattttcatcatggcaggaagcatggcagtgtgcaggcagacatggtgctggagaaggagccgagaattctacattttgatccacaggcagcaggaggagcctgggtggaacttgggcactcaagacctcaaagcctgcccctttagtgacaatcttcctccaataagaccacacccactttaacaagacctcacttcctaaaagtaccattgcctatggcacaaacactcacatatatgagtttatgggggggggacataattatttaaacaaccacataccccctgttccttgtttcatttgctcaacttctttgatattcttggtcctcagccaataaaggaggacgacaatcacttccctcaggaaactgatgttaatgatgttagatgttaacatcttatgtgtgggagtctgggagtggacacgggcatgatgcatggtgaagaggcaaagattctgagggcttaaagctgaagctaaggttgaaggttaaggcaaagagggatccattagcctattaatagaggcttcctgtaatctctacacagacactcatttttcttgtggtcattggtaagcaatagaatgcctttacaaaattggtttcaaggtctctgaaaaaaaattccttcgaaagttttgaaaaaacttagaatgcatgggatgtgagtgtatcagcataaaatgtgggataagtatggttggagtctttcagtttctaaaattcagcctcgctcaaacaaactgtatatccaacctcaaaatgccgtacgaagattaaggcaaaattcaataaaagtgctttatgcattaacctaatgcgtaaagaaatggtagtacaggcttagaaaatacaaaaggatttattttgaagataacgattgcgaccttaaaaatagcattatctgcgatttgtaattatgatcggagtgcacttttctgttctctttaaggagtctgcacactcctttggggaacaataagacatattttaaaaaggaaagtaacttatcaaaagttgttttctcattaatgtgtttctaagggggactttttttgacacttaaaaaccagttgttctttgttctaaaagcttgttttagagtgccgtgcttttggttgatgtgagaatgcacaggtatgtaattatcacctcggtaatttttttcacataaagctttctcttaaaaactgtaaaaaatttgtatcttctccaagtgaatgatgtccagccagtgaggaagcctcattttaaaggtgtgaagaaaagaaaatggatttatgatgaaccaaagaactttcctggctctggaatgcggagaggtagaatatccaagcgtttgatatttctaattataatttttcactttcatatgacttaaagtctactttaaagtttacccaattctcctctgaattgagtcattctttagcttggatcatcttctgtcttgataccccatgcttcacgttcagtgtatttctatgaatgtgaatccggcccatttcttccctcatctctactccttgattttacagcagtgcacatcccaaatcccaaacataaaatgagttaccatcatcataataaaaaccggaatgccgagaacgcctcctatacgcatgctccaagagatgcagtaagaactgtcacactgaacgcccctccccgaagccggcccacgagccggtcctacaacaaagctgatgtcaacaaggaacccaaactcaacctctgtccaggtgagcctctttattgatgcggttcgctcttgactgcactttgactcaggatttcccccacgggaagctgatcttcactcctccctcccgttgcttttcctggaccagcatcactgtaacatcttcaatagtggccggaagatagcatccatgggcagtcagtcgtgcacacgatttaaaggccacggaagaatactcacgctgggtgctgatgggttcccgctgtacctccctaaagctttgcctccatgctctgcactctgttcaccctgggtagttttatttcgctagggaggattatttctacgtggttgacattttctcgttccactaagtgcactgtccaattattactgtcagactactaccctggcttttctggaggacatcgtgattactttcgggaagggttagtgtgagggttaactgcaatatttctgacaacctctcatctctcccacacgaccttctaaatcatttcatcatgtaataggcaaaggcatggcgtatgtcaggaagtacaaggccacaggggaaaatcgctttctcttcctgctttagatgagttttgcgcttttgaagttgggtttcagttctcccgacttaacaaaatgccattcagttctctacaattcacagtgggattttgggagtgccaactgtcaagaacttttggaaacagtagctaagggctcgatgtcagtcttaaacaacttaagttgacgtttttgttttaattatttgttgtagaatacaacaaatgtatggatgggtgtagtgatgtatggatgcatatgagcaagtaagtatgcactcagaggaaacttttaatttaattattattatgctattttttgttttctctgaaatactgtgacagatgcgaaagctacagtgcatactagcacaatcttttgccaaagtctagatttgtgggaactgaacccactggcaattgtactggttatccggctatgcttcattcatgcaaatatcaatccataaaaatgacatacaccaaaaagaaaattcttggtattgttatgagtcatgttctgagatctatagttttgtagtaataacctgaaaacacaaataaaataatgtttgggagtcaagaaaaagaccatgactttatagatgatttagctgtgtgtgtgtgtgtgtgtgtgtgtgtgtgtgtgtgtgtgtgtgtgtgtgtgtacctgctctgaatccctggggccccaaactcactatttctgtgggcactgtattcatagaggccacttcataaaaggaaatgtaacttgttattgttttaaaagaaagtttaaaaatatttataaagtagtttatttcttggatggaatgttaaatttcttttagtttttgaaataatataattataccatttctcccttcctccaggcccccaacccaacccactctgtgttctctttcaagttcatggcctctccaaacattagtaagacagtatgttaagtcacataagaaaggctgagaaatagtgtatttagatactcttctgtctactagagtagtatgggatagaaccttaaacccagacacttttgtggatgccaacaagtgcttgctgatagaagtctgttatagctgtctccagagaggctccaccagtgcctgacaaatacagaggtggatgctcacagcctatcattggactgaggatagggtccccaatgaaggagctagagaaaggacccaaagagctgaaggggtttgcaaccccttaggaggaacaacaatatgaattaaccagtaaccccagaactcccagggactaaactaccaaccaaagagtacacatggtgggactcatggctccagctgcatatgtaggaaaggctggcctagtcggttatcaatgggaggagaggcccttggtcctttgaaggcttgatgccccagtgtaggggaatggggtgggggaaggggggggcgaggaggattttcagaaggaaaccaggaaagtggataacatttgaaatttaaataaagaaaatatctaataaaaagaaaacaaaagaaaatgaactgtaaattgagagctttgcaaccatgttgctgatcacttaagtggacgtattaaagtcacttgttttcaaatggtagaggaaacacatgaaggataattcctactgctgagatgtttatagctttgaaatgctcttggaatataattgtttaatccagccatatttcctttcttatttttctcagataaacatatgtcaacatcgtataatggttcagcctggcgaagaagaattcctttttcaaaaacttattcaaagacggaaaaggtatatccaggtaaatacaccccagtgacgtaaatgtgccatgtagttctgaaaacaaatggcaagttctaagctccagaaacaggtttgggaacacttaaaactgataagaattttaagatcacttaaatacataagtattagtagtccctagtacaatggcaagataatgttattttgcttcatggtgttcagttttgcctatttatgtcttatcagtataaataacatgctgtcttgctgaagttatcagagacaaacgtaggctaatatggtctagcggtgcataatatgattaccacgaatagggcatcagtattgttcctggcgttatacattttgctcaatcagagaacaagaatgctggaaacctcaggttagccattggtaggagttctgaccacaggtgggtcttttgctaaacaggttaatgtcttagtctgcttagaaaatagttacagtggatacaaattacttgtcagacaatgactctttccaaagagataattgaggcagagaacttatatctaaatggagatcccagaaattttaaactattctgaatccatttacacctttacaccaggaccttctagaagggtcacataaacagtcacatgctgtgactttcgtcacagagggatgcatttggaacactaaagacgtggtctttgctcgactactgccagagtggctacttttgtaccccaggaacctctttctcctcccaaaaccaaatggttaaacagtagtcatagaaataccagggctcagaaacatatgtcactcagcatgtgagtgggcacctcctatgtgtagcacagaatatatacatccatgtaggtctggattgcactacttaggtgtagagtgtgtgtgtgtgtgtgtgtgtgtgtgtgttagtgtagctttggagagaatgtctgtgtcatgtggtatctggaaaaggcaggcgctattccacataaaaggttgaagacaggttcttaaagattctaagtgtcaaggttacacagatggacatcacacagtcttgtgggtctcaatgaggagtcagcccttgtaagagagattggggagtgaatgaaccatggagcattctggctacaggggaagggatgaacttcagaaagatacgcttggtgtttaactctactggggtgagggtggtacttagctgtaatatcaacagatggcctctgacagaagcataagtagaaaccagtctagcatccagggagcaaactcttgtttacaaaattaaggtccatgtcatccctgcaagtttattagaaaggtggagtttctatatcagacctgccgtgatcgaatctcatcttaacaacatggccaggtgataaggctgtatgttaccattttaaaaccctaggaaggttatctgactcaagacacagatacatcagatgtgctgaaattatgtattctctttggcccattctcctcgactcatcccagaaattaggagaagcagcaagcacagagtctgggagaggaacacaactgcaagaaaaacctttaaatatcactcaattatgaaagcaaagtgactaagaaatcaccaattcaactgaacttgtatacaaaggtctattacatcagcaagaatgaggacttaagttcaagatacacacaagcgtgcgcgcacacacatacacacacacacacacacacataatattatatataaaataatatatattatacatatgtattatgtgtgttatattacacatatataatacattatacatatattatatgtgttatatattatacatatgtattatgtgtgttatattacacatatataatacattatacatatattatatgtgttatatatacaattatatatttattatacaatacgttataaaaggaatatctagtatattataaagcacacatttgttttcttccatgcttcttgaaaactggcaactcccaaattcatcctttccagtttttgcagtcatccttagaccaaagagagaaagattagcttgtgttttccccccatgcatactcttgctagggcacagaacagcctttgtggcatttcccagtggacagatggattgctggagggaagagagaaagcacaagctgccacttgcctgttcctctgaggcactggcagccaagaccacaggagtgtgaacggaccagaggagtctgttgggaaaatgttacatgagtgtagagggagagaatagagaggggagaggggagagaggagagaggggagagaggagagaggggagaggnnnnnnnnnnnnnnnnnnnnnnnnnnnnnnnnnnnnnnnnnnnnnnnnnnnnnnnnnnnnnnnnnnnnnnnnnnnnnnnnnnnnagaggaggggttgtctgcctatgagaatcaaggacacaagctgaaggtgggaagacagattttcattgccagtcttccccgtggccgtatgtgcctcctgatagggatataccagagtgaatatggagacgcctgtcttcctattagcaactgttcattccattctctctaggagtcccctgaatgcgggcttccatgtaatatcagtttagtctttcactcacccaccgtccaaaatgcaatgctctaaaacattgaaaagaaacctagtaaacttgaatgcttgaatggtatttttacaattgaatggctaaagctccatcttgggttttttttttttttttgcctttagatttcatggtatatacatatgttcatatgtattttgtgatgatgtcccagcaaaaacgtcaagaaaattaaatattttgtgtattttgttattagagccaagaagaaatgggagtaagtaagcctggaggttgagagaagaggaaaatgaggaaagagagaagctccagccatcatctgattcacaatcaaaaatgaaaattcaaagaatgagatattcaagtactgcatagtatatagtgggtagccaacgctgataaaacgcaaattctgaaaataagacgcaggaagaacattgtgctctttcaaaactgataaaatgcaaattgcaaacagctgcctgtttatttatgtatgtctgggattcattcaatacattaccacaaaacatttaataaaatttcaaagtttggcaattaaaatcatcctttaatcgtgagcaagttagagcgcacagactgcggggtgaagttggtgcttccatctctgctctttgtgataatcttcactgaaaacagctcccacctttttcccctcctggatttcaggcagggctctcagacgtagttcataaagcatacacaaattcaacaacgtcccagggctgcagttggtgaggagtaccttggcagaattttaatatgaatatcctttgatgcagcagagacagagacaaagttggcttatcatgcaggaaatttgctgaacagtatcttttaattggcaactgaaaaatttgctgagatgggccacagtcaaaactgaaaagcaaacattttcctgtcctcccccccaaaaaaaatcaaaattatatgattataatggagcaaaggaggttctttaaaaaaaaattagtgaactgacatagttcccagaagtattactgaaatttcaagtcctcagtaactccagaagtacagatagaagtgagggtccagtggtgacacacacctttaatctcatacttgggagacagaggcaggcagatctctgagtttaaagccagcctggtgaacaaagtatgttccatagtgagaccctgtctcaaaaccaaaagcaattaatttttgaaagtttacctaaaatcgctcattttcagtgtgactaaaaggagaacccaaatgcttagctctcaatctaaaggaacgagtatggaagcatataacataggtgaaaactgacagacttttctttaatcagctaagatttaaggcatcggggagcaaatctaacaaatagctggaaaaacaataaggaagatgaattaccatcttagaagctattacggatttatctgtagggcagtttgtgtgacacaaaataatttagtcacagaaacaaagataccatgtttatctttcaggtaggagtaagtaaacaatacagatctcagttcaggatagcagctattagacgttggcggtgggctggggatggggtggtaggatggtggtcttggagtggggggtaaaaactttagatgaaaggaacccgaaaatcaagatacagggaatacgttctagtgttctacagcatagaatggctactagagctcacaattacgtaagttatgaaggtatagaagtgaggtgcttaaagatttcatcgtaaagaaatgatcggagctggcagagtgactcatcagctaagggcaccttggctccaggcctggtgacctaaattcttactcagcgcaccagatgctcgaggaagagaactgactctaaaacattgttcttgatttgaccagtgcacactgcaggtgttgaaatatcacagtccagaccattaatccgtgcaattgtaaactatgtgtctatcaaaacaaagatgctaattacctctagacttaactgtttaataacatattagccagagtcctttggttcttctcaggaaaccttaaatttattctaaagtgagtatgaaattccagagtggtcagaatagtttaagaaaggagcgacaaagaagtataaaatataggtttgctctgaagggcaagagtaatgtttaatttacttgaaattaaattttgatttgttactggttatcataggcactactatagtattttagacaaccttaacgaataatatagaagacctcttacacgggcttacatgcccatgtgatgtgatacaccacagaggaagggttgttgactgatgtaggcagccaaatgcctaaaagatggcgcctcccccgtctcagtaaacaacgccactgcgcaggcgctagcctgaatctggcgccaacccctcccaggccgactgaccaatcccaggaggacacataaccctccccagtgctggggtgtatataaggagtcctccctgggttccaggggttcctgtagcattgaggtgttcctggaataaagctgtcgagatgcggacaaggtgagcgcaacagactgatgcagaaaggagtgcctgttaattaaatatgagggaattccttacctatttgtggggaaggatgacaatggattcctaaacttgaacaataaatggattttcagattagtcaagcgaaaatttataaatgctctatgttgaatgggtgcttgagtcagagaaaatttataaatggacccctgaacaagattttgatgaacttaagtttacaattgtgctggacaatgtttgagtaaaagaaacacaaaccaatatgcttccccccttctttttgctttgtataaaatttaataatatatttactatacttaatgaaaaacaggcgtggaatacaaaagcacttgccagaaatattgttttgtacaatgaccatgatctacttttaaattcacacagatcctggtaaaacaaattcaccaaataaatgacagtgtatttgaaaatattcggtactggcctctgaaacatcttctgaagatgtcgttctcattggttctcctctctttaattttatgttcctggacatacataatttatctcacactacaactgctaacatttttttttcttaagttctcttatgttaagttcacttagggagcccaactaatttgtttccaattctagtcttcataagtattgatgctatcttaaaaaaatatttacaacccagccattgtcccccttctagtcccccctcccacaattcctcactctattcctccaccctgctgtgccttacccccctactctcccaacaccaggtctcccccatttctggggcctcaagtctctcggggacttggcacatcttctcccactgaggtcatctttaaggaaaactcactacacacaacctttcctttgaaaaaaggatatatatttgccactggctatgttttgacctggagatgtaagttctaggcccacaatttctttggatttgtaattattttgtcacaagttggtgtctttcttgctggaaaaaaaaataataaaagacatgtagtttgctcctggcagaagaagaaatttatgccatttgtgaggttattaaaacagaccatcctaggaagacagggagaactctgtgttccagttccatctgctttgaactgctctcactccactgtgtgtgtgtgtgtgtgtgtctgtgtgcgtgtgtgtgtgtgtgtgtgcagacaactgagttctttttgcaaatgatgctttatgttcttcaccccagggaaagcatggccttccagcaagttaagtgagcttagtgggctggctgggtaattgccaataaagtcagtaaacccttgcagcttgcagccagtagccccaagaactacttaaggctcccaagtttctcaggtgctagctagccatttgaccttggaggaaatacttcatttctctaaagaatacttttctaatttgcaatatacttttctgataggagtgggctggatcttagaaacaatatgtgaaacattaagagttgtgccttgtgggttttgataaatggtaactatcaatgaaatatatctgacagattatccacattcatttcctggagctacagccagagttactccacaagagatcaagctgaactgaaaatccccaaaatttaaaaatgataaatttgtgtaaatactctagctataagtaaaatagttcatggaatacaagtaactatacagacagggagaacatgtagcaagtctagtaacatttttaaatgttaatgttggccactgaaaatgcaagtctctcttatgtttttccagcaggctaatgtacttgaatattttaattttaagtataatagacctataattttcacatgtaaattttatgttagactccaaggatggaatttttataaggtcaaatccagaccatgatggctaatcattttgatttgacccaggaggttcgttctaaatgtttgccatctatcgctttcttctgagatggctatactgccccctactcaagaccagatgagtcttgtctacaccagcctcacccatccttgctatgtgaggcaatacaatatttaataaataatagacccactcatccccctctaaacaaaaggtgatacttggcagacatcaggaactccttgagaagctgagactgtgacggttgattgacttggttagatcttgctgtaactccagactctaattacagtttatctaggaaagtctttagccctaggaatagccattgcttgctcacccctgtgtcagacctaacatctggggactaacaaatttctcggactatgtttacagaacccagtctaatccacccaaagggtaagatttaccagagagcatctgaggtgtctaactgagacttctctgctctgttgtaactaattaaggtttccactaatgtgtttgaaaaaaatgccttgattcatgactttctttactataaaaataattcatgaaactacttagaattaagaattaagtaaaatacggaatgtgaggaaaacctaaatctgtgttctcagggtcaaggtcacttgtatatcactgtaaaataaactcttttttcccttaaaaaaaaaaaaaaagagttgtgcagactttggtatgctagtgtgaccatgttttttcagactgattttaatattgagcccacatgatattaaacagcaattaagtgtaagaactaaggatttatgctggagcatggattagaagcaacctccagattttaggcagcagatggttaattctcacaagcattttcttgttgtctatgagattctctggccactgcaaatgtgcacatttgctttcatgcatttttattatggaaaaaatctatttctagtactttagtaaaaaatattactaaaccataataagagaaagataattcaattgggtatactactagaagttaaaccataaaacacacacttcagaattccaaatgcattttcatttttcattttaaaattctgatttaataatttatactccgtagccacagtcatgcagccctagagaattctcgccatgggcactgtaactctgcctatagtcaagtaaacggttttcctgtgatttttccatgaagaaataatttcaaatttgcttccttgtgacacccagaaaaaattcttttttcccctctgttgcatagttggctaatatatttaaaggatataaaatggcctaatatcatactgaacaattctttttttaaatttttttaattaggtattttcctcatttacatttccaatgctatcccaaaagtcccccataccttcctcccccactcccctccccacccacttccacatcttggccatggcgttcccctgtactgaggcatataaagtttgcacgaccaatgggcctctctttccactgaataattcttaataggagcaatgtttttcaaaagtgtctagtttaaattaagtaaaaaatatttattggttggtggtcagggttaattttactcattactggaagaagctaatttgatttaaataaaggtgtttgttttttaagattgggcctcgctctgtagcctagactgaccttaaattcatggcaatcctgcctctgcctactggattgtgggattataggtataaaatatcacactcaatatcactaatgccttttcatggtttggctttttttgttgttgttgatattttatgtggaaacatttttgtattaagacagacctattggtttttttaaaaatattttaaattaaattaattaaattatatgtatttgagtatatatgtgtatacatgcacttgcctggcatgttaaacatagtagtcaatttctgaagaagaaaaaacccaaaaaaacaaaacaaaatgctcggtgggggaaaggtacttcccctcccccacccctgattatgcagaggaaagaacattttaagtaatatatatgtattcttaaatttcactcataataatcatcttttggtatatccctattttacctatccattttagaagctagccatagatgaaaactgttcactatcttgctcaagttagcagctaatcaatgctacctttgaccctgcagtctctttcatttgatagactgaggtatttatctacaatctatcttctgaatgcaatcttgtcatttcagaatgatatcagatcatagaggtcacaatttcagtttggcgctttgcaaatgtgcagatacaagatcagaaattaagataattgttcaaagtctaagaggagatggcatggacagtaggttctctgcaaagtgctatagagttgccctcaggacatgcctgagtttactatcatctgtgtgtaatggaaagaatcataaagtcatttttaatttctctgatatgcactaggcatctatgaatagatactgataatgtttgttttttaaacaagctcacattttgggcttatcatgcaaaatcatataattacacctttcatatgtttctgattgttgagtttgggtgatgtatgctcgtatgtgatgatttgtacaatcatttaatgtgctatttataactattatagtgctattgctaagtggtgatatgaactttggcaaagaatggccatgttaataatatgacctcatagagttgggaagaataaatatgattatccatgcaaaacttgaaattatacctgccactttgaaataattctacatattacaaattttctttctattaatataagtaattttgaagagatctaagttaagggaaaatagcatttcagcattttacaagctagctaccagattgttaactataatgtgttgttccacattagcatatatggttttcattgattatgttgagatagaccttggagattgtgcctgagaggacattaccagagaaaatcaaacttcaaatactctttgcagactgattaaaacataagtatttggaggtggtgacacctgtgacaaatggttgaagtgtgtcactggagagtatgttttgagggacattttgaaatcctagtcccttttggtctccactctgcttcctggttgtaatgagatgaacgtttctgctgtcccatgcatggctttgcatctgtgacagaaagaaagctctgaaatgatgaacaaaacaaatgcttcctcttttatgttgtttctgtcaggtgtttggtcacagtgacagtgaaaccaacacaatagtatgtgacagagatgtctgtgtgagtgagatgctaaaaaaaaaagttctaacattgttaaaacagtaaagtaagtgtttttcaggcacgacacctccaggagggacaggaactcctgtgaccctgtgactggcctttacaatgcaggagaaaaactgggatgaactgttatcacagcagggaaaagtagagacttaaagctgtagatcaggtctctctgagaaaagggtccagagaaccacacacttgtaattcggtcaaggcaggaatccttgggaacatttgcttcccaaattacacctttccccaaattaccagttgagaagtttaagttcacgcagtaaaatgagtttcatcaattctacacttctattgttcgtctctattgctacccgacatcacctcacttcctaattagaaattgttttctctcctacttggacagcaatattgtatcataggaactacatttacttattagtctgtcctctgaaatatcatttaggagattcttctgaagaatgacagggattggacagtcactggcagcagtagatgtgatcgattgatgtatatggtcattctcagggacctacagaaaacccagtattgcctccatttttatttacttctctggaaggaagaactcacattgtatgcagccctaggtggcctgaatatctcagcgtagagtaggcagcccttgaatttgccagggattattttgcttttggctcccaagcaagttctgagattataggtgtagactgccacatctggttgatgttttccattttactccatttctaagtttcagaacaaatacctttaaaaaatccactcacttattttagtttctagtatgcactgctactgagtctcccacaagccattaccccacatccctctataagtagttgcatccgtgtgcatgttctctcagttgattctgcctgtcccttatcccacacaacccttccatgcccaggcccagctgggtcctactcatttacacactttcttggtgagtccttcgtgtcccagtccctggagtcagctgagagtgatgatagtgtgccttctcagttaccacaagattggatcactcagtctccaataataactcaacacagaacatttgaaggggctgatctatacactcttttgattggatctgaaactttggagaacatgaaaaacagaaccaaactttttaaaaggcagaccagaatttcctatgagacatacaaccaatgaaacaaatgcacatacccagggctcattgcaaaaatacaaacagtatggtcttctgaaagtactatagaaaagttcacaagatgagaattgcttagaaggactcctaggcacataatttaagagaacaatggaaaaagggatccattagttgaggcagctttaaaagggcaagaatgaaaacctggatgaactgaaataggcaaagaagaaattcttggttaaagattaagaaaacacaagtgtacagctgattgaaacaacaaagacaatccatgatttgaacaataaattcagtaaagagagaaaaatgctaagaaaactcaagctgaaatgaagagggacttgaaaattttaacaaatgaattagaaaactcggggaaagagctttccagaggtatatgtcaagtagaagatggattatcaggatttaaagatacagaaaaagagttagagcacccacaggatatgacaaaaacaaaaagggatatggaggaatttgtgataccacaatacaaagacaaaaatctatgaattccaggcctagaagaaggattccaggccaactgggtaccaacttccgtgttagtcacatttctgtggtgataaacaccatgtctgagtcaacttatcaaagaaagaaggcatagtatggttagaaattgtccgtttagtggagaaggatggaacattaagtgggggagaggagagatggggcagcttgctgtttgatgtaagatgtggaacttactcatagagtgtcagtttgaacaaagccttgtgaagaaatcgggctggctgaccatgctttctcgcctccttgtatacttagggcacaccaagggtcagcacaataaggaggatacttcagatacacgcactgaaggaacaaacacacttgcattgtcaaagaaaaacttctgtgaacaaagatagaggagtaaacaatgctttatatgtaacatgacacggaggctaagctcaactccccaaagggctggtgatgtgaagagctgggatgagggattgctgaaccatctgctcctgctattggcttcactgaaaaacaaaacatgtgataaaatggaaaccgctgtattctccccaccttgggcactgttacaactgcagaagagaaagttaggctcggggctgcggggggggggggtgctggagagatggctcaggggttaagagcactgactgctcttccgaaggtcctgaattcagatctcagtaaccacatggtggctcacaaccatccataatgagatctgattccctcttctggtgtgtctgaagtcagctacagggtacttatatataataaataaatcttggagctgggttgcgcaggggccagaacaagaagaaaaaagaaaagaaaagaaagtctctccctgtcttagaaggtaagagaagtgtggtgtagtttcccttgaagattacatctagtagattgtccctgaattgaaaatcaggtgcagaggtattgctaaaatctaaaaggggcatttacaatgacaactttcct

SEQ ID NO: 110 - DNA, 1420 bp, Mus musculus
tagggttcccagtgccgattccgacactgtgaagaagcccttggcagtgacactgtgtgctcattatggagagagagaaaatgtttagacccactttgcagatttagacacatggaaatgcagcaaaactgcagcatttcatgcttctgggaaacccaacctctgggttgtgtgaagatcagttgtatcttttaccacagcaaaccccgaaatatcaatggattgtttttgccaccaagtagcaataccaccttacagaaagaaagtcaggaaggaagcccatccccaacccagagtcaggaatctctgaaacccatggagaacgtatcaagacccattcatcatccattagttttaaaaactaactttgaagaagaggaggaggaggaagaggaaccaaatgacatcccatcatcaaaaagcgtagctccgacagtggagaaagagttagaaaagcctttggaaactggcagtgaattacaagaaggagatggtcttacagttccaacaaagtttagcctatttgaaagggcaggagaggcaaaaacatcattggataggaaaccaaggactgacattgctgcttttgaaaatggaggaggtgactgctatgctccacagaggatcatatttcttggagtggatgaaagtgaagcattagctgaagacaaagaagccacctcaaaatgctcaaatgtcaaagtgaatgatgtccagccagtgaggaagcctcattttaaaggtgtgaagaaaagaaaatggatttatgatgaaccaaagaactttcctggctctggaatgcggagagcagtgcacatcccaaatcccaaacataaaatgagttaccatcatcataataaaaaccggaatgccgagaacgcctcctatacgcatgctccaagagatgcagtaagaactgtcacactgaacgcccctccccgaagccggcccacgagccggtcctacaacaaagctgatgtcaacaaggaacccaaactcaacctctgtccagataaacatatgtcaacatcgtataatggttcagcctggcgaagaagaattcctttttcaaaaacttattcaaagacggaaaaggtatatccagagccaagaagaaatgggagtaagtaagcctggaggttgagagaagaggaaaatgaggaaagagagaagctccagccatcatctgattcacaatcaaaaatgaaaattcaaagaatgagatattcaagtactgcatagtatatagtgggtagccaacgctgataaaacgcaaattctgaaaataagacgcaggaagaacattgtgctctttcaaaactgataaaatgcaaattgcaaacagctgcctgtttatttatgtatgtctgggattcattcaatacattaccacaaaacatttaataaaatttcaaagttt

SEQ ID NO: 111 - protein, 373 aa, Mus musculus
GSQCRFRHCEEALGSDTVCSLWRERKCLDPLCRFRHMEMQQNCSISCFWETQPLGCVKISCIFYHSKPRNINGLFLPPSSNTTLQKESQEGSPSPTQSQESLKPMENVSRPIHHPLVLKTNFEEEEEEEEEPNDIPSSKSVAPTVEKELEKPLETGSELQEGDGLTVPTKFSLFERAGEAKTSLDRKPRTDIAAFENGGGDCYAPQRIIFLGVDESEAEDKEATSKCSNVKVNDVQPVRKPHFKGVKKRKWIYDEPKNFPGSGMRRAVHIPNPKHKMSYHHHNKNRNAENASYTHAPRDAVRTVTLNAPPRSRPTSRSYNKADVNKEPKLNLCPDKHMSTSYNGSAWRRRIPFSKTYSKTEKVYPEPRRNGSK

SEQ ID NO: 112 - DNA, 53885 bp, Homo sapiens
  misc_feature (1)...(53885): n = A,T,C or G
ttccatccactttttctgttggaattgcactgtatatatctgcatctaatgccttgtgacttacagtttcagttgccaaaactttaaatggcttaaaaaaagagagagagaaaaccggtttaagatagatagcctctatgtctttgcacacatgctcacctgaaatcttcttaatttcattagttttaaggaatgatctccagttcatctttcagaatgatttaaaaatatttattctgtgaagttccgaattgtttgctcccttctgtactatcacagcaacacctgattttctacacaattctgtagttatttacgtttctttatccacctttgttctttgcaatgctgcatccctagcaaaggcattcagtatatttaatcatatacctgcaattatttactaaatgcctaagattaagcattgtcttcagcactggaaatacagaggtgaacaaaaaagtacctgccttgggtgaaacttgcattttaatgagggagacaaaagaagcacaatgcataatataatgttagctatgacaagcaagtgctaaaaacaaatgggtaaaggaaagagggatgaggtgctattttggatacggtggaaagggaaactttgaggaggcaacctttaaccaaatttgaagcaaaggaataccatgtaaatatctgaggaaaaaaacaaaaggtaaggtttcttgatgtgtctgaagaatgcaaggcagacattgagtctggatctgcgtgaagtaaaactagattgtatgcttaattaacttaaacttcataagtgcttctggtagttcaatacaagtatctttcaattgtaattttcagttttcccaagagtcaatctactcttcagtacatgagactttccccctgttttataagcacaaacatttttgtgatttacaaaacttgttttttaattaagacttggttcataaggagtcttagcaaggatgtggtaatgtactcctgtctcaggtcacattctcagggagcaggcaaaagagacggaagatagttcatactttgtttttgccttttttaacctttttttccttgcaaagctaatagatgctcattatagaaaatttgtaaatgaaatatacaaaggcataaatgaatcacccacgtcatcacccttcagatgtatcacaaagaacgttttggcatacttcttgtctctttttcagtgcatttttctcaatataattgacatcagtttctatttgctaccaagaagtttctttaagagccaaaatcaaatggtttctggatttacttttttcatgtttttcctcctcaactgcatgataaacaagtgctattataagcacaggctgaaaaactaatgatcttcatccttttcatgaagcaattatcattagtataccttcattgtcacagagcttgcatctctgtctaaacataacagatcacagactttaaaagcatcttaattttcagaactattctatccttgattcagttttatatcctaaaaatcttcagatgtatcatcataaagttcaacaaatactcttaggaaaatatattatctgcctgaaaggaaagttcaccccgatggtttcctaccattaatagtgatttatattagacatgacagtactacaaacttaaatttctgagctgtatcagctatggtttatttacttaaaaaatgttcaagatggcaaaagaaaaattgcctctataaaacaaatctcttgactcttgagttaggcttcactttgacaacagttttcttcacagttacctgacatccccatgtagtctgatgaattgtttactttgaaagttgtatttaggagtctatgttgatctaaaaatctttgtggtaactcattcaacaaagcttgagcatctagtttgtgaacggccttgtcctagactatgcaggcagaatataaaaaaaggagtaaaacccgctggcatcacctcttagacgagacctcatattagcactcctgtaaatacagccccactgatagcacaagctggcccactatgccatcttagagatgttataccgtatacttcagaaccattttagttctatgtctttgcaccatgagtactcaagatttgaagttgattttgtttttttcatgtttttcccctaacaattttcaccgttaaaactagtaagaatcacttgccttttgtttttcctttgagtttgtttgctttgagagtactcactttttgtccctttcagctttatcagtagtcagctgtttacatatttaatttatggtttttctactgtcaggaagaagaagggcaccaaggatgaggaaaaggcagtttcttgggttcctactaactttttatctataatttattttcatttctgaaaaagacttatgccacttctatagtctgtatctgaagtagcatcatcttacaaagtgaaacaacactgtacaatataaacatactgctgtgtgtgagcttaagacttatgcactattgcaaacaggtaaactaagaaattagccccttctagtactgattcaatacttttaaaatataatcgtctagtagggattcagtactttaaaaatacaactggttttcactaacttatgatgctggtttcaaaggatatcaatttaacccagggtggtagagccacagggtctggtccaatagcagtgtgtgtgtatctaaatttatcaaagatcctatgtgggggggaagattactctgccccatggagctcctgatgagtataaacattccttccataaaaatcaatcatctgctctttgctatcgacatatccaaaggacaacacgagacactgaggggtacacaaagttctccttctccacctgtcataaaaggctttagactattaccggaaaaacaaggtacgtgtattaaaatagtgaatatcaattgagtggccctctacaatttctgggtaggggaaatcactgaaatggctaaattgataagattttatggagaagaactgacttgaaaaattaaaaacactctagaggtgatccagagtgaacagtctgagcaaaaatatgagacaggattgtggttgatatgttcacaggatgaaatagatggttaaaacagaatccactttaaggacgatggaaggtagattgagcctcattagtgggaggccctgaattataattaagaatgtggatgctatgctataaacgatactgtaagctgttcttaactgcagagaggtaagagaaggggctgcttattttccctggtggagaatactttcacaaactactcccctcaaacatacgaagttgaaaatcacagtagagtgaaatactaaaacagatgataatgtttcatatggattacatttgttacagctaaaaaaaaaagccaattactgctacaaacattgagtaataactgtggtattctgacgaggaaagaacatggtgatgatcagtctgagtggcaagtaagaccagttaggtggtgcaatgagcaggacatgaaatattaactgtaacagctgtgacagcaatagaaagcaggaaaagatcagatgctataaggtaaaaagcatcaaggtgaatggaaaactggcatgaaatgattccagggttcattctttaattcaacaaatatttatccagtgcctaccacgtgccaggtcctagaagctgggactaaagataacagggcaatctttgccttaaacaagttttagtccagaagacgagaaagccagtgccaatgatgaaactcaagtgaggtggatttccaatggacatgttggttttgtttgaaatcagcaaagttgggaagcacccaactaatcactggggattctactgatcaaagactacaacgttttatagtacaatatgaaaaaattacccaaatataggttactcactagcatttaccgagggcacactatggaaaacacgttgctgcaacagaaaaccttgagaacaccaaagttagaataaattaagtaattactggtaatatgaggtgtgaacttcagtgacctaattaggctactgtcaacaccgccactggttcggacagaacaggtaaagcaagtcttctaatatccaccctttcttactgcactcttgaaaagtagtaaagcttggactgtggcaattacctgattagggggtttccccaaaaggtgctgacctgaaaaggaagggacatgctgtggatgtgagttatccatttccttgcgaggacaagtttgaatctcctgataaggaaaattctttcgcaaattccctccctcacaactaagaaaagtacaagaacctggagctcagggcgtacggaactcccaccccagacctccccagggaaacctacagaggttcctggcctgcagggcagttctaaagcgcccagccgccctcgccgggttcgcactgagccagcgccgcggggaggagcccacgcgggccgccaagcctgcccggcgctcctccgtacctgatgctcccttttggaggaaggctcctctttcacctccgtcacaaacacacacggcattttccgctgcacggagcccaagcgcttcatgatgagcccaacaagcagtgcgaatggagggcgtgctttcgagcggcgcccggtccagtcgcggagaagccctgaagcagtcacccgcacggctcaggccacgcacactccgcgcccagccaccgcggctgcgccccaactaccaagcccagcgaggggcgggaacgcccgtccagaagcggcttcctggccgcggcgccttctgggagttgtagtgcagaagctgaggcgcctggtgggttcccacgtgcgtcctccgccccccaccctcggttttaataaccgtgaaaaaaaaaaaaaaaagatgcgtttcccgaacgtgggtacttagcaatacctagtaactaatgattttttgggaaattaaataagatcaaattataagcaatgaacatttcagatgtcgatttaacacagttccaatggaaactgcttgcctgttatctttagttcgtgggggaagcactgtagaagtttagaaatggctagagacatccccagattcccaagcagaatgaaaacttcctttccggtaagactatcagaaaaccctataataaaacacctgggatcaaaaaaagttgtcgtttgaactactccttattgtgcagcatagcatggtcgaaatgattctgatgttcttttcggagtgagtgcgaaatttcagccttagactaatccaaaagtacaggaatacctacaaccagatttcattctcaagtttttcataagaatcttgtttaattaaaggtgagctccaacagcccaaatggcttgagtaatggtagtcaatcaactgcgagctaaaaacagccttaacttactgctcaaaagaatattttgagggtaagtgataagatggacaatgactaaataaaataaatactaaatatttaggaatagtagcctttccatctcattgaatgtagtagttcctagcctgaagttgtaggggaattttgactttactgccatcctttatgggcttggactaggcccaggtctcatttctttgtcttatctgcatgtactcaactgtccagcatgttactgacttagcccttggaaaaattaaacaactatatctcacttagaggtatctaactagtaagggggttctcaaagaataaaacatcttcctttaaaaagttcacagttatattgaatactgacagtgaaaaaaaataaaatttaaaaaaagttcacagttttttgattactggattcagaggggagggaggaagaaagagatttgccatttcaaagtgtttactttcttttctactatctttttctcacaggaaaacacaaaatgttctcccacatcacaccccgcctgcatttatcaaaaaagaaaacacctgatgctggctgtgtgctgttggaaccagaaactttttagcatattatagtcgagtgccagtgacttctttgttctttcagaggcattctaaaaagcggcgtgtttcacgaatctcagagacaacaactttcacaactatcaactgtcacctcccaaactgccacagaaccttttaagtccaacattctgtcatttgtgggaaatactcatcttctaaaacacactctacttattctttgaatagtagttgcaaagctagtcatctctcaggaagcactttctatttccaaaactttggtttcatcagtacctggagcaaagcttctggcagaaacacaaatcctcatcaggggagaggcacaggatcaactcacggttataaactggactcctgctctgacgggtagcagccatcaactttgcccgattctcataattctgaagggtcaccaaggagttgctaccagccactgtacttaaagtggtgtcacaggattacaaaatagaagaaagtctttcttctctgactaatatgttagtgctctagtaagcatcaaagatgaaagacacacaatgtgagcctgctttggccaacacaaagtacttacagaattttcaggcctacttccagccctggagacaaatttcccatcattcttcattacaggagtaatcatcctcatagggctgtaatagcttttttttttttttagatggagtctcgctctatcacccaagctggagtgcagtggctcaatcttggctcactgcaatctccacggcttgggttcaagcgattctcccgcctcagtctcctgagtagctgggattacaggcgtgtgccaccacgcccagctaggttttgtattttttttagtagagacagtgtttcatcatgttggtcaggctggtcttgaacccctgacctcatgatctgcccacctctgcctcccaaagtgctaggattacaggtgtgagccaccacgcctggccgtaacagctttttttttttttaagaccagaatgaaattcccaacagtaaagaatagaactgaagagaataaggaaaagaaaaaaggggctgagggagaaggaaaagaaaagagagtttaaaaaggtagagaaggtaagactccaggcattctaaacactaccaaaatgtacagatctattttatgtgctctgcaatgacaaaaaaaaaaaaaaaaaaaaaaaaaaatcccatgtgagtttgacctgtttttgctgtgtctactggaatgtagctgtttgcacctaacttcaagaagtaaacactttttttcagactttctcctttgtaaaacaggaattctcacaatgactttaatcatgatgttacatgtaacatgcaataatagtgtttggtaagaatatttgaaaacagtccaatgaagctacaagttcgcaggtgtagacagtgtttatctggaggcaaaacccacttaaaatatttcttagggatgtttctcccagtagcttaagtgcttacttcatgggtgctttgttctagagttagaagatagggcaaaacaaaatgtagttatatttttctatgtatctttgccagtattttcaagggtttagccaaatctttattctctacttcatttacctctcacactacctcgtttttttaattatgttcaatttacatttaaaaacttttttctatattttattttattttacatatcagatttttatcctaaaacattgtcttcaaaaagttcccagcagcttagcttgttttacataaccgaagtgggaattcatatttgtcttagtcttttacatttctaattaaacatacatgacaatttaaaaatacgtttttatctagagtaatgtgtgattttcatggcaccttttatgttatttattgatatgacttggctgtgtccccacccaaatctcaacttgaatcatatccaccagaattcctatgtgttgtgggagggacccaggggaagtaattgaatcatgggggtgggtctttcccatgctaatctcatggtagtgaataagtctcacaagatctgatagttttctcaggggtttccacttctgcttcctcctcattttatcttgctgccaccatgtaagaagtgccttttacctcccaccatgattctgaggcctctctagccatgtggaactgtaagtccaattaaacctctttttcttcccagtctttatcagcagtgtgaaagcagactaatacagtaaattggtactagtagagtggggtgttgctgaaaagatacccaaaaatgtggaagtgacttcagaactgggtaacaggcagaggttggaacagtttggagggctcagaagagacaggaaaatgtgagaaagtttgaacctcctagagacttgttgaatggctttgacaaaaatgctgatagtgatatgaacaataaggtccaggctgaggtggtctcagacagagatgaggaacttgttgggaactggagcaaaggtgattctcgttatattttagcaaagagactggcagcattttgcccctgccctagagatttgtggaactttgaacaaagtacctgagagatgatttcaggtatctggtattgctgaatctggaagattgaatgcttagcaaagcattcaaaaggtgacttgggtgctgttaaaagcattccattttaaaagggaaacagagcatgaaagtttagaaatttgcagcctgatgatgcagtagaaaagaaaaacccattttttgaggagaaattcaagccagctgcagaaatttgtataagtagcaaggagcctaatgttgatccccaagaccatggggaaaatgtctccagggtatgtcagagaccttcacggcagcccctcccatcacaggcccagaggcccaggaggaaaaagtggttttatgggctaggcccagggtccccgtgccatctgtagcctagggacttggtgccctgtgtctcagccaatctagccatgactgaaaggggccaacatagagctcgagctgtggcttcagagggtgcaggccccaagccttggcagcttccacattgctgttgagcctgcaggagcacagaaggcaagaattgaggtttggaaacctccacttagatttcagaagatgtatggaaacacctggatgcttaggtaaaagtttgctgcagaagtaaggacctcatggagaacccctgctagggcagtgtggaagggaaatgtgggctggagcccccacacagagtccctcctggggcactgcctagtggagcttttagaagagagccaccatcctccaaaccccagaatggtagctccactgacagcttgtgccatgcacctggaaaagccacagacacttaatgccagcctgtgaaagcagccaggagggaggctgtaccctgcaaagccacagggtcagagtgcccaagaccatgggaacccaccttttgcatccacatgacctggatgtgagacctggagtcaaaggacatcattttggagctttaaaatttgactgccctgctggaattaggacatgcaggggtcctgtaactcctttgttttggccaacttatcccacttgcagtggctttgcccaataccagtatccccattgtatctaggaagtaactagcttgtttttgattttacagactcataggtggaagggatttgccttgtctcagatgagacactggactgtggacttttggattaatactgaaatgagttaagactttgggggactattggaaaggcatgattggttttgaaatgtgaggacatgaagtttggagggacaagtggtggaatgatatggtttggctctgtctccacccaaatatcaacttgaattgtatctcccagaattcccacatgttgtgggagggattcagggggaggtaattgaatcatgggtacgggtttttcccatgctaatctcatgatagtgaataagtctcataagatctgatcagtttatcaggggtttctacctttactttctcctcattttctcttgccaccgcagtgtaagaagtgcctttcacctcctgccatgattctgaggcctccccagccatgtggaactgtaagtccaattaaacctctttttcttcccagttgggtatgcttttatcagcagcatgaaaacggactaatacatttatgaggaatattttttattaatttctgctgggttttaattatttgattaaagatactaagaggaagatataaataactgctgattgaaatgtttcattctggaaatcagagtatttcccttgttttcaacaaattctcaaagccttcaagcactctggaaactttctgctataggaagaagatattcctctttttatgatggatgaaaaataaatggaatatagccacaagatgaataagtagcccaatatattttcaggtacctattaatatatcacaatttgaatatgatttttcccaaatcaatggatagtagagagtacatatttaaataattgtttttattatcttagaatatgagtagctcatttacctatggcaaatttttagtgttattcccaaaacctctatagaaacgaagatttagaaatagctgtttacttgtgaaatacttatcactttctattataaaagtataaactagtttatagtccatattcaaccagaacattgaaagattaaagtatgctattttatttttgctagtcctttgtagttaatatgctaaaactgagtaagggaaatacagtgttcactcaggtaaactgtagtttacctgagtgaacattggcctgcagttacatgtgaggtcatttatgatgagcaaacaatggattaggtaacaatgaggaaaattctagaagtttgagtttgtgtgcttactagcaaccactttcagcgtttctgcaaagctagagaaggtatcttctaatttaaatgtctttaagaattatctattgcgtaatatactgtcaacaggaggtcagttttaaaggaatactactgatagcctgaaagactgtggaaaagaaattatttttcccccttacacactgatagttcttgtatttgcattcctgaaattcatatatatttttcaaaaaaaaaaaaccattggattagcagcaagagagttgaaaatggcagaagttgggaatgactgctatttcttttttaattccacatgcataaaggtaaatattgtacaattgacagtacttcacatgcttaatctttttagtagaatgaagggagatatggcaataacttgtattgctgaacaaaaatttactattttcttgcaagatatcttatatttgtaaaatctggagtaacagcttatcatgtatttttgacatactgaatttctctgaagaaatctgagataatttaaaattattatttgtttgaaactacccttatatataccagttatatgtctatagcttttgaatcttcatgtggcacttttgcctatattatgacaccttgagacattaaattcctaatattaaaacatcataggttacaagatattgttttagttaatatgattccagtcattataattcaaatagttgaattcaggtaagtgtcaaacttagtgtaataaatctgttttcctatttgaaatttattaacccaattactgaattttcctctgtcaaaagtctaagtaataacaaatatttaaatatcattaaaaaagaaaattaatataaacaaattggccacatataaattaaactttataaagttaaatgggaaaaactgagaattcctccaatgtattaggatgtatagatcttagtaaaaccagataaaggtagaaactcaatatttggagctttgtgctcatgcaagaaataatccagtgaaaaagatgatatgtctggtttcaagtgtttcctctctgttaggaaacctgaatggagtcaacctctctgaccacagaaattggattcacttctattacctgttagattaaatgctaggataataaagaataataacagatttcatgtcccaggtgggcagagtgttttgtctatttcactgctgtatccccaagtacttagcacagtggctaatgagtaagttaccagtaaataattaaatgaataaataataataatagctcacaataccttatatcacatcatttttacagctaacctgtaaggaaagtagtttttatttcctgtatacagatgagaaaactgaagcacagagagtatgagttaagtattaactttgtgacaatgggcaagtggtggcgcccagggtttcaaataccagtttattgacttgaaaacccctgcctactaacccgtgctatgagagtatatggatctactttaacaagggggagagagtgaagatggaagtaggagagagataaaagataaagaacaaccatggaacatgtgtcaaaagagggaagaatgttatccacctctcttcccacacaacaggggcttgtagtttttaccaaatgtgcgtttacatttaaaagaacatagaatttttaagaagtaatagcggcccattaaaacaatccacatctacttttgttggcatattaacaagtcagtgagtatatgtataggcaattgtttatctttctaagccaaaggcacaaagcacatatatttaatgtagtatatcataatacaataattaaaattccacaataacataaattttaagctccataaaaacttaacagtatctccatagactgagaaaatagattatctaataaaaggattgattaatagaaatcattttcacaattagaatgtaggtagagattcttaaaaatttcatctggctttcttccaaaagagaaattaagttgttctgtcattgaattgtgatcaaagtgtcactggattcttatatctctattcctagtgaaccatatggattaacgaataacaaaaggtagcattttatcagtgatttgtggcatgttgtactatgtaaccattagactatcttgttgctttctcactaaagttagactaatttgctaaaatttagacttatggcctaaaattgatagtgtatatctttgtgattctagtgtaatctactcatatttcgtttaactaattagcaacctattgttgttgaacactaatgtcaacatattgagctttctacactgtttactttttcttttagggttcccagtgccgattccgacactgtgaagaggcccttggcagtgacactgtgtgctcattatggagagagaggaaatgtttagatccactttgcagatttagacacatggaaatgcaggtagaattacttggcgtcatcatttttgtcaaaaagtatttcccttcaataatgctgaattatactttttcaaaacaatatggaagaaatcattcttccttctactatttgattttaggcattttgcaattttttcaacttaatggaggaacatgttttagaaatacccattccatcttttgaatagcagggcttagaaacactgaaagctggaagacacacatgatcctaaatcagttaactataattgtttttgtgtccttgtgctgtattgtagcacattgtatttgttgtaaatatggcatctaatcattacatttcccccaatctccttttatctagcaaaactgcagcatttcatgcttctgggaaactcagcctcttggttgtgtgaagatcagctgtatcttttatcacagcaaacctcgaaatatcaatggattatttttgccaccaagtagcagtgagtacattttttgaataacatagacttaccatattctaatctggttttggactagcagcatagaatgacacatttaaaaagtatgacaaggtgagcaatgcaatttaatagccaatgggtaatttggaatgattctacatgagacaagagaaagcttagaatgaaccattaagtaactaacaagatgaaatgaacaaagagcaagttaaactttctctatgtgtatctaaaatggattttattcatatgaaaagtaagacagctactgacctcactaaatagaaggaggctgtgtctcagcaaagtatcgcacaactgaagccaagcttagaggtcataccttcactggtggtctctgtgaatgtgcggaaagctatctcgtaggtggagagagcaagggcaggatctgggttacacacttctgtttctagcagaacagctatgtgtgatggttctttctaacactttaattgtggaaaaaatgcaatgccattgctacaaaagccgtggcacaattcagtctaactaaatggtactgagactctaccatgtgatgtaccttaaagttggttctgggaagtggatacagaagacaccacagtgtaaaccagtgaatggtaagaaccttgctgaagaaggttgggctattaggtttccctgatgcttgtaactactctactttccttctatggccaccaagtttctctgatggaatggttttttgtttgtttgtttgtttgttttttgagacggagtctcgctctgtcacccaggctggagtgcagtggtgtgctctcagctcattgcagcctccacctcccgggttcaagcaattctcatgcctcagcctcctgagtagctgggactacaggcacgcaccgccacacccagctaatttttgtatttgcagaaaaatatacaaccatgctggttgggttaaattcatgatcacaaatctcaaatgagcccttactgctgactgccaataacactacatggtactcccccagttcattcctattctcccagactgctttttatacctccttccctctccttaaacctccattgccacctcctctttgatgatgactttatgtcttacgaactgagaaacttttaataagaagagaacttctgcatatttctgtcaccacatccacccacctagtagcattggtacttaacttcttccctgctcttaccatgaatcatccatactcctatctaagcctatccttccacttggtaactagacattgccttctcttgtctactctaagacattgagttaatgattcttccctctttttctacataaacattattcactcttactgaatcatttctatcagtatacaaacatgtatttatttatttatggaattctccattttgatctattctctcacaagctaccaccccatgtttttttcccgttgcaataattctcttcaaagtggttatttattattgctgtcaccaaatccttcccccattctttcttaatcccatgcaaatcaggcttattcactcctttcacctgtcacatacacattattaaatccagtggccaatttccagtccttatgtaacttgaaccacgagcaggatttgacacatttaatcaccccttccttcttgacataattttcctatctagcttgcaggacacattctcttcatttatctttcttttttttctttaacttttattttaggttctggggtacatgtgcaggattgttatataggtaaactgtgtgtcatggagatttggtggacagataatttcatcacctgggtaataagcatactatctgatagatattttttctgatcctctcccttctaccagcctccaccctcaaataggccacagtatctgttgtccctctctttgggttatcatttagctctcacttataagttagaacatgtggcatttggattttgttcctgcattagtttgctaaggatgatggcctccagctccatcaatgttcttgcaaaggacatgatgtcattcttgttttatggcgtgtagtaatccatggcatatatataccacattttccttattcgttctaccattgatgggcatttaggttaatttcatgtctttgctattgtgaatagtgctgtgatgaacatgcaggtacatgtgtctttatggtagaatgatttatattcctgtgtgtatatacccaataatagggttgctgggtcaaatggtaattctcttctaagttcttcaaataattgctacattgctttgcacagtggctggaccaatttacattcctaccagcagtatataagtgttcccttttctctgtaacctcatcagcatctgttattttttgactttttaataaatagccattcttattggtatgaggtggtatttcattatggttttgatttgtggttctgtgatgattagtgatgttgagcattttttcctatgctttggccacatttatgtcttcttttgaaaagcgttcacgtgcttttcccactttttaatgaagatgttagtttttgcttgttaagtcccttataaattctgggatattagaccctttgttgggatatatagtttgcaaatatttttttctcattcnnnnnnnnnnnnnnnnnnnnnnnnnnnnnnnnnnnnnnnnnnnnnnnnnnnnnnnnnnnnnnnnnnnnnnnnnnnnnnnnnnnnnnnnnnnnnnnnnnnnnnnnnnnnnnnnnnnnnnnnnnnnnnnnnnnnnnnnnnnnnnnnnnnnnnnnnnnnnnnnnnnnnnnnnnnnnnnnnnnnnnnnnnnnnnnnnnnnnnnnnnnnnnnnnnnnnnnnnnnnnnnnnnnnnnnnnnnnnnnnnnnnnnnnnnnnnnnnnnnnnnnnnnnnnnnnnnnnnnnnnnnnnnnnnnnnnnnnnnnnnnnnnnnnnnnnnnnnnnnnnnnnnnnnnnnnnnnnnnnnnnnnnnnnnnnnnnnnnnnnnnnnnnnnnnnnnnnnnnnnnnnnnnnnnnnnnnnnnnnnnnnnnnnnnnnnnnnnnnnnnnnnnnnnnnnnnnnnnnnnnnnnnnnnnnnnnnnnnnnnnnnnatctatcttggtgaatttttgtatgtggtataaggtaggggttcagtttccattttctacatatggcaagccagttattccagcatcatttattgaaaggggagtcctctccctgtttcttatttttgtcacctttgtcaaagattagatggttgcaggcatgaggcttttatttctagactttctattctattccattggtctatgtgtgtttttttgtgccagtatcatgctgttttggttaccgtagacctgtagtatagtttgaagttgggtaacatgatgcctccctttttgaactttttgctttaagattgccttggctctttaggctccttttgggttccacattaattttaaaatatatttttctaattctgtgaagaatgttattggtagtttgatagaaataacttcgaatctgtgaatttctttgggcatcattgccattttcatggtgttgattcttcctatccatgagcatggaatgtttttccatttgtttgcatcatctctgctttctttgggcagtgttttgtaattctcattgtaaagatctttcacctctctggttagctgtattcctagatatattattctttttgtggcagttattaatggaattgcattcctgatttgactcttggcttggatgttgttgttgtataggaatgctactgatatttgtatgttaattttgtatcctgaaactttgctgaaattgtttatcagatcaaagcacttttgggcagagattatgaggttttctagatatagaattatgtcatctgcaaacagggataatttgacttccttgattcctatttggatgtcttttctttctttctcttgcctgtttgctctggccaggacttttcaatactatggtgagtaggagtggtgacagagggtatacttgtcttcttccagttttcaagggggaatgcttccagtttttgcttattcagtctgatgtaggctgtgggttttacatagatgggtcttattattttgaagtacgtttcttcaattcctagcttattgagggtttttagcatgaagggatgttgaattttattaaaagccttttctgcatctattgaggtaatcatatctcaatatggtttttacttttagttctgtttatgtagtcagtcacatttattgatttgtatatgttgaaccaaccttgcatcccaaggatatggcatacttgatcatgatggattagctttttgatgtgctgctgaatttgatttgctagtattttgttgaggattttgacatctgtgttcactgagaatattggcctgaaatttttttttttttggttttctttctgccacattttggtatcagaatgatgctggcctcatagaatgagttagggaggagtccttcatcctcaattttttgaaatagtctcagtaggaatggcaccagctcttctttataaatctgatataactcggctatgaatctatctggccctgggttttttttggttggtaggctttttcttacttatacagttatagaactcagtattggtctcttcagggattcagtttcttccttgttcagtcttgggaggttgcatgtgtttaggaatatattcatttcttctaaattttctagtttgtacccatagaggtgtttatagtagtgtctgataggtttttgtatttctgtggggtcagtggtaatgtcccttttgtcttttttttttgaaacagagtctcactctgtcacccagactggaatgcagtggtgcgatcttggctcactgcaacctctggttccagggttcaagtgattctcctccttcagcctcccaagtagctgggataacaggcatgcaccaccatgcctgactaatttttgtatttttagtagagactgggtttcaccatgttggccaggctggtctcgaactcctggcctcaagtgatctgcctgccttggccctcccaaagtgctgggattataggcgtgagccactgaagctggcctccctttgtcatttctaattgtgtttacttggatcttctcttttttttttttgtctttattagtctaggtagcagtctatctttcttattaattttttcaaaaaatcaactcctgggtttgctggtcttttgtatggctttttgtgtctccatttccttcagttcagccctaattttggtaatttcttgtcttctgccagctttagggttggttttctcttacttctctagttcttctagttgtgatgttaagttgttaatttgagatctttctttctgatgtggtcatttagtgctataaacttccctcttaatactgagttagctgtatctcagagaatctggtatgttgtatctgttctcaaaagtttcaaagaatttcttgatttctgccataatttcattgtttacccaaaagtcattcaggagcaggttgtttaatttccatgtaattgtatggtagtgagtgattttcttagtattgattcctatatttattgtgctgtggcctgagggcatggttggtatgatgtattttttttttttaatttgctgagtattgttttatgtccaaatgtatggtcagttttggaggatgtgtcatgtgatgatgagaagaatgtatattctgttgttttggggtggagagttctgtagatgtttattaaatccatttggtcaagttttgagtttaggtccttaatatctttgcttttctgcattgacaatctgtgtaatgctgtcagtggagtgttgaagtctcccactattatggtatgggaatctaagtctttttgtaggtctctaagaacttgctttatggatctgggtgctcctgtgttggatgtgtatatatttaggatagtaaggtcttcttgttgaattgaaccctttaccattgtataatgtgtttatgttttttaatcttgttggtttaagtctttttggcctgaaattaggattgcaacccctgatattttttgttttccatttgcttggtagatttttcacaatttctttattttgagcctatgggtatcattgtataatatgtgcaatgggtgtcttgaagacagcatgttagtgggtcttgcttctttatcgagcttgcaactctgtgccttttaattggtgcatttagctcctttacattcaaggttacattgatatgtgtggatttgatcctgtcatcatgttgttagctggtttgtgtgcacacttgtttgtgtggttactttatagtgtcactggtctgcattcttaagtgtgtttttgtagtgactggtaactgtctttcctttccgtatttagtgtatctttcaggacctcttgtaaggcatgtctggtggtaaaaaattccctcagcacttgcttgtctgaaaaggatcttatttatccttcacttatgcagtttagtttgcctggatgtgatattcttggttggaatttttttttctctaagaatgctgaatgtaggcttccaatcttttctggcttgtagggtttcttctgaaaggttcactgttagcctgatggacttcgctttgtaggtaacctacccttctctccagctgtctttaacattttttttcttttgtttcaaacttggtttctttgtttttcttctaccttcctagtgctttgttatcactctccctggattgttcttcctcttttccccaatctcttacatgtgcagagttagttnnnnnnnnnnnnnnnnnnnnnnnnnnnnnnnnnnnnnnnnnnnnnnnnnnnnnnnnnnnnnnnnnnnnnnnnnnnnnnnnnnnnnnnnnnnnnttatgattttgaatatgatccacatgtcagtgactcccaaatgtaacaagagactctatttgatctagtgccctgttagctctctgaagttttctaccacactatattagtctgcttttacacttcttttgcactgctgataaagagataccccaagactgggcaatttacaaaagacatacccaagactgggcaatttacaagaaggaagtttaatggacttatagttccacatgtctggggaggcctccaaatcattgaggaaggctaggaggagaaagtcacgtcttacatggatggcagcagcaaagaaagagagtttgtgcagggaaagtcccctttttgaaatcgtcagatctcatgagacttactcactatcacgagaacagcatgggaaatacctgccccatgattcaattacctcccatcgaattcctcccacaacatatgggaattgtgggagttacaattcaagatgagatttgggtggggaaagagccaaaccatatcattccatccctggcccctcccaaatctcatgtcctcacatttaaaaccaatcatgctttcccaacattccccaaaagtcttaactcattttaacattaacttaaaagtccacagtccaaagtctcatctgagacaaggcaagtcccttctgcctgtgatcctgtaaaatcaaaaacaagttagttacttcctacatacaatggggttacaggcattgggtaggtacagccattcgaaatgggagaaactgggcaaaacaaaggggctacaggccctatgcaagtccaaaatccagcagggcagacaaatcttaaagctcaaaatgatctcctttgactccaggtctcacatccaggtcccactgaggcaaaaggtggggtcccatggtcttgggttgctctgcccctgtggctttgcagggtagagcccctgctcctggctgctttcactggctggtgttaagtgtctgtggcttttccaggcacacggtgcaagctgtcagtgaatctacccattctggggtctagaggacagtggccctcttctcacagctccactaagcagtgctccagtagggactttgtgtagcagctctggccccacatttcccttccacactgccctagcagaggttcttcatgagggccctgcccctgcaacaaacttttgcctgggcatccaggcatttccacacgccctctgaaatctaggcagaggttcccaaaccccaattcttaaattctgtgctcttgcagtctcaacaccacatggaagctgtcaaggcttggggtctgcaccctctgaaaccacggcctgagctgtatcttggcccctttcagccgtgattggagtgactgggacacagggcaccaagtccataggctgcacacagcatggggaccctgggcctagcccatgaaaccattttgtcctcctaggtctctgggcctgtgataggaggggctgccaagaaggtccctgacatacattggagacattttccccattatcttggggattaacattcggcttattgttaattatgaaaatttctgcagccagcttgaatttcccctcagaaaataggattttcttttgtatcttattgtcaggctgcaaattttccaaacttttatgctgttttctttttagaactgaatgcctttagcagcacccaagtcacctcttgaatgctttgctgcttagaaatttcttctgccagataccttaaattatctctcttaaattcaaagttccacaaatctctagggaaggggcaaagtgctgccagtctctttgctaaaacttaataagagtcacctttgctccagttcccaacaagttcctcatctctaactgagaatacctcagcctggatttcattgtccatatcattatcagcattttggtcaaagccattcaacaagtatctaggaggttccaaactttcccacatttttctgtgttattctgagcccttcaaactgttccaacctctgcctgttacccagttccaaagttgcttccacatttttgggtatctttccagcagtgctccactctactggcaccagtttactgtattagtctgtttttattctgcagataaagacatgctgcagataaagacatacttgagactgagcaatttacaaaagaaagagatttaatggacttacagttccacatggctggggaggcctcacaatcatggtggaaggcaaggaggagcaagtcacatcttacatgtatggcagcaggcaaagagagagagcttgtgtagggaaactcttgtttttaaaactgtcaggtctcatgagacttattcactatcatgagaacggcacagaaaagacccgcccccatgattcaattacctctcaccaggttccttccatgatatgtgggaatttgggaagttacaattcaagatgagatttgggtagggacatagtcaaactatatcacacacccgtatgcttgcttgctctactcaaatcatactgtatacttgcttttcctagtgcatattagcatgttcctgctttaggggctttgtgcaaaacactcttccctcaatatcttcatggctaattccatcatttcttcacagccttgctaaaatatgttttacataacactattctgaacactgtatttgaaatgtagtcagccttcccaagcatgccttacacacttccaaacttccttgccttgttctactttcttattgccatactccctatgatttctcagatacaatataatttactggtttaatatgtctatttgttgtgtgactcctccctatagaatgaaagtaccataagagcaagaatctttattttgttcactgatgaatctcaagcacctaacatagccacatagtactggctctcacatagtggccagttctactccgggaatccatgaacagcatttatttatgttaaatctgttaactattttcccgctgcttgacacatttctgtactctaggaaaaaggattcaatttccagactgtagataaactaacaagctcagctgaaatatgtattgaactactgcattgcttctttatttggaaatatttcaatacctcagaagtaataatttgattcctggcagacctaatatttcctatgatatttccaggaacttctatctaccaatgcccataataaccaaaactggggccataaatcttttcaccttagacaaagattaaattataaagtaatacctttgtgaatatctacctttatgagtgtcggtaaatgcatatgattaattgataaatttagggtgaggttattacaaaccatttcatagcaaactgtaactggctaagtataggttcatacagagcattgtacaaatgtgtgtaattttgtctcaggttaaaataagataaaatttagatatttaaatgtgcaacctgtgaaactttagggcttctgcttgatgaattgagacctgtcacatagtccatattaagtagatgagttggagccacagcagtgctatctaaatcaccggctgtgttcttccagtatgaggcacttgccaaaggcaatttcctattagatgatttgccattgtatgttgttatctttaagcactaagtgcaattatcaggagtcctacatttttttgtctaggggtataaaactgccagttactctctttgcaatttaaacttcaacctgctagtgaattttaaaaggttttggactcttttaaaatatattttatttacatgtttataaaccatggaattttaaaagacataatctctctggttatcatttctaagtttaaaagcaaatagctgctaaaccaattgagaatgctaagaaaacataattctgttaatatttaccataaaaattccctagacattttctgagtacagttcgtacttttttgcaagcctggtaggcacttattctttctcctatggtatgcactagaagttagtgtaatctcttagacaaacttgttttaaaaaagttcttatattttgctgaagaaaaatttgttccaaacacagtagctagcttgaacatggaaattgctcatctttccttggctagttgccactttattctgtaatgaacaattgaataggatcatttgatttttatttattctaggtcagtgtccagtgacgccttggacaactgatttggccactttaaattaaactttggtcagctttctttagaatgtctagcctctgtgtttattatctgccttttagttaaagttttgaaaagccacttgctaataaattgtttttaaataatttaataaacactttgacttgaatatttcagtcagtacacacacactaatttttgtgcgtgtgtgttttagaaaagaagacaattcataatggttataaggataaaagttcttcagcttagttctttcctctctggggaaggaagagaggggataagaaaatgccatagcacatcaaatggtagcccccgagataatttgtgttggatggcagattctttatcctgactacatactgcttctgttctcatccaaggtccaaagagcatcaaaacatgcaaaaaaataaaggcaggaactcaaatattacttcttcaggcttaacatttgttagtcatgtttaagaactccacatcttgctttttaggacttataaacttgcagtttaattatggcttttaaaaatgaagtggagttataagagattagaaaatcacatacccagtgttttagaataatctgttaagtgtattacgtgtggcagcgctatgctggataattttcgtgcctgattttatttaatcatcataaaaactggccgaatagatacagttaatctcccgattttacagatgaagacaatgaggtccacagaggccagatatcttaggcaagataatacctctcaataagtggcagtttctgaattcaaacatagtgctgtctgactctagaagtatctcagccaggcgcggtggctcacgcctgcaatcccagcactttgggaggccgaggcgggcggatcatgaggtcaggagatcgagaccatcctggctcatacggtgaaacccgtctctactaaaaatacaaaaattagccggacgtagtggcagatgcctgtagtcccagctactcaggaggctgaggcaggagaatggcatgaacctgggaggcagagcttgcagtgagccgaaatcgcgccactgcactccagcctgggcaacagagcgagactctgtctctaaaaaataaataaataataaataaaaattaaaaaaagtatctcacaaaaatcagacgtaacatttaaagtatactccaatgctttttgtcatttgaatgacccatgcatcagacctcctgatctgtcttctgccttctgaggggctaattctattccactctaccccatagacttcttttcaaagctattaaagttttttatattttatagaagactgcctttcccctttaatttacagtattagagtgagatattctagcacttctgagttatgtgtacttccattgaataaggcttcttttctctttctcaatttatatttccctgtcttttctgaaacttgttctcttatatcacgtgaagctcagaagcccggatacccaatctgaagtttgtctcacccacaggctctcagttctggctccacgttagaattacctggggagcttaaaacaacaaccaccaaaaaccaaacagttctcagccaccacctaaaccaccaattaaactgatgcttcattatacttttgttttccccccaactttttaagacattttgtaacttacagaaaatttgcaagaatagttcagtgaacaccagctgtccatgtattcttcacctatcttcaccaattaacattttgtcacatttactttctcttttttctttactgtatttacatatctgcatataaggtataaatatacatttctttatttttgtttttttggaaccatttgggagttagttgcaaatatcctcacacttcattgctaaatacttcagcatgtaccttctaagttcaagagcattctcctatataactgcacatgactatcatatgtagggaatttaacatgatagaatcaacaatgtgtaatattcagtctgtatcaaattttcctaattgtccaataatacttgtaatagcaatgcttcctcaaaatttagtacgtataggaatcacctgacaatcttgtttaaactgctgtctgattcagtatatctgggctggagcctgaggttctgaatttctaataagctcataggttcttgggaccaagtgttgggtagagcagccttaaaattgttagttttattttttttcccccatccaatttacaattaagcatcattcattgcaattggttgtcatgtctctttatttaatctctttttaaaaatctgatgtctctttaaaaaaaatcccaggatttttttttcttccttgtcatatacatgtgtattttttggagacaggatcttgctctgttgcccaggccagagtgcagtggtgtgaacacagctcactgcttccttttcctcctgggcccaagtgatcctctcacctcagcctcctgagtagctgggaccacaggctcatgacgccatgcccgactaattttgtaatttttggtagagatggtatctcaccatattatgtaggccggtctcaactcctggattcaagcaattcactcaccttggcctcccaaagtgctaggattacaggcatgaaccactgcacccttccccatgtcatatacattttaaaagagttcaggttagttgctttgtaggatatcttttaaattggggatttgttcatttatttcctcctaattacttttagattaaacttttgttttgcaaaaatagtacaaagaagatcagtcagttattttaaaatttacacaagtgttgtatagatttgccctaatgccctaaccaaactattccatggaggtgctcttaaagaattagtgaaaagggaagaaaaataatttgcgaagaacctctgctctgtgaattttacaaaaattagcatttcttgtactctttgaaggacaagagaagaacagtgcccaattcctgtgagtctaaatgaaaacaatttgtttagttataaataattcgtttatacaaaaggctcttttaacctatgtgttttgtactgcatgtgtgttctagctatggaggtatttatgggagtaggaaatactgcattatgattgcatttatgacatctgtttaaaaaaaactgaatttgttttgaaaattgacaaagcatagaaagtagatgttcatgtatgaaatgccctggcatgatgcgatatagtagtctctcataagtactcccttgtagagactccgactcccttggtcataaagagtggagtagtgctaaatgttttaactggctcctttcccccaccttgttcccctaccccaaaaaacaaatgggaaaaaatgcaaaacaaaacagctctgttggttcacatttgtcatttgctgtgaagcaaatattttctctacggccaatttcaaactataaatgtgacgtcagtattcttgcaaaattcctgaaaatttgccaattctacgtgcttatctgagcccactccagtatattaccggttttaaggagagaaacccaactcaatttgatttaagggaaaactggaattcttggcttatataattaaagagattagggacagaactgacctcagacccagctggatccgtgtttccttcaccaacccttagttctgagctaggtgtccttctctatgtactacagttactccagaagctccagaactagattttggaagcagaataggcaaatattaagaatagtagctctagctcagattagtttgaaatatcaacctaccacatatttgccactgtaaacatgggcaacttaatgtctctctggcccaatttcttcatctgtatggtagagatagtaatagtacctgcattgggttttagacatttaacagattaatactcaattgtttagaattcttggcaaagagtgagtaatcagtgttatcattatcaattgtttagaattcttggcaaagagtgagtaatcagtgttatcattatcatcatcattctaaattaatctcagaagaagtaagtccttctgcaactaaagcccaattattgaatgtcatctaatggtgtagaaaatgtgctcatccctaatagttgttcaagctaggggatgagctaatctttgggtcccaggggtcatcctcactcacactaagttgattgaaaatgggaaaaaggttattcccttaaaaaaaactctgatacactttacctaagagaaataaaatgattacaggacaagcaaaaataataggtaatcactacataatatataaaaaatatgtctttcagaagaatcatatgaaatatatgtgatcaccccaaagttgatcatagtgacatgaagttatgcttttggtagaaaaatcaaggtgacaaaaattatctatgtgtaaattcatgtaaagtacattatagtagtttcttaaaatgcaaagaccattagtatttgtgatctcataggaaagttgctcaaatcaatgaagatataataatacatgtcaaattcagcacccttttgtttcaaccattgtagagaggtaaacttaaccagtgtctgaagttttactgcattacttggttgtcaagtaatgcacttgaattatttatttcatatttctaattgggtagtttctgttaactatatgtgctctttcccatcctatctctttctccttctgatatgtatttaaacacattaaatagaaaggtgtgatgagcagtggtctttatttttgatgaaatatccactacaacatttttgattaaattttttcattataagtttagttgaaatggtgtaactttcaacattttatcaatattggctttaaaagtaaaaattttctcattataaatgtatctaatgacatcttgccgtaatgattccatttataatcttataaatggaataatcttataatcttattataagattataataattttaatcttataatcttattataagattataataattttaatcttataatcttattataagattataataattttaatcttataatctatttaaaaaatacaagaataataatctcaattacaactaaacaggttctaagacttacatggaagtgcaaagagccagaaatagtcaagagatgcttgaagaagagcaaaataatagaacttgttcaaccagatttcaaggcctatgaagtgatagagattaggacagtctagcactggccacaggataaacaaattggtgagtgggacagagtagatggaaacagacctttccatagatggacacttgatttgttaggtgaacatgataaccactacattatggaaacggattggacacttgatttgtagtaggtagcatggatgagtaatgggtggtcttttcagttaatgagggaaaaatggacttctctctcacacaatagatacaaatcaatttgagtcaattattgatcaaaatgtaaaaggccaatatttgaatacttcaaaagataataaggtcacaaaatattgaccatttcagagaatatgaataaatttggctgcactgaaattaaaatttgtatttatcaaaaacaccataaaaaagtaaaaagataaaccaccaaataagataatatttgcagcatgtgtgcttatgtgactccaaggaaagacctgaagtcaatacttgaatacaaatcaacaagaaaggccagagaacctaatggaataggtttttctgttttaccactattgagattttggactggatagttctttgttgttggaacctatcttatgtattgtagattgtttagcagcatctttagcttctacctactagattctaatagaaatctcctcgttgtaacaaccaaaaatatatccagacattgtcaaatatttcctagtacgtagggagtaaaattgtctctgcttgagaactgctatcatagaacaataaacagaaagcttataaacaggcatttgaaaaggaagaaattaaaatgtaaacaaacaagatgatcagtcttattaatagttagggaaatccaaacagaaagcactttgagatataatatacccatattattggcaaatatcaaaaattctatcaattcttggtgaagacaaagaacattaggaattattgtgcactgtagaaggatatataaacggatacgagtactttggaaaacagcctaacattatcttgtccagttaaaattatgcataacttaggaccaagcaattccacttttgaagcatatatcctagagaaatccattactgtgtacatctggatacatgtattaaatacaagaatgcacgtaacagcagtttgtaatggccaaaggctagaaaccgtcaaatgtgcaacaacagtggaatgcataaataaagtgtggtacattcattcaatactagacagtgatgaaaataggagaaacaggtgagtaaggatgtatttaacagataaaattaaatgaaagaaggcaagaaagaatagatatggcttaactctatttataaaatgttcaaacataagcaaaattaaactttatgtttagggatgcatacttggtagtgagatcataaggacaaacaaaaagtgattacaataggttaggatgaagatacctattgtgggtatggggaaggaaaattgtgtgaatgaagaggatgtttaggaggctattattacatgacttaggtgttggctttgtgatacttgttacaatatatattttatagtttctgtacttttctgtgtatgtgttatatttcacagttttaaataggtaaaaaatgcttaagcaaacaattctttatttaagaattatataaataattctttatattaagaaacaattctttatttccttctgttaaaactattgccacttaggactattcacaatagcaaagacatgggaatcaagctacatgcccaacaatgatagactggataaagaaaatgtggtattaatacatatacaccatagaataccatgcagccataaaaaagaatgagatcatattctttgcagggacacggatggagttggaggccatcatccttagcaaactaatgcagtaacagaaaaacaaatactgcatgttctgacttacaaatgggagctaaatgatgagaaaaatggacacatagaggagaacaacacacactggggtctaccagagggtagagggttggaggagggagaggatcaggaaaaataactaatgagtactaggcttaatacctgggtgatgaaataatttgtacaacaaacccccatggtacaagtttacctatataacaaacctgcacgtgtacccctgaactgaaaagaaaagataaaaaaaaaagctattgctgtttaactttcttcacatatctttaccctaacctaatatttttatgcttgagtttattgatcacctattaaaattaatataacaaaaatatatataaatttaaattttcatttttttaaacgatgataaagttccacttttaaagccatatggtctttaacatgcctttaggattgaattattattacaattatcactggcatttaatttattaaaacaacaattacattacaaatattgataattattgcatatcaaagtacaattatataagaaaattacctcttcattaggtgaattaatgatcaaaattattcttatctgtttataaaacaaaaaaaggtatatattgctgccatggcttgtttgtatttctccaaaatccatgttgaatatgaataggattaaggccttcataaaagaggcttcacacagggcttggccctttttgcccttttgcccttctgccttcttctgtgtgaggacacagcatttatcccctccagagggcacagtaacgaggcaccatcttggaagcagggagtcctcaatagagaccaagcctgccagtgccttgaccttagacttctcaacctccagtactgtgataaataaatttctgttgtttataaattacccagatattttgttacagcagcacaaatggactaagacacttgctaaaaactaatattcagaacgagcaggttgttctaatatttgctaagtcagttacaatatagtaaacattttataaacttaaataagatgaggactcacttcaattagaagatttcacaatattataaaagagatcttaactatctcaattggaagattttatttgaaaattgtatctatgggtttttttctaagatattgtgaacaatttggcaaacttgtaaataattctacttgcatttaaaaaattgtgatgactagattactttcagaatgatgttgcgaagaattccatgaacctgttccctagtgaaataacaattgatttcaatggttgatgaaaattatatgttaaaaatgtttccaagtgttaagaaattgtcctaagggcatacagcaaatgaaatcgtattaattcaataaaatatactaaagccagtaaaaatggcaagtcagttgtattggaaccaccacccactcctttcaccacctctctgtttagtgtgacagaagctctactctgaatggatacagccaagaacacagagctctttctacgtccagcttccagtcaagaactatagtacctttctggggggagaaagctgctaacatttctcatcctctccaattcccaactccatgttgctagagctctatttttcaggcctgaatcttgttttcatccagccccaagcataaagcaaaagttctatcccacgtgcagcaggctaggaataacaggacctcaattacctttgcctcagttggagcatggatagaggtcccatgccaggaggcacaagttgtaaacaccagaaattaccacccctgctttgtgccccaattttaaaacagggcgtcactccaaaagaattaagtgactgtccttgctcttagcattagcactgagattttgtgcaggcagagagtagaaaactctgaagctctcggaaagagaactgaatttatttggaatagaacatagtgtggggaagtttaagattagggacgctctgaaaacaatggtgattggggataagcaattaagaggaggctagtagctccatgagagcagcaaactaaactgtaaaccagctagaagtttaccaaagacaacccggtaaagacacagttaaaaagagttcttttgggccaggcgcggtggctcacgcctgtaatcccagcactttgggaggccgatgtgggcggatcacgaggtcaggagatcgagaccatcccagctaacacggtgaaaccctgtctctactaaaaatacaaaaaattagcggggcgtggtggcgggcgcctgtagtcccaactactagggaggctgaggcaggagaatggcgtgaacccgggaggcggagcttgcagtgagccgagattgcgccactgcactccagcctgggcgactgagcaagactccgtctcaaaaaaaaaaaaaaaaaaaaaaccaaaaaaacaaaaaaacatagtcctttgtcaatctttagtctactacttctgatctattaacagctcctggccttccatttctagttatcccagaaggggatactggaacaccttgcaggtaactactgggcaggcaatttcgcctggtgtttaaaaacatggattctcgcttgaaccggggaggcggagcttgcagtgagccaagatagcgccactgcactccagcctgggcgacagagcgagactccgtctccaaaaaataaataaataaataaaataaataacataaaataaaaagagttcttttgggattggaacaaacttgaaagattgggctcaaagcttagctctgcaaaggagtcaatttacttgggttaaactgtggagcaatttatgccctagtgcattgatgaaaacaatggggcattacaccagcaatgaatggaagctaacatctcagtgtgataccaacagaggtggacagcttaacagagaaaccagggaatggagcaaaatgagccctgctaaagtccgtgttatccctgttaactgtggacatgccaaggctacatcctctgaggaatgacaacagaggctgcatattgtgggagaaaataaattttactaaaatattccaacaaagtcactcaaaaattaaaaagcaaacaacaagcttcaggtttaggatgagaagtcaatattcagagttgctacaatgtattatcacacatgttgagctttcaataaaaattataagacatgcaaagaaacagaaaattataatccacatacagaaataaaggaggcaacagaatgcttatgagaggattgtgatgttcaactatgcattgattttttttttaacttttattttgacttcaggggtacaggtttgtttgtgcaagttggttctaaagataaattgcatgtcctggggtttgatgtacatattatttcgtcacccaggttataagcatagtacctgataggtagtttttcaatcctcaccctcctctcaccctccaccctcaagttggacccagtgtctgttcttcccttgtttgtgtccatgtgtactcaatgttcagctcccacttgtaagtgagaaggtgcagtgttttgttttctattactgtgtcagttcgcttaggataatggcctccagctccgttcatgttgctgcaaaggacattatctcattctcttttatggctatgtagtatttcatggtgtatatgtgccacattttctttatccagtctaccattgttgggcatttaggttgactccatgttctttgctattgtgaatagtgctgtgatgaacatacacatgcatgtgtcttcatggtagactgtatatacccaataatgggattgctgggtcaaatggtatttctgttttaagttctttgagaaattgccaaactgctctccacaatggctgaactaattttacattcccactagcagtgtataagcattcctttttttctgcagccttgccagcatctgctatttttttagctttttaataatagccattctgattagtgtgagatagtatctcattgtggttttgagttgcatttctctaatgattagtgactatgagcattttttcatatgcttgttggctgcgtatatgtcttcttttgaaaagtgttcatgagcagacaatgatttaaagcagtaattataatatgtccaaagacctaaactcctgcataaagaagtaaagaacggtattatgacaacatctcaacaatagagactatcaatgggtaaaaactacgaaaaaaccctaacaaattgaaattttggagttgaacacacaatatctgaaatgggaaaaaaatactataagggatcaagggtagatttgagaactgcaaaagaaagaaccagtagatttgaagataaatcaacggagattatacaatctgaaaaatcaagagaaaaataaatgaaaaaaaagatgaacaaagcctaagagaaatatgaggcattttaccaaaatgtaaggaaagaaaaaataatggctgaaattccccagatttaattaaaaaattaatctgcatatacaagaagctcaacaaactctaagttggatatacacaaatatacctgcagccagacacatcatatgaaaaaagataaataccagtgataaaggcaaattctggagaacaacaagataaaaatgttttattgcatataatagaaccccagtatgattaacagctaccttcccgtcagaaacaatacaggcagtaatcactgtagactgaaagaaaaaaaattgtggcaatcgagaatctttgtccagaaaactagttttaaatgctgtatttcaaaaataaaaaggcaaacaaagacattcaaagaaaacaaaaactgagagaatttgttgccagtttgtctaccttaaaagaaatactaaaggaaaactttcaggtggaaagcaagtgaccctgagtcagtatttcaaatccatatgaagaaacaaagtatgctgataaaggtagttgtgtaagtataaaactatcataagggcatatttcttttccttctataatctgattttaaaattttataaaacaatacatacaattttttttagtctgttacatttagaaatgtaatatatttaataatagccacacaaaagaggcagatggaagcaaaactgtatgatgacaaagaaatgacaccagatagtaacacaaatccataggaacaaatgatgagaattagaaattataaataaaaaggttaatagtctctgtttatagaacaaactataaatacctacttgatctttttcccctcttagctcctttaagaaacatacaattatcttaagtaataattataacaatgtattactgggtttgtcatgtatagaaatgtaatatatgttacaatagtagcacagaaaggaggaagagggcatagagctatataggagtaacctcttatatctatctcactgatgttaaattagtataaaagtgaaatagattctgatgttaagaagcatatagtaagccatagagcaacctaagaaaatattataaaaatgaagaattaaaggaatttaatattatactagaaaatattcatcagtgtaaaagaaagagaaacagcagaacatgaaacatatagaaaacaaagtaaaatagtgtacctaaatccaactatatcaataattatattaaatgtgaatgggtaaaaaattcaatcaaaaggcagagattgtgaaaataaaattaaagataaaactatatgctgtctacagaaaacactttttaaattcaatagcccaaacaagctgaaaataaaagaatggaaaatatataccatgcaaacaattataaacaagaaaataaaagactcgaacaactgtaaagcaactagacctaacagacatcagcaaaacactccatttaacaattgtaaaatacacatttttctctagtgcacaagaaacattttccagtatagatcacattctaggtgataaggtaagcctgaataaatttaaaatgattgaaattgtgctgtgtatgtcttctgaatataatggttttaaaagttgagagaaaaaaattgagacatttacaaatatatggaaattaaatagcacacatgtaaataaccaagaaatcacaagaaaattacaagggtaatcagccaatactttgtgtttagtaaaagtaaaacatagcataccaaaactcatgacatgaagtaaagcagtgcttagaagaatataagttgtaaatgcctatatattttttaaaaatctcgaatagataacctagacttacaccttaagacactggaaaaagaaaagcacattaaacctaaagcaaacagaatgaagcacataataaaaattaaagcaggaattaatgaactagagaatatgaataaagaaaaccaatagagaaaatcagggcaaatcaaaagttggttatttgataaaatcaggaaaattaaaaatctttaacttgactgaccaagaaaaaaagagataggttgaaattactaaaatcagaaataaaaaatgagacatcactcccaatattatgaaaataaaaagaattaaaagggaataatgtggacaactatatttcaacaaattagataacttatataaaatagacaaatttctagaaagacacaaactaccatcactgactctagaaaaaaagaaaaaaattgaatacatctataggaataaagagattgattgggtatttgaaaacattgccacaattaaaatctgggctcagatggctccaatactgaattgtaaccaacatttaaagaaaaattagtactaatttgtcataaattcttccaaaaaaaaaaaaagatgatgcaacactttccaactcatgtctatgagatgttctaagacatcagacgaaaactgcagaccaaacttttcctatgaatatagacactgaaaaatactcaacaaaattcgattacactaaatctgacagctttaaaatgggattatattccataactaagtgagattaactcagaaacaaggttggtttaacttcccaaaatcaatttctgtaataataataataataataatatacccacaataatataataaagagcaaaagacacatgatcatcttaacagatgaataaaaaacagttgataaaaatttgacacacatacgttataaaaaatattccacaagctagaaacagaagaaaacttcttcaacctgataaagaatatatatgaaaaatccacagctgatagcatacttgatgaaatactgaaagctttacccctaagattgggaagaagacaaggttgttcattcttgtcatttgcagtcaagacagggaaattgttgcaacatcatcagctaaaaggcttctgtattggaaagaaagagcaacattatctctatttgcatatggcatgatcttttatttagaaaattctagaaatctaaaaattattagaaataaatttagcaacattgcaggatacaatattaatatacagtaatggattgtgtttctttacagtagcagtgaacaaactgaaagtgaaatgagaaaaatcccacttacaatagcatcaaagaggaaaaaatatttaggaattaatttaacataagatgtgcaaagtttatattcgaaaactacaaaagattgttgaaagaaattaaagaaaaccttgaaaaacagagatatccttgttcatagactgactttgtggttggtatgccagtattctccaaattgatccacaggtttaatgtagaatttatcaaaatcccaatggacctatttgcagaaattgagaagctgattctaaaatttatatggaaatttaagggacccagaatagtgaaaaaaaatcaggaaaatggaaaccaaatttggaggacttacacttcctgatttcaaaatctacaagttactacaaaactgaagtaatcaagactatatggactagcataaaaattgatctatatgtcattgagacaggattgtaagaccagaaataaacttttatatcaatcagtttatgctcaattgattttcaacaagggcatatagatcattcaatggggaaaagaatagtattttcgacaaatggtgctaagacaactagatagtcacatgcaaagtaattaagtagcacaactgcatcacatcataaacaaaaattaactcaaaatggatcaaagaacaatattccattttggaacattggatcactttaaaaaggaaatccacacccattaacggttacctctcatttctttccaatgaaacattggatcactccaaaaaacaaactcacattcattaacagttactcctcatttttttccaattcccaaaacctacacagtcactactttacttcttgtttctataaatatatctatttttgatattttgtataaatggaatcatataatatattattttttgtgaatgactttttcctcttagcatgttttcaaaattcatccatgctctcacatgcaacagtactttattactttttatagccagatagcactccattctatggatatgccacattttatttatccatttatcagacaatggaaatttaggttgtttccactttttgactattataaataatgttgatataaacatttgtgtacaaatgattacatttgtataatatagacatatattttcacacctcttggtatgtagctaaaaatggaatagatgggacatgtgatgactccatatttaaccttttgaggaactgcctaattgttttctaaagtagctgcagcatttttcattcccaactgcagtgtacaaagattctagtttcttcacatccttgacaacacttgttattgtctttttagtaaagaaattaatcattgtaatcgttgtagtatgaagtgatatctcatttggttttgtttgtttttgtttttgttttgaaacagagtcttgctctgttgctgaggctagagtgcagtggcatgatctcggctaaatgcagccttaacctctcaggcttaagtgatgcttccacctcagcctcctgagtagctgggactacaggtgtgcgccatcacacttggctaatttttgtatttttttgtggagatagggtttagccatgttgcccaggctggatcttatttattctttctgtgtcaccttggggttctgagtgtttcttcattatctggctgagagggctgggaactgctttccagcaaaatctgggacttgttggcaggtgttatcatggctcacccccatgtgccagggggctggctacttttcattgactgctttttcttttggtgtcatatctaaaaaacttttcatgacctaagggttcttctatgagttttatagtgtcagatctttcattttgttcttacatccactttgcatgaatttttgtttctaatgtgatgaagttgtgcaacttaattactttgcatgtggcaatctagtcgtcccggcaacatttgttgaaaatactattttttcccccattgaatggtctatgtaccctttttgaaaatcagctgagcataaattgattcatataaagatttagttctggtcttgcagtcctattccaatgatacatcgatctacttttatttttatgctagtccagatagtcttgattactttagttttgtagtaatgtccatataaattttagaatcagcttctcaatttttgcaaataagtccattgggattttgataagagttgtatcatacctatagattaattcggaaaatattgccataccaaatacaaatcagtccataaacaaggatatctttccatttcaacatttctttaacttctttcaacaatatttttattttattgaaataagataaaaatctttttcaatatatatattttcagaatctttttcagaatataaattttgcacatcttatgttaaaattaattcctaaatacttttttctctttgatgctattgtaagtgggattatttttcatttcattttcagtttaatcattgctagtgtgtagaaacacaatccattaatgtattattattgtacacattttaaaataatatatagttaattaggagggcaatgattgattgttacatctacttatcatcacatatatcttgaacagactgaaatgttgcattttctctgcagatatcacactacagaaagaaattcaggaaggaattccactccagtcccagagtcaagaacctctgaaacctcaggaaaatatatcacgacccatccaccatcctttagttttaaaaactaattttgaggaagaagaggaagtagatgaacaaaatggttagtagaacttttttcaggtttacaatacacattcaaaaacctcacattttctacatatgtgtttaactgtaaaggtttatgatgtaatatataaggcagattttgctgagaaaataactataattgtattaaactaatttaattcattatgttctaatttgctacatatttatgatcttttggattggaaagtttttgttgtacgatagctgggagacagatctgatgcttaagtatatttaggtgcttcatatacaccatggaatactatgcagtcataaaaaggatgagttcatgtcctttgcagggacatggatgaagctggaaaccatcattctcagcaaactaacacaagaatggaaaaccaaacaccacatgttctcactcataggtgggagttgaacaatgagaacacatggacacagggaggggaatgtcacacactagggcctgttgtggggtggagggccaggggagggataacatcaggagtgatacctaatgtagatgacgggttgatgggtgcagcaaaccaccatggcatgtgtttacctatgtaacaaacctgcacgttctgtacatgtatcccagaacttaaagtaaaatgtatatctatataaatgtatatatatagatatttatatatctacagatgcttatagagatactaataagctatgttttttatatatgtttctaaaacattgatgcacaagtgtatctgtttatctacatatgtattaataatatatcagtttcacatttaatcctggaagttatagagatctatgtagtagttaataatctataaatcactgtcatctgcattattctaagtcatcctcacaagagtatgaacaggcttaggacccatgtcttttgcattttagttcatcctttgcctcccatatcaacccagcacagtggtgccagaaagtgtgtatatacaagataaacatgaagaaaaactctcgatctgtctttgtgctggaatatgtccttctatggactacgggacaccatagtttctgtgcttaggagtacactgagctatttattactatttctgtgtgctgcagctccatgtctctcatgcctacatcaacctcgaaataaacatacaccatctcaacattgagtctgtacattcagcgtctcatttcaaagtacataatacatagccctttgttttctcttgacattgttttgaatacttaaaatgtagcaatttgaaacatgtactagtatgtaaaattattgattttagaaatataaaaaagtaatctatccatgagaacagtatttggggttttcctttctggtttataaattttcagattaattggctttgggacaatttaatttaaaaaatctatatcctatagatgcttctagtttatggacaaagacccctgaagaaattgaagaaaaaagagcaataaaggagatgtgttataaatctggtaagaaatcaaacatttttgtattttctaatacttgatgtgataaatatactaaccattacttttcttatggttgattaggggaatactacagatttcatactcctccagatattttgtcatcaaaaagcatgacacctacagcagaaaaacagttagaaaagcctttggaaaatggcagtgaattgcaagaaggtaagaaatgaaaaggcagcattcatagtgatctataacatatacttggtgtgatagactgaattatttagtatgatgtacagaagaataaagtgataaataatacatcgtaattgagcactagaagaaagtgtttgtattggatgacccaaagctgctattaatgggattatgttatcctagagaggtgacagaatgaatagacttcattaacacgtaatgacactacacactccatggggtaatgctgtaaataatttgcttttaccattttatttgtctttgaaataaatccccctgccaaagaggtctagatttttctttctgaatagaaaagtaagactagcccaagaagaacaaaagagagatcacagaatgacactagtggcagaacagagattatttggtcattgaatgaaagtcttctgtggaccagactatttcagaggccatgctggagaacaaatcgaaggctctgctttttatggcgcttacctttggagaatctgatttactgtggatgaacatctgcaatatgttgtgcaagtctgttttgtagcgaactattcaaacgtggcgataggtggcagcaacacaccatcagacggagaagagcccgcaaaccttgggaaccatatagggaaggacagattgcaggccagcactgctcagagaagaaaaaacaaaaggaaacaaaaacaaaagaagaaaacaagttagcaatgaacattaaaaagggcagattataaagacaattatatgtacttttgctttatattatgctttaaaaggctgtttatttttaaatagttttggttaattcctatatacccttcacctagatttccttcaaacgttagcattttaccacatttgaattttcactctctctaaatatacacattgttattataatcttctgaattgttcgagagaataagttacagacatgatacctctttgcttttacattaactgtagtataaatataaaaatcagaaaataaccactgatagaatatcatttataaccttcttttcccacaaattttaccaattatgccattaatgtgctttatagtaaaataaattttttcccctagtctaggatccaatccagaatcacacattgcattaggttgtcatgtctcttttattttgcttttaatagtttattttagaagaaaattatccagaaatgcatggggaaagctgagagtattatttaattatcagtgtagttagcattttgtagtcaatagtgactctaatactttttatctgattgttcatggtgaacagataaaatcaaaagtaatattacaaaattccttatatgagaaacatatcaaactagatatattatgtatatacaatagtgttagattgcttacaatttttaattgccattgaataaataatccaaataggagaatatacttgcttacttctttgttgacacagaatttaaaactcatgtatttattaatttattgtttatcagatcactgtgcaaacaatacttgcattaactttaaagcttttttactttcatcatgcattctatcataaatttcttatttaagcatctaataatttctggggtgacttttttttcttcttatttctaggagatagtcttacagttccgacaaaacttagccaatatgaaaggcaaggtgaaataaaaacatcattgcatgggaaaccaaagactgacattgctgcttttgaaaatggaggtgagttaatttattactgattgaccctgaatatatcaccacataataaatgagtctgaattttatcttttacaactaattttctttttttgtccatgtcatgtttaacacaagagtttggaggtatatcacaaaatcagttgctttcagagaccaaaatctctgccaaataccttgtgcgaatttgtgttcagtgtataagacattccatttttcatattttaatgagaaacctgtgtgtgtgtgtgcatgtatgtgtgtgtgtgtgtgtctgtgtgtaggctcaactccagactataatgaattcaggtgttatgtatgtgctgtaatatactataacagagctataaatgaaggaggcacttaataaatcatttgattaagtctactttttatttatctacttatttatttatttatttatttatttatgagatggaagtctcactttgtcacctaggctggagtgcagtggtgcgatctcggctcactgcaacctccatctcccgagttcaagctattctcctgcctcagcctcctaagtagctggcactacaggtgcgtgccaccacacccggctaatttttgtatttttagtagagacggggtttcaccatgttggtcaggctggcctcaaactccttacctcaggtgatttgcccgccttggcctcccaaagtgctgggattacaggcacgagccaccgagcccagtggacttaaagtctactttaaaggagctatattcaaatatatatcatttgtcatcacattctaactgtgtattatagcttaaatattttggaactgctttttagcataaacatgttggaaaatctgtcctttgactgaaaattccaagcgtttgttttgaaaatatatagagattttgtggggaggttgaaaggtgtggctgatgggaagaatgtgtgtgaagagtaggaaggaggttgagagcaggtatcagtaagtaccagtatctcttaggcatattggtgatactttctgctgtcctggtgtcagccattttcttctgtgtgccccccactgccctttttttttggtgctaaggtaatttgattattttttctcctttcttacatctgcagcagttttagtctagctgttttagtctagctgtaattgttttagtctagctgtaattgtttggttgccttgaagcaataagttttagctacaaattagaaacactggcagtctctcctaacggagttcccactgtctatttaacctatataagtgggatccacttaacccgagcagttctaatcgaacagtttgttgaaatatcattaaatcagatagcttttttggttaataaaaggttatttttaaccattgatagactaatggtttcatataaaaataaactttccttcacgttgtaacattaataatatattacctactttgttgggagttagaaaatgtgagaatgtcattatactgtcattagcctaatattaataatattgttagagtaatgaactagttgaaaaaccatactaaaagaatatttaaaaaattccattatctggtatactaagttctggtatagtcaagcttattgattttccaggcatcataatgttctctgtgtcactagataaaataatcttctgggtatgtgtatatgatagatatatctaaacatatttaggctcctgcattcataagacatctttgaaatgaagatgatcaaaactgaaattataattaatgaattagtattcatttcaagaaaaatacttgaggcattgtcttgtcttaatattattttaatgtgttattgcactttaataaagttcacagatctgaagtgaatagcttgttaaaattttacttgtgtatgtatcaatataaccatatttatggtactccagatggctctttctctccaagtcaatagtcttctcccagtggtaaccagtactctggtcgctattactataggctaattttgcattttttgacctttatataagtggaaatatacagtttgaactcttagtttggattcttttacttaatgctctttgtattagactgatccatgatgttgattgtagcagtaaatctctatagatagatagatatataccacatatatacacacatatctacatgtaagacatatactgtatatgtgtacatatatatgaaaacaaacgtgggcatttctctctctatgtatatagtatatatatacacacagttgatacacacacaaacacacacacaattgattcttgttattcctggttgctatatataaagctgacatgaacactgaattagcaaacactgaaccattgctcctcggggaactatgtacacacacacatatacctacatctcacacagattataatcttaaatcgtagaaattactcatcctggtatattctgttttccttattttacaaaagagaaaacaaagttcagaagtcttaagtgactctcttgaggttgcctcactaacaagcctcagaactgggactcaaaccccttccacctctccccagagccagagcttcttccaccatgctgtgctgccctctcctgtctccagccattctctgatcatctctgtatgaactgaaatgagaatgctgagcactgccattgttagacctcagctaggaatgtgcgggtccagcaactcaaaattttcaccactctgcgtacgtttgcaaacaacaaacaaacataaaaacaatgcatgaaagcaccatgagtattgatattgggatttgacagacaatatttccagtttgggactattattaacattcttgtacatgtcttctaaaggccatatgcacaccttttctttgagattagcttgctctgtatccttacccacaattagtattttcagtcctttaactttagcctttctggtgagtggctagtggtacatcattgtagttttaatttgtatttccttgatgactcataatgttagcaccttttcataaacttattggccattttgactttctcttttgtctggtgcatttttaagtctctagcccatttaaaatatttttttcttattgacttctctagataaatctggatactttctgacaacctactgtcctgttcactaattctcttcctctctgctctttaatccgtattttaaattctaaatttctatttgaccttcttattgattttctacttaaattctccatcagttctctattttgataatgttcttgttattttttgcaacttcctgtttgattacgcttggatatctttcattttcctcaggtttttgctcaattgtcctgtcttactatgccttctaatattttatttgatgctgaacaatatggataaaaattacatagtgtatgaatgatgttatttctccacagagaaacttttctcctggcaggcagctagactatcagcagaccaccttgattctgtgaaggactagctttgggctttattagggatgatgccgtagatgatacattatttttcctttctttgaaggtatagtccttattcctcggacaagacccttacccctaaagcattgctttactgggttatcaactgagacatgggatgttcaccaagatacctctactctggcaaagctcgaatgccaaattttacctcccaagcagtatgtagatgctgaaatctctgaccagtttttagcctcccagatgcagtttttgcttatttcctagggttccacactgtacctgaaaagtatgggagtcagataacagtttaaagggagttttatgcctatttcagaggaacttctttgttgttcttcttttttcatttccccctcaatttcaaaccaattagatagtcccagactttcggctctttctttttcacctccttggtgtcgctttctgcttgttatttccttacatgatgaattagacatgctttcagggaaaaatccgtagtaagtgtggagcgtaactccttcagggaaaaaagccagggtgaatgtgaacatacaattgactttgtgtccttccattgctctcaggcattgcagtcacatgcattgggttgttttccaatcagtttgttttggtattttatagttgtttttgggatgaaagttattctaataaaagccattttggtcatggtagaaaccaaaaatctttttgacatttttatcactggttttgtgtaagctccttgaggctaggaactgtgtataatcaatcactatagataaatctctgtagtagaatgcctggcacattatgtgcactcagtaaatacttgtagaataaaggatgatatgttcaaatgcattgaatgactgggtgaatgtagacatgtttataaaatttacagttaactggaggttaatctgttggaacaatgagccaaatcttacagggtaacttcaagcaatgataaacatacattcttacatttaggtacaaaacattaaatagtggcttttctttaatttgggaaaaacccagtatgatggcgtttttgaggggaaaatagagtgagtttttttggccacaatgttttacaacaatttaggcgtgtgttttcactaccaaatagcgatggtaaagtcacattggattattagaggcagtatagaaagatagttaaatgtgatttaaagtactcagtaaagggtcagattcctagaaaattactccatgaatggcaagtattattttactagttctgctgatttctccacagcttagttcacatttgggtgtcattttaaaataaggttatttgaaacaaatatgttaagaaaaggtaatgtatggtgaagaattttggaattttgtatgtaacatttaaagcaactatggatatttatcctggaaaatagaagttcttggggaaatatggaaactgctttaatatatctgaagatgttatatggaagataaattacatttactctgagtatctctaaagggtgggactaaagattattatacattaaggaaaattttgttgactctgaattttcttgcaattatctatatgtaagtttacatactgcatattcatatacatatatattaatactcatgtattaatctaagcatataaatgtatggagatggatatggtatcactgagaagtgtccaaagaaaggtgaacaaaaggggtattgtagaaaatgttcctgtattgaaagctagtttgtatcactttctgccattgttgccactgacagtaaggttttgtcataggaggtgactgttatgttccacagagggtcatatttcttggagtcgatgaaagtgaagctttaactgaagagaaagaaatcaccatatcaaaatgttcaaatactaaaggtaatgaatattatataattttgattcatttgtaatttggctaggcaagttaaagacaagcttgcttgttataaaaaccaatagaggaatggtaataaatcaaaatatacactgaataggagtcaagagctctaaggttccagtcctggctctgcccctaactgtatgaccatttttttgttttcttacctgaaaaatagcctgttggactgtataatttctagtattgctagttctaaagttactggttctcttaaatggcaataccaagtcctttaatttataatatcagtataaatgaattttgttagaaaacgttgtttgtgaacattgtgaagagtttaatctcaaaaagacttttgtattttataattgttgctaacactagtctgtgaataatcaagagatatgataaaatacatcctctatagttttacactgcccttaactgtacttaaaaatccaccagctgttatctctctgctgagtgcctctcagtcgnnnnnnnnnnnnnnnnnnnnnnnnnnnnnnnnnnnnnnnnnnnnnnnnnnnnnnnnnnnnnnnnnnnnnnnnnnnnnnnnnnnnnnnnnnnnnnnnnnnnnnnnnnnnnnnnnnnnnnnnnnnnnnnnnnnnnnnnnnnnnnnnnnnnnnnnnnnnnnnnnnnnnnnnnnnnnnnnnnnnnnnnnnnnnnnnnnnnnnnnnnnnnnnnnnnnnnnnnnnnnnnnnnnnnnnnnnnnnnnnnnnnnnnnnnnnnnnnnnnnnnnnnnnnnnnnnnnnnnnnnnnnnnnnnnnnnnnnnnnnnnnnnnnnnnnnnnnnnnnnnnnnnnnnnnnnnnnnnnnnnnnnnnnnnnnnnnnnnnnnnnnnnnnnnnnnnnnnnnnnnnnnnnnnnnnnnnnnnnnnnnnnnnnnnnnnnnnnnnnnnnnnnnnnnnnnnnnnnnnnnnnnnnnnnnnnnnnnnnnnnnnnnnnnnnnnnnnnnnnnnnnnnnnnnnnnnnnnnnnnnnnnnnnnnnnnnnnnnnnnnnnnnnnnnnnnnnnnnnnnnnnnnnnnnnnnnnnnnnnnnnnnnnnnnnnnnnnnnnnnnnnnnnnnnnnnnnnnnnnnnnnnnnnnnnnnnnnnnnnnnnnnnnnnnnnnnnnnnnnnnnnnnnnnnnnnnnnnnnnnnnnnnnnnnnnnnnnnnnnnnnnnnnnnnnnnnnnnnnnnnnnnnnnnnnnnnnnnnnnnnnnnnnnnnnnnnnnnnnnnnnnnnnnnnnnnnnnnnnnnnnnnnnnnnnnnnnnnnnnnnnnnnnnnnnnnnnnnnnnnnnnnnnnnnnnnnnnnnnnnnnnnnnnnnnnnnnnnnnnnnnnnnnnnnnnnnnnnnnnnnnnnnnnnnnnnnnnnnnnnnnnnnnnnnnnnnnnnnnnnnnnnnnnnnnnnnnnnnnnnnnnnnnnnnnnnnnnnnnnnnnnnnnnnnnnnnnnnnnnnnnnnnnnnnnnnnnnnnnnnnnnnnnnnnnnnnnnnnnnnnnnnnnnnnnnnnnnnnnnnnnnnnnnnnnnnnnnnnnnnnnnnnnnnnnnnnnnnnnnnnnnnnnnnnnnnnnnnnnnnnnnnnnnnnnnnnnnnnnnnnnnnnnnnnnnnnnnnnnnnnnnnnnnnnnnnnnnnnnnnnnnnnnnnnnnnnnnnnnnnnnnnnnnnnnnnnnnnnnnnnnnnnnnnnnnnnnnnnnnnnnnnnnnnnnnnnnnnnnnnnnnnnnnnnnnnnnnnnnnnnnnnnnnnnnnnnnnnnnnnnnnnnnnnnnnnnnnnnnnnnnnnnnnnnnnnnnnnnnnnnnnnnnnnnnnnnnnnnnnnnnnnnnnnnnnnnnnnnnnnnnnnnnnnnnnnnnnnnnnnnnnnnnnnnnnnnnnnnnnnnnnnnnnnnnnnnnnnnnnnnnnnnnnnnnnnnnnnnnnnnnnnnnnnnnnnnnnnnnnnnnnnnnnnnnnnnnnnnnnnnnnnnnnnnnnnnnnnnnnnnnnnnnnnnnnnnnnnnnnnnnnnnnnnnnnnnnnnnnnnnnnnnnnnnnnnnnnnnnnnnnnnnnnnnnnnnnnnnnnnnnnnnnnnnnnnnnnnnnnnnnnnnnnnnnnnnnnnnnnnnnnnnnnnnnnnnnnnnnnnnnnnnnnnnnnnnnnnnnnnnnnnnnnnnnnnnnnnnnnnnnnnnnnnnnnnnnnnnnnnnnnnnnnnnnnnnnnnnnnnnnnnnnnnnnnnnnnnnnnnnnnnnnnnnnnnnnnnnnnnnnnnnnnnnnnnnnnnnnnnnnnnnnnnnnnnnnnnnnnnnnnnnnnnnnnnnnnnnnnnnnnnnnnnnnnnnnnnnnnnnnnnnnnnnnnnnnnnnnnnnnnnnnnnnnnnnnnnnnnnnnnnnnnnnnnnnnnnnnnnnnnnnnnnnnnnnnnnnnnnnnnnnnnnnnnnnnnnnnnnnnnnnnnnnnnnnnnnnnnnnnnnnnnnnnnnnnnnnnnnnnnnnnnnnnnnnnnnnnnnnnnnnnnnnnnnnnnnnnnnnnnnnnnnnnnnnnnnnnnnnnnnnnnnnnnnnnnnnnnnnnnnnnnnnnnnnnnnnnnnnnnnnnnnnnnnnnnnnnnnnnnnnnnnnnnnnnnnnnnnnnnnnnnnnnnnnnnnnnnnnnnnnnnnnnnnnnnnnnnnnnnnnnnnnnnnnnnnnnnnnnnnnnnnnnnnnnnnnnnnnnnnnnnnnnnnnnnnnnnnnnnnnnnnnnnnnnnnnnnnnnnnnnnnnnnnnnnnnnnnnnnnnnnnnnnnnnnnnnnnnnnnnnnnnnnnnnnnnnnnnnnnnnnnnnnnnnnnnnnnnnnnnnnnnnnnnnnnnnnnnnnnnnnnnnnnnnnnnnnnnnnnnnnnnnnnnnnnnnnnnnnnnnnnnnnnnnnnnnnnnnnnnnnnn

SEQ ID NO: 113 - DNA, 650 bp, Homo sapiens
gtgtaagaagtgcctttcacctcctgccatgattctgaggcctccccagccatgtggaactggttcccagtgccgattccgacactgtgaagaggcccttggcagtgacactgtgtgctcattatggagagagaggaaatgtttagatccactttgcagatttagacacatggaaatgcagcaaaactgcagcatttcatgcttctgggaaactcagcctcttggttgtgtgaagatcagctgtatcttttatcacagcaaacctcgaaatatcaatggattatttttgccaccaagtagcaatatcacactacagaaagaaattcaggaaggaattccactccagtcccagagtcaagaacctctgaaacctcaggaaaatatatcacgacccatccaccatcctttagttttaaaaactaattttgaggaagaagaggaagtagatgaacaaaatgatgcttctagtttatggacaaagacccctgaagaaattgaagaaaaaagagcaataaaggagatgtgttataaatctggggaatactacagatttcatactcctccagatattttgtcatcaaaaagcatgacacctacagcagaaaaacagttagaaaagcctttggaaaatggcagtgaattgcaagaag

SEQ ID NO: 114 - protein, 208 aa, Homo sapiens
  VARIANT (1)...(208): Xaa = Any Amino Acid
MILRPPQPCGTGSQCRFRHCEEALGSDTVCSLWRERKCLDPLCRFRHMEMQQNCSISCFWETQPLGCVKISCIFYHSKPRNINGLFLPPSSNITLQKEIQEGIPLQSQSQEPLKPQENISRPIHHPLVLKTNFEEEEEVDEQNDASSLWTKTPEEIEEKRAIKEMCYKSGEYYRFHTPPDILSSKSMTPTAEKQLEKPLENGSELQEX

SEQ ID NO: 115 - DNA, 289190 bp, Mus musculus
  misc_feature (1)...(289190): n = A,T,C or G
cagccatcctgtggtttcatctgtattatctcaaacaagtaagctgtgtgagccggttttgtttgctttgtgtcttttgagataaggatctcactacgtagcctaggctggcttcatctcaatccttctgctacccaaatgttcctgttccaggcatagacagcacagccaactaaagaaataagaatttaaagaaaaagtgcactataatatcattgtacacttaaaatattaatactcagtcatattatatgtctacctattttttaacgtctctaattttataaataacacatatgcatgcctcaatgcatacataaaattaaactggtttgaatcaggaaggtgttcacatatgcccagtatatgcttttcatctacaagccacatcctagtttgtctgtttatttgtcaaagaagcaattacttctttgaatctagcatcttgagaactgctgtcttaggttttcaataagagaggagctgggaaacttctagaagtcactgcacatggcagtttcagaaatctgaccatcatttatgggagaagtaccaggaagatccacagagcgcacattaagattgctaggtaagtggaaggtggttcactgattataggtggcaaaactcactttccagtgacatggttcaaattctggtgagataaaacacagtgaaagtgggccagctgagttaaaaacaaacaaacaatagatagacaaacaaaaacaaaaaaggaacaggtccaaaccagttagtggctggaagtcatctcctgtgtagagcagggcagcttaatgtggtgaaggtgactggatgtgtctgagcaaagcaagcatttgtctgacttacaagtcatgggtttaaagtggaggactctgggaaactgggtgatttcaaaaggaagagtaaggggagagcgggaactctgatccagcagccagctacttaccagtaaggaagacacatcagaagctggacagtagagacaaaagataaaagaaacctaaatttacagaggggtgggggaagttagatttgcgcttttgtttccacaatttaacagttacagccaggtatggtggttcatgcctgcaatctcagctcttgagagattctaccatgaattcaatgctagcctgggctatatatatagtgagtttcaggccagccagagctacgtagcaagactttgtctctcaagagtaaaaccaaacaaaaacaagaacctcatataattgagattaatgctttaagtactgaatatattgtttcaagtccatttaggctcactttaaagtgatgtagtttgagctacttatgcaaaaactcactgcaactggtgaggagcatcacttggaagtttaaaaagctccactggaatgaatggtccccttttgatatggatggagttaaggaaacttctcacccatctaggacttgatttagagcactgaacacagaggtcttagcggggtacagcgagagttctcatgagtacaggagctgctagatctggtgtggctggtttccaggtatggaccgcactgctggaattctgaaaatggtccccagtgtgcattgcttagcatcagtgtaagaaacagccttaggatttttctggtggccctatctccagtaccctatccccctgaagccccttcataagaaaaagcaaaggcaaaggcagcctttgtactttcacctttcggccccaccatagccccccactttcccataacttgtcacctacctcctagagcttactttgttctagcctattgtttgatttcaagtgtgtttaacagacaggagagggagatctgttgctattgctccagatgtgctcacagccccatctccatacctagttccctagtccttggaagagggcacttatgctaaatctcatttacatcactaagcactcactttgcattcctgtgatgcccctgcaaagcacttacacccagtacatttgcattccccttctgtcaaaggaacctccgtcactaattccatcgggatcaattactaaacttcaaaggatggagagtctgattcccttcactataacagtggtttagaccaactccttccaaagcacaaaggcttttaaaacaaataattgagaacccctttgttcctcttcccacattttcacaatggtccatgcaggacagaatgcttatctatacttgtgacctgtcagaagtggccttgactgcttcagcgtctgcctttgatcccttggaacaggaaccatctgaggggaccaaggcatcacctgattgaacaaccttttgacggaagtgagtttcctaagctttcaatcagaggttaatccttttcctctcctccctgggccaacggtgagcctatgattctaaggcatgatgggtagagccctaaagttctttctccttcctgtattgtctttgcaggagccccctttattattattttttaaaagagattttatttagctgttttatgtatatgagtacactatagctgtcttcagatagaccagaagaaggcatcggatctcattacagatggttgtgagacaccatgtggttgctgggaattgaactcaggacctctggaagagcagtcagtgctcttaaccactgatccatctctccagcacagaggcccacttttaaaataagctgagtatataaatgttactgacgtaaaatgacaaccatgcttcaaggaaatagaaaactagcttaagacttgcctgacataatatctcacatgctagcattccttcaaggctccgccccacagttacctagcaacaaccatgtatgcctggctcactataaaaggggctgtttgtcccctcttctctctcctaccctcttgctcgctcttatgctctctgtcccttctctccccattctcctcccccatctctctccatgtgttcctggactgcctctcctnnnnnnnnnnnnnnnnnnnnnnnnnnnnnnnnnnnnnnnnnnnnnnnnnnnnnnnnnnnnnnnnnnnnnnnnnnnnnnnnnnnnnnnnnnnnnnnnnnnnnnnnnnnnnnnnnnnnnnnnnnnnnnnnnnnnnnnnnnnnnnnnnnnnnnnnnnnnnnnnnnnnnnnctccctccttccctccctccctcccttcttccctccctttctccctctctccctcttcctctccccttgcctttcctactgtgtggctggtacctcagggggaagggatgccccagcataggcctgcagagggacaccttccacctcaccatacctcacttctaccaaacatcctggctctttctttctttttataaaacaaaacagcacaagtgtaatcctagcactcaggaagctgagacaggaggattatgatctagagacaagtctgggttatgtagtgaattccagactcatctgggctctgacctagagagaaatcctctctttctctcaaaaaataaaaacaaaacaaaataaaacagaagtaaaggaactggtttatactggtctagatgatataattgaccatggcttggggaccaggattcaattttccttgaaagacatgtcccaccacagaagagactgcatgagctgatatgatcacagaataaaaagaagtcacaaattcatgaacctaaaggatacacgtgtggatcactgagtgggtcaacatggtagtaagaacatggcagcaaggtaggataatgtcttggcatgtaattttaattttaaagttagtagagaatagagcttctttaaattaagtgataaaacccaacccaagagtttttatctgaaagtaaggatgttaagtcagaggctggctagaagagatgataatttataagaaagggctaaagatgggctggagagatggctcagtggttaagagcactgactgctcttccagaggccctgagttcaattcccagcaaccacatggtggctcacaaccatctgtaatggaatctaatgccctcttctggtatgtgcccgaagacagagacagtgtactcaatatatatatacatacatatacatatgtatatatatgtgtgtgtgtgtatataaataaattaaaaagaaagaaagaaagagagagaaaggaaagaaggaaggaaggaaggaaggaaggaaggaaggaaggaaggaaggaaggaaagaaggaaggaagagaggaagggagggctaaagagaacagaagatgattctagcagttgacttgcaatgttccatcgagtctcagtggtctccccagcccaaggcaggcagtctgtgggacccttcacagagacacatgtcccaaggggatctcagctcatggcgggtcctgctctgcaggtcaggctttcccacgggaggtgcatctcagagtgtctggtcctcaggctcctggtggagttgaagtgagacaaggagttctctgctctaggctacatcctgagagctcacagaaagtctgacatttcttcagctaagacaaagcaggtctgtttctcatatagagataaatccagctaaaagtctgggctctgggcattcagcattgtttgaaccttaaattgctgataatcatttggttctgctcttttgcaaattcaaaggttctcaaagcgatagcatcttcacaggcaaggttgaagtaatttcaaagtagagtttggaataaatgtttgctttcaaaggattccttatttaacattcttactttccagacttaagtttgacccatattactgaagaaaggctatttagattacattttaaaggacacaaagggtggacaaataatcatagctgtctatctttttagtgatgtgtagggttagggacccataagactttttctgacagttgctatgacggcagcgtatctcagcagcagtttttaattgagactttcaggtcctggttatggtctgacagacaattctttcgcgtacttagggtatagctgtctcaaaagtttgaactggaattgacttaggtgagacaaagaagtaactgtaacggtctgctttgatttcacttccttttcagacactgcccatacatccttatctggaactctatcttctcttctctccaggagagaaggcagcgctagactagagagaggtgaggagcctggtacagttctttgttagtttctacaaaagcagtcaacttccttccttcttttccttcttcctcctgcccccgcccgaccccttttctttccttattgaggcttttgttttgttttgttttgttttgttttgttttgtagagaggcctgtgtccatctgtagctcagaatggcctggaacttactacacagccttcaagttcacagcactcctcttcctaagtttaggactttaggccactactcccagccgtatgaggatttaattcagagaaatcatagggcattggcttttagggaagggggctggagtagtcgttggagaagacagagggtttaggcttggcagagagaggttaactgtatttgtcacgtggacaagggaaaggagaagagagaaagggaagtactcagggttctggctcctcggttaacctggttgggtaggctcttgtagtagatagaattcagtgtggcacctctgtctcctccctgtccctagctccagggttcttgctttgccccaacctggaagcctatattcagaggtggggggagttccaggtactggggccaccctataccctctctgtcttgcctgtggagaccaaaaaaaaaagtcagtaagtccattttcccttaggactggtctctcaacctgcaggttactgtttctaccgaaggtgacctccagacatttagccaaaagggaggtgactgcaggaaacaaggtgagaatggacaagatgtcaatcaaggggtacctgtaggggcctgaagtggaaacttaagggttctttggaaagtctattggatggtgttttttttctggggcaaatgcatgaaggaacgtttagctgaagcagacacaggtgaaagaatgttctgctaaagcaaacacatgaaaggacacgtgatgaaggattctttgttaacaactcacatgtattggtttgacttacattgtgtagttgaactccatctgtagggactccatagagagaactacacccaaaaacttctggtggtgtgctatagtttcttcctcagactctggctgttggcaaagtgatgttagctgagatagatgcacttgctaaggcgagacccatggagggtataaataggacttgagggacagtgatggaggctgagctaggcttgcttatagagttagctgtgtaactcttggtctctcgtcttcactgagctttgctttactgagagaggcatagcctagaacttctcctagtacctcctgctaactcctgccaaggctgaggcctggctgtttctgctaggtagtgccaccactgttgattcgtgcggtgctatatatacaccaactctaccgaactgaactgctggtgtatccatgaagtgttttcaagtggatggagctgctgctgctgctgacctgtgaactgaactgctgatttccagacaacacagatgggagttgctccaaagaaactttctatgcaggtccacttcccccgaattctacccactatctctggtgggtggtgggctagaagggaggttagaatgtttaaaaaccatcattaaaaatatgatttgaaaaaaattgaagttccaggggcccctccttattcctaaggacttgggtagaatgctgccgctccttggatggcttagggataacaaggctaaatggcaggcataatgccaggtttgcctggatccttcatagagcctgacatgaaatccctcagtgtctccacacctgggcagtttgcttccccagcctgtacctgcagcctcttctatcagcagtgactggagattctgtaacattgactgggtgacattccctcctacgggcaacatctgctccaccctaggttaccctgacagtacaggtccccctctttgactccttctcgccgttgggttttgtgggcaagctgaggcagggtatgctgatggtggtagtgagtcaggcagttctgtcctttctctttcctctctcacttgcatgtggcattgtagaacaggcgccttcaactcagttcacaacaggttttgagaaagggattggaaagcttcagtagtttctcttgggtccttgctttgcgttccacagttgtgctgcttagctttttttggttgtttttgttttgttttgttttctcaattggatactagctggggtcatctgggaaaagggatcttggttgacaaaatgcctgtgttagattgcctgtttggcaagtctgtgtgctattttctcaattagtgattgatgtgggatcacctagccctctgcagagtagcgttactcctgggcacatggtcctaagtgagcccatggggagggttcctctgtggcctctgcatcaattcttgtatccaggttcctgccccaacttccttttatgagagactatgatctggatgtacgagccaaataaactttcctcgccaagttgtttttgatcatcacaatccaaagctagttaagacaaccgctgtgttttgagttccaaaccaggttcctgtgagcttgtggcttgaagggttatcgtcatcaggtgccagcacagtgccgtcatttccagttgataatcgtccatctgtcagcatctatctccttaatatagacagcacagcacttagtaatgttgggaaccttggctattcctgtaattagttgttctagttttactaggacccagaactgttactgttggttagtgtctggggtcaggcagctctggttactaggtttcttatccaaagaactgaaaacacggttcacacagattcacaaaggaagcaaggtagctggatgggagcaaggccacagtgcagattgttgagggagacaccgtcaacactgacagctggcctcaggacagcactcattgaatcatgagaaggaccagaagaatgcttgcaagggttcgttctctccactgaacccacggacccagggaatcgaactcaagtcatcaggtttggcagcaagtacctttactcaaccgagccatctcgccagccctctcctttcttttaacaaatgaaaatttacggtcttcccagagacgccttggatgggattgtaaactgataatatgaaaaaacaaacaaacaaacaaaaaattagttacagagttgaatcagagagttagaaccagtcttttgcttgtaaatgatgttttgagagtcctagcttttacaactggaaaggtagagaggccatgtgtccttatgcctcaagaaaacagctttccattttaatgttcccagtgaagcgtctctatggacgagaaatactgtctttgttccaaatcgtcctagccaactgctgttgacagtgctgccattctccatgctccaggcagcaggcttgggccaggcttccaggtgaggccttcctttctctacccacaattccttcatcttcctacactgccttatttcaacagcaagcttaaagcttttgaaaagcttgtagagtcaggcaaacaatctcctgctccttctcacccacttcctgggtctcttcacaggaagagggaaagagatgtggtaagacaatcgaagagcaagtctgccttaaaagcagcaaaaccaggaagttctctcgtttttgaatttgcattatcttgtaaatctaacgactcacctgtgggtttttgaatacggaaggtgaggctgctggcaaatgcttgcaagcaatagctgacaggcttcaagacaactccagtattagtcatcacagagatgcgtgccaaaagggaccatgggtaaaaacatctgctgtgcacacagatgccccctgctgagccaagcacacagagaaaaccaactccagctcggagttgcataagcaaagaggctgaggcactggagtgcttgatgctctcccagagtgggaaattagctttccgatgggtagttaccttccagtgtctatgtagctcagggagaccttgaattcacagcgatcctcttgcctcagcttcctgaacgctagagttacaggtctgtaagaccataatattattatgtgtttgtctcaaagcctttagtgtcatatttttttcagggtgccttacaatacagaaatggaattctaattctatcagaatagaagccagacattaacactcgtccattttaccatgtggtgagatgtgggggtctccacagcagacctggctgcatggtgactgattggtaaagacaaggaaatcttgatgtttgcctaggaagcagaagaactggaggtaccagtcttaaacacctccctctcccttttctccctccctcccttcttccctccatcctccaccttctctatctctcttcctttttttcttcaacaaatttaaatagcaccgttaaaggactggggctagacttttctttttgattattttagttgaccggcaattataaaaagtcagagaatcgtgcactggatctgtgcctctcaacttcagaaatagtcctgtgaaatcatacctgtcaatcctcccctgggaggctgtggtgggaggggagaaacctgagtaggtgaagttaagggtctggacttgcccttttgaatctgaaaactattgatgtgccgggttgaactgtcttactatcaatgtacaatttgccagttgcatacagactaagaaatcatgctggaaacaggagggccacgagtctggacatcagcatcttgctggcagatttgaccagtgtggaagatctctttccagagtgaatcatttaaagacagaatcttttatgatgaaaccaccctctggagtttgaaaagagacggggctgctttaagagagaaacaggaagttgtaacgagaagccggtctgaatgctaagccatctgaattgcttgcgaagtagcaacaaagtagcagcgtttattctgaaattctgtgggcgccagtctatcctaggcaaccctcatctaagggctcatcccttgtccagggatttctctgagcatcacagtcggtcgagtggagaatggctgggcagcttcggtttacgtcagggaaggatgaagatcattttcaacaccagggagcagtggagctactcgcgtttaattttttgctcatccttaccattttaacaatctggttatttaaaaatcaccgattccgcttcttgcatgagactggaggggcgatggtgtatggtgagtgtgtaaatggtggggtagatgtgtaacttgttgcctgggcgtagtaattagagacttgtgctcagatggcaaagtgcagaaagtgaggggaacatgctgattgaagtgtcattagctcagcgagaggtgccgcagtgttagggatgctaacctctttccagaggagcggcagaaattccgcctgaccacagagcagctgtcacagtgacaggctctgaggcagcacagtatgtgagtctgttgacagctgcagtcctttgtcatgcggggagtcatggagcgctagtcatggtagtaggttgtggtggcaatgcagtcagtcagcgcagcctcttccacaggcagccagaggagccaggcaaagttaagggaatggcttcagactgcatggaggaaataccctttcaactattttcaagaagaaatactcgtagaaacagaccccacccttgtaatgggaataattgtgtccaaatcctttttcatcctgtgaacactattttagcttctgataataaaagtgttaaaccaagaatttcctatttaacattttccattgcttagcctgatttaatatggtcttgtttataatacttatttgtgttctcacaccacacacacacttctctctctctctctctctctctctctctctctctctctctctctctctctctctccctctccctctctctcctctctctctccctctctctctccctctctctccccctttctctctctctcattttagacaggtctcactctatagacaaggttggcctcagactcacagtgatcttcctgcttcaacctcctgggtgctggaataatatgtataagtaagaacacccaattctttaaactacagaggggaaaaaaggttttaatttaaggtttaacctcccaaagtgatgctctttctgtgcaagttaccatggcatccatcatttttgggaagtttaataaaatgtgattatggagtttgtacagactagcctggtttatctagtttattaagatgagctacaaggcactagcactgagctggtactgagacaaattgtctcactaccaactgacttcatgacccttatcctaccaagtaaaaggtaacagctttgaacataatgggaacagtcaagggctgccaaaacggatagcaaagaacatactttttgacttctccttctttttggaggaggcccttttatatgtctgggctccagggaaacaagatgagggcacctttcatgtgctaagcgtgtgatggactgatgttaacaaggaatggtcctgaagggaaagcatgagatagcctacccttgagccacttgagctgtaggacagaccgttaaggccatgtagtgcagcttgctttctcgaagccaattcagagctccactaagtttctttgtactgaaggtcctacagcacacagcaaaacttttcagggtgggagagacaggccaaaagagaagggcacagcgctttcagaggccgagccctagacgtgagtcattctccctttctccataatcgatttaccaggagctttctctatcttgggtaataaataatcaaaaagatgcagggtgtaatctgagaagccagaaacactgtcatcctaagcatcagatcaaagggctgtgcatattttagcgatacaacacatagttaagattaaacccttactggaagggaagatttctccatgtgcttgaattataacagtttttttttttttatcaattttcttctctgtggtagggatattgttttataaaagtagttaaactttgacttaaataattcttgattagatttagttaataatggttgtccctgcactgaacagtcaagcatggtggtcctccccaagctgaacagtcaagcatggtggtcctccccaagctgaagagtcaagcatggtagtcctccccaagctgaagagtcaagcatgttagtcctccccaagctgaagagtcaagcatggtggtcctccccaagctgaagagtcaagcatggtggtcctccccaagctgaagagtcaagcatggtagtcctccccaagctgaagagtcaagcatggtagtcctccccatgtgttttcatacatttcaagctgttaatgaggttcttgttcatttcaagggtaaactctgaaaataattcattaagatggcttccacagacttctaggataagcattttttcaaaatgctttactgaagtgcttagtgtagactttctgtcagggatgtaatgaaatagtcaaactaaaacccaggagaacgaggaactctaaggaacaacttttagtagtaagagggagagaattccaaaggtttagtctctgtaaatgaataagcagttcgtacagttgtaaggaatcttagagaatggaatcctcgttgtgcagaggaagtggggcttagatggaggtcatggtagtggctggtgctgagctggggtccagcacgtcttttaatcagagatgctgagacagtaataagtaacttccttcagggatattccagggagtgtgtgtatgtgtgtgtgtgagcaggggtgggaggatggtggagaaatgaggatgttccaaatatatgatcctgttgtaaacctttaaggcttggccatctagtttcttctccagggggtctgacaaagtaaaatttcagggtaaaccctttctccatctgaggaagcaagacattgtttctgcagtagtctggctaaaggcataatgaaaaccaatggagaagacgacaaacgtagactttttcttgttttctgaagacagacactttagagtagcctgggacagatctctccatcctgctgttaatcaatatgctgaccgttaatgtctgttctggcttttagtcccatttaagtgattattaccgctgcttattctttccagtcttgccatagagcacctcggatagtttgcctttccctttgggctcatcaaagaattaggtgaccagcccctacctctctggctgcggctcttgccttcatcaactgctcacacaaaccatttgcccttatactgagagcagtactttcttcaggcaccacagtacctgtattccctcagcccagtccccaacatgcctccctgagggcattctggtgacctgtgccaaatgtcccttagaagatgtaatagatgctgatacatttaatcagtgtacttaggaatccaattaaaaaaaaattctagggatcagaggcttagaaaatgagcagttacaggataaacaaggagcaaggtaaccaagcagaatgttcaactgttctttcataattattgttagaaacaattttcaagtcgttaaccttaaaatatcatatgcagggttgtagaggccaagaagtttcctctgtgatgattggaaataaaactgaagacccaaatacaagtaattgcttatacaaaaaataataaaataaaaagtcttctctcattattatgggtcatgggtgctttttataaattagcagtgtcattgtagaaatatttttgctctgccaggcacagtaaagcgtaattgtcgcgcatgacttcctatggctccagttatttcaaaatggaagaataagcaacagccataatcatttaaactggactaaaagccagaatgagcgttaatggtcaaaatattgattgacagcagctgggacacttagtgctgcttaatttggggcctagattcatctccgaggtactcattagaaagcacttgctccttggtccctgatagcatcaaggaatccattttaactccctaggggatgtcacatcttgtagaacatttgtaatggcatacctttgaggactgggatttaagattaaggacagaacaatttaaaaatcttagagttctacctttgattttttgtttgtttgtttgtttgttttaaccatcatctaatatagagactgtcctggattcatgcagaagttagttcatcatttagttgggaccaaagaaatcccaggcctctatagttagacttttgagcttatccaaagttctgtcactttcaaacgttttctggtcctttaagggtattcttccctaagcttaatagaacaatttaacttaatcaacagctagttctcccctcccaggtttaaagaaactatagttacaaaaacatctttccccaaatcctgtggaggtaccgatttcacctcagtctttctcagaggttcccagctgaaaatggattgcttgatatgatgtgtctccactttattggttcagttttgctctgtcgccaatcagcctgcatccctagctgacagccctataggggatgctcatcaccactgcccacccacatctgcctgagctgtccttccgcacattgtctgttgaaacctggcaaactctgtggagaaagcaggatgtcttgctctagtccatggtttaatttctgatctgagttttctcatctgtgaaatgggcaggcaataaactcccttacaccttcaacacttctccaaacttcaagccaagccagacttcagtcagacatcttggagctacttcccttaaacccagtagctttctcctgggaatcaaaccggcaacaatgaagtctaatagtttctcctgacatggttttccttaacaatggctcaccactcttagttcctctggacctgttttgattctaattgggtgctcagtaagtcttactgatcctgctggaacagtgagttgacaaagcaacttcatcagagtggctggggaaggctgtgtacatctatctctctaggatcctttctcaccaacccagagtgtctctgtcttaacctgaaggatctccaggaagagcagttaagttctagagtgcaacatagtcaatttgttctccattgtgctacgaaaagctttatttattcgctttggagatctgcccaagttttttcacactgtatagtgttgctaaattaaataagtagaattactgaatcaagggcacttcttcctacctgagatgttatgttggggcatgccaatacacacctgtaattctagctcttgggaggcagaggcaggaggatcaacacaaattcatttcacattaccctgacttacatagtaagttattggtcaatgaaggctatgcagtgcagctctattaaaaaaaacaaaacaaaacaaaacaaaacaaacaaacagacaaagaaacaaagaggggaaggattttttttttgtaaaatcacctttctatgctaaataagcctgtgtattgtgctggggttctaaacctttagacttgtgcagctttggcctggctgccccagtccctcttcattgctcctctctgaatggtctgaagggttactgatggcacacactaagagaaggggtttgtcactcaagctatttatgagttattatctagaatataattgaattaaattcatatgggtagtgatagggaatattaacatttgttatctcaaaaagtagatatataattttaaaaactagctaatgcagataactcatctaatgcaaaattagactttacacatattgaccagtttaatccttacagcagtcatttctcagatgaggaaaattgaacaacagagattcaagtaactttcctaatgtcacacaaagactagagtccaggttcgggagtcaaagcttgccagtttggttctatgtagtttcttggtaatgtaagtgtgtgcatgtgtatgtgtgtttctgtatgtgtgtgcacaagtgaataaagaaggattattgctttcatgctacagataaggaatctaatactcagagacacaaagtaactggtaacagttgggaacggggtgctggggggggggctatgtttcagactcaggacgcctgtgttattccaccagccataagcattcactctagaacatctgctattgttagcaaaggtttattctgttcccggcaatggtacctgtgctggatagttttatgccaagttgacacaagctaaagtcttctgagaggaaggaacctcaacttaagatcaggctgcaggcaagcctgcaaggtatcaccttaattagtgtctgatggggagggctcagcccaatgtgatggtgccatccctgggctgattggccattggttctataagaaagcaggctgagcaagccatggttagaaagccagtaagcagccctgctgtaagccctctgtgtcagcatctgcctccaagtgcctgccctgttcaagttcctgtcctggcttccttcaacaatgaacaacaatatggaagtgtaagccaaataaaccccaaatccccaagttactttgatcatggtctttcatcacagcaataaaaaccctaattaagacactacctttggaagtttacaaaataaatacaaagaggggattagaaaatgtataagctgctgcacagagttggtgggaacatgtttcaaagcttatcagagtgtcccaattaagttagttggggattgctgttggcaggggcagtttggttcctttcttacctgaagatccagaaatggtagtatctggacaaaaaagcccaatgtaacccagtggaagcaatactgtgacttcccattcatgctatgtagctggacctacagtatcccagggcaggtggcaaggctgcctggaaacagccacccacatcccggagaaactaccttgccagttgcctcatttgggttgtaaacacccatggatgtcagaatgtgtgtagcagatgctttatagagcttgagaaaagagatcggacttatgtaaatcatagaaagaaggagtcagggctttcttcaaatgtgagcttgactaagtttaattgttggaatagtctgaaggatggtaacttttatctctggggcctcagaaccctgaaagcatcctggtgagtctgacactgttgatcttgatggagttggaaggctgtagttctaatcctattggctactggagggaactactgtctatatactgttttatgtatagtgcttttagcagcctgaatagcatcatcagctaaagaccaatgatcagaagagacaagtggctaggatcaaaaccactgacaaaaccagctgtgtatctacagccttctagtgcttcacagagggaaggaattcaacagacaggtgctagttttatgtcctaccatcttccccaccccattagggtggaaaccatctcccttctggggagccactttcactatctacattatgctactactggggaaatgatagattgctttgtgtagaactataaagtaagaacccgttgtttagccaatatatatctagttagaccctcttgtctacagttctgctgatggcctgtaaggatgatgacaagctattagctgtaaaaaagctggtgcctgaagtagtttccagagaaaaaataatctataatacatgctagaaatctgagaacccaagctgcgtagtggtggtgcatgcctttaattctatcactcgagaggcagaggcaggcggatctctgagaatttggtgcaagcctggtatacaaagtgagttccaggatatccagggttacaaaaagagactctgtctcacaccccccaaaagaaaaaaaatcccagagatgtgagtgttgtgttgtaggcatgtatgtgtatatatatatgtgcatgggatattgagtgttacctaatgtgtaccaaggatggatggtagacatgtggtagcttacactggagacaatatgatagctggacttctgatattttccatgagtctttcacacaatgataaatattttggagttgtccccaggtgggaagcttcatggatgtcttctatctgggcgtatgtcaggggcctctctgactggtaggcgtctcactctagttatgactccattataagactgtttctccaccagggcaagtccacagtgaacagtgtgaggtgatacactgtgtcccttttagaaacacccacactctgcactctgctttcaaatttagaaggttggtaggagggcagggaaagaaacaaaagccttaaataacagaaagcatcacacacacacacacacacacacacacacacacacacacacacacacatttccttttggtatctgaataatctcagggctaaaactaaattactaagccagaacttgttgggaaatgcattcagacatcgatatccaaatctttgtcatctctttaaaccacagaatgctgataagtcaaaaaaaaaacctatcagataagaagttaaaagtatcagagatgcagttcagctccagtgcttgtaaatgcttccactgtcacactcaaacctgcactattgacctcacacgtcacccctgctgcctgattgtccaatccttgctgtgctgcctctgcatgcacacactgttgtgtgtctcctgacctcttgcacatccttaaacatctccgagaagctccctccagtgccctgaggacagggctagtggtgtttcctttagattccctgggtcttgtttttagggctgggaatgcaggtcagtatcagtgcttgcctggtacgtacaaaacctgggctctagtcaacaagtgatggaaaccttgacccctgaacatcacccccccccccatactcacacagatgcttctctgtgttcctgtctcttattttatgaagctccctctcaaggattccttcacgtgtcattggctgagctaaggtaacataatattccagagccaattgtcagcaaggggaagaaagaaggtgcctggagctaaggatgaagtcagtttacctggagcacatggccaaaataggcatagaaataggcagccaacaaccataacaaagtaccaaacccccaaaccccccaaaccagggcattttctatgtggggtgtgtgtgtgtgtgtgtgtgtgcgtgcaatatcagctcctagtgaggtgctagcaagaggaccatgagtttgagaccctgtcacaaaagaaacaaatagaactttgttaagtgaagggacagagagagagagagagataacaaagatagttttaggggacatatcacaggtagagatgctcagggattcacctacttggtttagagaaggggcagtgtcctcgctcaacacacagaggctcagctccagcacccagctgtcctgcagtctccatgtaggtgtgtgtggcttccaagtccttgcaaactccatgtggcacttgagtggatgctgtacagtattccatacaggacataaagtatgtagtctataaatctcacacccacagctgggcaggctatgcccctcatctccagggagccaccattcctacaaaagagagtcacaagggagctggagttgtgctttgtcctattgtggggcactatgggtgactacaaaagctcagaagagactgggatagctctgtattttaaaaaaccacttgctgtctgctgccatttatgattttgtctaaatattaaagccttgtccatatttctctaaccaaagccctgatagagtaacatttctgtaccatattgaatatcagtaagactcaagacacttggctgtgaaatgaggtttatagtgagacagctatagtacctgattctgagaggatgttagcatgctagcattccaagggaggaaaaggccagtcggctgctggcacagtctaacgtttctcgggataagaacgttttatactcatttctttctggctcacacacgctgcagaacatcttatacatcagtggcaggcaaatagaaaagagtgcctaatgagataagagggaatccaaatgtcagggctggtgtttctgaacgatccttggcgggagcaccccagaagctccttgctcttcctgtcctctctcctctctttgtcatagagtctcatgtagcctagtcttaccttgaactcttcatcatctctcaaagcctccatccttcaagggctgggattacacatcactacctctctgctctttcatgctctgacatggtgtagctgcctgccagacatctgctggatgacagttgtgtagaaagcccgcaaggacaggaacatcacagcatttgttgaggtcccccttctctaggacactttaaaatccctgtgatgggtgaactacatagcagacccctttcctcctgacttcaaaggagtttgcgcttagttggaaataatccaactacaagtctgcctaaagtgtttgtcttttctggaggaaaggagacgaatcatagcacagagcctctgccttaaacggttcattgtgtatccaaggtctgaaggatgcgggctgtcataggactggctcctgataccgcgcggctcacactatgtgagctgcactcaggtgagagagatctgtgtacacgggctccgggctccgatagagcgtatgtttgccaaggcgagacccaaggacctttttcaggtactgggcgctctgagagtaaatctctgtcctgggcttgtgtagagctgagggaagtcaagattcttctccccactccaggggttcagacactcaggcttgacaaagctctcatgtttcttaattgccgattgtctgagaaggaaatgccaactcctctcaaagaagtgggtggggtctcagagaccacctctgagtgagtgctgtgagagaccaaggtcacggctgtgggctgtgagcgcatgctctgggaggcggtccccttactgagtcaagatagctcctttgcttccgattttcttatttttcaatgggagtggtgttctgctgccacggtgtccagtcttctatctatctgtgatagggtgatgggcactttccttgtccagtatcttagtgtggatatgaaagcaatcccttctgctcagagttctcttcctcttgcagtaggcctgtacctctcatccactcccatgcagtcttgccagcacagcgtgtgtgagagctcgccacaccatctttgtgtcagcatccgcccagctcactgagtttgcctgcgaaaaactgtgggaggctgcgtgggagcgcctggcctctgaccagcaaggactggccagctgctgctcctgcagcctgggcgtgctagccatgatggctctgcaaaccgccaacacttgatcccttccaacacttggggtttggagcaaactagggccagaacctcttggctcatatgttaagttggatcctataaaaaggaagtgctggaagagattaactatagaaaataatttactacaggaagcttctttgagagaaaatggggagggggatgagaacttcaaaataagtgtctgtctttgatgttggaccaacatttatggagaaacaaaaggaagtgaggttgtacagggggccgttagcatacattacaatcccaagaaaggtttggaaaagttcaagggagactttacccatgattggcttcagagtggtccccagccttagtaaacccactgggcacagacattggctggatctagaatgcctctgcatgaatgtgctgatagatcatggggtgcaggagctatggccatgccaactgccctcttctcagagctgtgtattcatagctaatgtatctggtttgttgttgttgttgttgttttgtttttttctgtctgcaaatgtatcctccattcacagtgtttcttattcaagtctgagacccaagctggtacaggaccaggcaggacccctcagtttttgagaccttatgtgaccttaaccacaccaaggaacatgcatttgctgttaaggcaagaacttggctttccatacttaagaattggctatgggcagacacttcttgttcgtttcttcttgcctctttgacagcatttttcaaatctaagtagctaacctactgggagttgggaatgacattaatttaggttctatccatttagatccctgcagggtctgtcttgtgcttcttttaattttgtgtcccactagagtaaagaaaacaataatagtaccgtagttcacagcaccagttgatcagttttaggaaatgagtggacagagtgatgtccttctgtgcctcagagcatgaggtgtgagtgagctaccatctgtactatcctgggtggtttcattataagcactcagcactatgccactgttctgtggcaggtcatatactcaacaaagatcagtgtgcccatacatccggccttttatgactgtgctgacatagctgagaatacacaaaggattgatttgggttttagagacttcagcctatggctgcttggtctcctctctgtggtttgaggtgctaaagatcatggctgtataggcctacttcctagagctgcttacattgaagcagaaacagagaaccaggaaggagctgggacactggcatagttttagggaatgctcccctcccccagtgactttgatctaatcatgcctcaatgattgaacccagtagctgaggacaaactttcaatgtggacttgtttgggatacctttatgtataaaacataacacctaagtgtctcttcttgttcatgaagattgaatgcaattttttacttattgtggaagagtagattaaactgaagcatgtgtgagatttcaaagaaaattctcaaagaaatttgctaattcgattttcccctatttctcagtctaatcagttctctacaagtgatagttcttacacaaaaaaaatctcatgattttaccttctcgtctacaagctttcattcgttctcatcaccactgaactgaaagatcccaagtttcttagcacttcagagctgtccttccatccacctccctctttctctcccctttttcttccctccctctccccactctctctccttcatttctaccctccattctttccctcttcctctcctctacttcatatattctttctataccactattagatctcctaagttcctttgtattgatacattgtcctaaggaggcttttactaaagattgtgaccacagaaatatcaacatatttgcaacagaagttgtcacatatagcagcccaatacaggtgctcctgactgccagatgtccccctactcctggtttctagggacccaggctctgtctgaccagtctatctttggggcctttaatttcttcccattcagcccataaaggagagaaagaagaaagagaattcactagattattttctacccccaacctcaaagtgaaacacttcacttttgcttacatgctattgaagtggtctggccagtgacaaggcagcagagagatagtccggctgagcagccacctcctaccaatggtgtagaatagagagagcttagatccagatacactatccactgactgtgattcccactgctacccagatgtgcagcccagatcctgctcattatctcagcgctcatcaagataaggactgctgtgagccttcagctttccctccagcttcacaccatagagagcttgtctctctaaccgtgtgcttcccagacacccttgcacatgcctactgggttagagttctctgaacatggatcttcaacttaaactcaagctcatccagtcctgaaactatgtatatgtatatgtatatgtacacattcttagatctatagatatgtggaataaaatatttaatgcaaaatatctcacacaaaaaaatgaaatgctgggtaaggtggttcaccctgtaatctcagcacttaagagacagaggcaggagggtcaggaattctaggccacccgtgggctacatagtgaggctgaggccagcctggacttcatgtgactctgtttcaaaaactaaaaaattaaacaacatagacaaaaagaaaagaagagaaatgttcctagattataaaatccacaagcaaggggtaaaacctccgaaaatagaggttcaaagagtaaaatcggattatttctcccaaaacacatatgtgaacccacgttttgaatcaagggctgtttcgggtctctaaataaagctcttttcttctctgtcattaataaattcatattaaaaaggtttatagtgctcttacacccatgattgtcctagtagactttagaaacttagaagtcaaatattgatcccttatacaaagggactctgtgtcaggaaaatacatacaactacaggcaagtaaaactttaactggtaattgtgttaagaaaatgtacctgggtgcctggcaacaagtatagaatttggtagctggagaggaagctgcttgatccagtgacttcttgacattactagggagctaaagttcatctttaccttgaacctgcacccttggaccaaattcccttctggttggtccccaatactggccatgaaaatcagagaagctattgctgtgtcataccctcaggaagagagcaaagccacctttctccttgggtctgaaatataaatgaattctgtcagtgtgaaggggcgtccctgcagagccctctcctggatagcagtctattctatgttggccacagaacaaaggttctcttgaatactttgaatagaaaggggaggtggataagggagaaggaaaaaaaaacattaaaatatgttccaagtatttagtcagtaatgtccgtgacttattccaacgacacatcccaatgagtaagtatctgtgagtaaacaactctcaaaccaagaaatggccctgtgttttctcatgtcacttctataggttccaagtcaaacgtgtgcttcagtcaactatgggagacgtaggatgctttcttccagtacaatcatgtgttctttattttaggcctcataatgggactaattttgcgatatgccacagcgccgactgatattgatagtggaactgtctacaactgtgggaacttgttcttcagcccatcaactctactagtcaacatcaccgaccaagtttatgagtataagtaccagagagagatcaaccagcacaatatcagcccccaccaaggcaacgccatactggagaaggtaagggccctgtcagcccaggcagcttcatcttccctgagcaatggcatcatttagaagcctctttacataggtatacgcctaaacaccagttgctttcacattgtcacactggggcacttagttgactatataaacccagctgtcaatatttttcataacatttgggcaaagattttaatataattttccagcaagccagggctgtatttgcgttgtattaaagataaaaatctttcatcatttttcctttcttgagatgtaccccagtgtgcatatgggtgcctttagtgttgctgtacctgctacctgttggttatttgattcaaatctccttaagccaaggaggaaacagaggaaagagagctttcccatgctctaggatgggttctggatgccaatacaaggcactgccttctggctgtttataaacacaataacctacagttcannnnnnnnnnnnnnnnnnnnnnnnnnnnnnnnnnnnnnnnnnnnnnnnnnnnnnnnnnnnnnnnnnnnnnnnnnnnnnnnnnnnnnnnnnnnnnnnnnnnnnnnnnnnnnnnnnnnnnnnnnnnnnnnnnnnnnnnnnnnnnnnnnnnnnnnnnnnnnnnnnnnnnnnnnnnnnnnnnnnnnnnnnnnnnnnnnnnnnnnnnnnnnnnnnnnnnnnnnnnnnnnnnnnnnnnnnnnnnnnnnnnnnnnnnnnnnnnnnnnnnnnnnnnnnnnnnnnnnnnnnnnnnnnnnnnnnnnnnnnnnnnnnnnnnnnnnnnnnnnnnnnnnnnnnnnnnnnnnnnnnnnnnnnnnnnnnnnnnnnnnnnnnnnnnnnnnnnnnnnnnnnnnnnnnnnnnnnnnnnnnnnnnnnnnnnnnnnnnnnnnnnnnnnnnnnnnnnnnnnnnnnnnnnnnnnnnnnnnnnnnnnnnnnnnnnnnnnnnnnnnnnnnnnnnnnnnnnnnnnnnnnnnnnnnnnnnnnnnnnnnnnnnnnnnnnnnnnnnnnnnnnnnnnnnnnnnnnnnnnnnnnnnnnnnnnnnnnnnnnnnnnnnnnnnnnnnnnnnnnnnnnnnnnnnnnnnnnnnnnnnnnnnnnnnnnnnnnnnnnnnnnnnnnnnnnnnnnnnnnnnnnnnnnnnnnnnnnnnnnnnnnnnnnnnnnnnnnnnnnnnnnnnnnnnnnnnnnnnnnnnnnnnnnnnnnnnnnnnnnnnnnnnnnnnnnnnnnnnnnnnnnnnnnnnnnnnnnnnnnnnnnnnnnnnnnnnnnnnnnnnnnnnnnnnnnnnnnnnnnnnnnnnnnnnnnnnnnnnnnnnnnnnnnnnnnnnnnnnnnnnnnnnnnnnnnnnnnnnnnnnnnnnnnnnnnnnnnnnnnnnnnnnnnnnnnnnnnnnnnnnnnnnnnnnnnnnnnnnnnnnnnnnnnnnnnnnnnnnnnnnnnnnnnnnnnnnnnnnnnnnnnnnnnnnnnnnnnnnnnnnnnnnnnnnnnnnnnnnnnnnnnnnnnnnnnnnnnnnnnnnnnnnnnnnnnnnnnnnnnnnnnnnnnnnnnnnnnnnnnnnnnnnnnnnnnnnnnnnnnnnnnnnnnnnnnnnnnnnnnnnnnnnnnnnnnnnnnnnnnnnnnnnnnnnnnnnnnnnnnnnnnnnnnnnnnnnnnnnnnnnnnnnnnnnnnnnnnnnnnnnnnnnnnnnnnnnnnnnnnnnnnnnnnnnnnnnnnnnnnnnnnnnnnnnnnnnnnnnnnnnnnnnnnnnnnnnnnnnnnnnnnnnnnnnnnnnnnnnnnnnnnnnnnnnnnnnnnnnnnnnnnnnnnnnnnnnnnnnnnnnnnnnnnnnnnnnnnnnnnnnnnnnnnnnnnnnnnnnnnnnnnnnnnnnnnnnnnnnnnnnnnnnnnnnnnnnnnnnnnnnnnnnnnnnnnnnnnnnnnnnnnnnnnnnnnnnnnnnnnnnnnnnnnnnnnnnnnnnnnnnnnnnnnnnnnnnnnnnnnnnnnnnnnnnnnnnnnnnnnnnnnnnnnnnnnnnnnnnnnnnnnnnnnnnnnnnnnnnnnnnnnnnnnnnnnnnnnnnnnnnnnnnnnnnnnnnnnnnnnnnnnnnnnnnnnnnnnnnnnnnnnnnnnnnnnnnnnnnnnnnnnnnnnnnnnnnnnnnnnnnnnnnnnnnnnnnnnnnnnnnnnnnnnnnnnnnnnnnnnnnnnnnnnnnnnnnnnnnnnnnnnnnnnnnnnnnnnnnnnnnnnnnnnnnnnnnnnnnnnnnnnnnnnnnnnnnnnnnnnnnnnnnnnnnnnnnnnnnnnnnnnnnnnnnnnnnnnnnnnnnnnnnnnnnnnnnnnnnnnnnnnnnnnnnnnnnnnnnnnnnnnnnnnnnnnnnnnnnnnnnnnnnnnnnnnnnnnnnnnnnnnnnnnnnnnnnnnnnnnnnnnnnnnnnnnnnnnnnnnnnnnnnnnnnnnnnnnnnnnnnnnnnnnnnnnnnnnnnnnnnnnnnnnnnnnnnnnnnnnnnnnnnnnnnnnnnnnnnnnnnnnnnnnnnnnnnnnnnnnnnnnnnnnnnnnnnnnnnnnnnnnnnnnnnnnnnnnnnnnnnnnnnnnnnnnnnnnnnnnnnnnnnnnnnnnnnnnnnnnnnnnnnnnnnnnnnnnnnnnnnnnnnnnnnnnnnnnnnnnnnnnnnnnnnnnnnnnnnnnnnnnnnnnnnnnnnnnnnnnnnnnnnnnnnnnnnnnnnnnnnnnnnnnnnnnnnnnnnnnnnnnnnnnnnnnnnnnnnnnnnnnnnnnnnnnnnnnnnnnnnnnnnnnnnnnnnnnnnnnnnnnnnnnnnnnnnnnnnnnnnnnnnnnnnnnnnnnnnnnnnnnnnnnnnnnnnnnnnnnnnnnnnnnnnnnnnnnnnnnnnnnnnnnnnnnnnnnnnnnnnnnnnnnnnnnnnnnnnnnnnnnnnnnnnnnnnnnnnnnnnnnnnnnnnnnnnnnnnnnnnnnnnnnnnnnnnnnnnnnnnnnnnnnnnnnnnnnnnnnnnnnnnnnnnnnnnnnnnnnnnnnnnnnnnnnnnnnnnnnnnnnnnnnnnnnnnnnnnnnnnnnnnnnnnnnnnnnnnnnnnnnnnnnnnnnnnnnnnnnnnnnnnnnnnnnnnnnnnnnnnnnnnnnnnnnnnnnnnnnnnnnnnnnnnnnnnnnnnnnnnnnnnnnnnnnnnnnnnnnnnnnnnnnnnnnnnnnnnnnnnnnnnnnnnnnnnnnnnnnnnnnnnnnnnnnnnnnnnnnnnnnnnnnnnnnnnnnnnnnnnnnnnnnnnnnnnnnnnnnnnnnnnnnnnnnnnnnnnnnnnnnnnnnnnnnnnnnnnnnnnnnnnnnnnnnnnnnnnnnnnnnnnnnnnnnnnnnnnnnnnnnnnnnnnnnnnnnnnnnnnnnnnnnnnnnnnnnnnnnnnnnnnnnnnnnnnnnnnnnnnnnnnnnnnnnnnnnnnnnnnnnnnnnnnnnnnnnnnnnnnnnnnnnnnnnnnnnnnnnnnnnnnnnnnnnnnnnnnnnnnnnnnnnnnnnnnnnnnnnnnnnnnnnnnnnnnnnnnnnnnnnnnnnnnnnnnnnnnnnnnnnnnnnnnnnnnnnnnnnnnnnnnnnnnnnnnnnnnnnnnnnnnnnnnnnnnnnnnnnnnnnnnnnnnnnnnnnnnnnnnnnnnnnnnnnnnnnnnnnnnnnnnnnnnnnnnnnnnnnnnnnnnnnnnnnnnnnnnnnnnnnnnnnnnnnnnnnnnnnnnnnnnnnnnnnnnnnnnnnnnnnnnnnnnnnnnnnnnnnnnnnnnnnnnnnnnnnnnnnnnnnnnnnnnnnnnnnnnnnnnnnnnnnnnnnnnnnnnnnnnnnnnnnnnnnnnnnnnnnnnnnnnnnnnnnnnnnnnnnnnnnnnnnnnnnnnnnnnnnnnnnnnnnnnnnnnnnnnnnnnnnnnnnnnnnnnnnnnnnnnnnnnnnnnnnnnnnnnnnnnnnnnnnnnnnnnnnnnnnnnnnnnnnnnnnnnnnnnnnnnnnnnnnnnnnnnnnnnnnnnnnnnnnnnnnnnnnnnnnnnnnnnnnnnnnnnnnnnnnnnnnnnnnnnnnnnnnnnnnnnnnnnnnnnnnnnnnnnnnnnnnnnnnnnnnnnnnnnnnnnnnnnnnnnnnnnnnnnnnnnnnnnnnnnnnnnnnnnnnnnnnnnnnnnnnnnnnnnnnnnnnnnnnnnnnnnnnnnnnnnnnnnnnnnnnnnnnnnnnnnnnnnnnnnnnnnnnnnnnnnnnnnnnnnnnnnnnnnnnnnnnnnnnnnnnnnnnnnnnnnnnnnnnnnnnnnnnnnnnnnnnnnnnnnnnnnnnnnnnnnnnnnnnnnnnnnnnnnnnnnnnnnnnnnnnnnnnnnnnnnnnnnnnnnnnnnnnnnnnnnnnnnnnnnnnnnnnnnnnnnnnnnnnnnnnnnnnnnnnnnnnnnnnnnnnnnnnnnnnnnnnnnnnnnnnnnnnnnnnnnnnnnnnnnnnnnnnnnnnnnnnnnnnnnnnnnnnnnnnnnnnnnnnnnnnnnnnnnnnnnnnnnnnnnnnnnnnnnnnnnnnnnnnnnnnnnnnnnnnnnnnnnnnnnnnnnnnnnnnnnnnnnnnnnnnnnnnnnnnnnnnnnnnnnnnnnnnnnnnnnnnnnnnnnnnnnnnnnnnnnnnnnnnnnnnnnnnnnnnnnnnnnnnnnnnnnnnnnnnnnnnnnnnnnnnnnnnnnnnnnnnnnnnnnnnnnnnnnnnnnnnnnnnnnnnnnnnnnnnnnnnnnnnnnnnnnnnnnnnnnnnnnnnnnnnnnnnnnnnnnnnnnnnnnnnnnnnnnnnnnnnnnnnnnnnnnnnnnnnnnnnnnnnnnnnnnnnnnnnnnnnnnnnnnnnnnnnnnnnnnnnnnnnnnnnnnnnnnnnnnnnnnnnnnnnnnnnnnnnnnnnnnnnnnnnnnnnnnnnnnnnnnnnnnnnnnnnnnnnnnnnnnnnnnnnnnnnnnnnnnnnnnnnnnnnnnnnnnnnnnnnnnnnnnnnnnnnnnnnnnnnnnnnnnnnnnnnnnnnnnnnnnnnnnnnnnnnnnnnnnnnnnnnnnnnnnnnnnnnnnnnnnnnnnnnnnnnnnnnnnnnnnnnnnnnnnnnnnnnnnnnnnnnnnnnnnnnnnnnnnnnnnnnnnnnnnnnnnnnnnnnnnnnnnnnnnnnnnnnnnnnnnnnnnnnnnnnnnnnnnnnnnnnnnnnnnnnnnnnnnnnnnnnnnnnnnnnnnnnnnnnnnnnnnnnnnnnnnnnnnnnnnnnnnnnnnnnnnnnnnnnnnnnnnnnnnnnnnnnnnnnnnnnnnnnnnnnnnnnnnnnnnnnnnnnnnnnnnnnnnnnnnnnnnnnnnnnnnnnnnnnnnnnnnnnnnnnnnnnnnnnnnnnnnnnnnnnnnnnnnnnnnnnnnnnnnnnnnnnnnnnnnnnnnnnnnnnnnnnnnnnnnnnnnnnnnnnnnnnnnnnnnnnnnnnnnnnnnnnnnnnnnnnnnnnnnnnnnnnnnnnnnnnnnnnnnnnnnnnnnnnnnnnnnnnnnnnnnnnnnnnnnnnnnnnnnnnnnnnnnnnnnnnnnnnnnnnnnnnnnnnnnnnnnnnnnnnnnnnnnnnnnnnnnnnnnnnnnnnnnnnnnnnnnnnnnnnnnnnnnnnnnnnnnnnnnnnnnnnnnnnnnnnnnnnnnnnnnnnnnnnnnnnnnnnnnnnnnnnnnnnnnnnnnnnnnnnnnnnnnnnnnnnnnnnnnnnnnnnnnnnnnnnnnnnnnnnnnnnnnnnnnnnnnnnnnnnnnnnnnnnnnnnnnnnnnnnnnnnnnnnnnnnnnnnnnnnnnnnnnnnnnnnnnnnnnnnnnnnnnnnnnnnnnnnnnnnnnnnnnnnnnnnnnnnnnnnnnnnnnnnnnnnnnnnnnnnnnnnnnnnnnnnnnnnnnnnnnnnnnnnnnnnnnnnnnnnnnnnnnnnnnnnnnnnnnnnnnnnnnnnnnnnnnnnnnnnnnnnnnnnnnnnnnnnnnnnnnnnnnnnnnnnnnnnnnnnnnnnnnnnnnnnnnnnnnnnnnnnnnnnnnnnnnnnnnnnnnnnnnnnnnnnnnnnnnnnnnnnnnnnnnnnnnnnnnnnnnnnnnnnnnnnnnnnnnnnnnnnnnnnnnnnnnnnnnnnnnnnnnnnnnnnnnnnnnnnnnnnnnnnnnnnnnnnnnnnnnnnnnnnnnnnnnnnnnnnnnnnnnnnnnnnnnnnnnnnnnnnnnnnnnnnnnnnnnnnnnnnnnnnnnnnnnnnnnnnnnnnnnnnnnnnnnnnnnnnnnnnnnnnnnnnnnnnnnnnnnnnnnnnnnnnnnnnnnnnnnnnnnnnnnnnnnnnnnnnnnnnnnnnnnnnnnnnnnnnnnnnnnnnnnnnnnnnnnnnnnnnnnnnnnnnnnnnnnnnnnnnnnnnnnnnnnnnnnnnnnnnnnnnnnnnnnnnnnnnnnnnnnnnnnnnnnnnnnnnnnnnnnnnnnnnnnnnnnnnnnnnnnnnnnnnnnnnnnnnnnnnnnnnnnnnnnnnnnnnnnnnnnnnnnnnnnnnnnnnnnnnnnnnnnnnnnnnnnnnnnnnnnnnnnnnnnnnnnnnnnnnnnnnnnnnnnnnnnnnnnnnnnnnnnnnnnnnnnnnnnnnnnnnnnnnnnnnnnnnnnnnnnnnnnnnnnnnnnnnnnnnnnnnnnnnnnnnnnnnnnnnnnnnnnnnnnnnnnnnnnnnnnnnnnnnnnnnnnnnnnnnnncaggcttttaccgtgtgacattcttgcacagaggccagggccagagctcttctggcaataggaacagtttgatcaggcaaagtcaggagataaatatgtgcagttaacagtggggcactcttgggaaggatacaggaaggctggggggatgatctcctcctgtaaagcttttctagacacgctgggagggagagccccagggtgattaatcgccataagggcttggagacgctttggcaggctactcacggtgcagtaggttttatccatccttcacattctacagaaacaagctgcggtgattcctgtctctctatcttgaccagtcttggcataagaggaccccagtgcggctcaagcttgcagagaggaccctgaggctgcctggacactaagctgctttcatttaacccttagtgaagagaacacttgttataaagaaggaagtttatttacaaaatttataacttgtaaattgtaataaagaagcagtcccactgggttggtctgaggtgagggcagcagatggtatcacttcacagtggcacaacgttcaggaaaagatggtcacatctcaaacaggagtagaggggtggtgggcgtgcatttgaccaggttttcttcttcctgtaacagacatttctaaagaacttgagggggttgcatgagcagcaccccagaacctagaatccactgttccactttccacaggatccacattctgtggaagtgaccctggggagcaaccttctctcacaatgtgaccatacccaagccatagcagtaaacacaaactcagtaaaatgccccatgcacctacattaatcctatttgtttacaaattccatgcattataacacatgtacatacatacattataacacatatataaaagtaaaaactttcaaggattagccaaaagcaaaatatgaaatctcttctgctttctactactctgtagaacatgggacacctcactttaaggatcagcaatgccacttattttatgagaactgttgttactttaaccagttctgtcttggtccattccaggccttggcaatggaacataagcagataaccagataagataacttataaatggaggtaaacttaactcatcgttaagttaaggttggaaaccaaagctcaaggcacccacctagtgcaagctcctcctacagtgtcagcataaaagccatcaggaggtagaagcaggaggaagggataagggaccacaactcatccatcttcctggaacacacttgttagggtttgaatctagaacggtccctcagagggtcacctttggaatatatagtccctaactcctgtctttatcctgaaggctgaggagactttatgagggcagggcctggcgtgtggaaatggtccaattccagactgctttttaactgcatcttcatgtgcacacactctgctacatcccatccatgccttccactccatgatggggtgaaacctcttagcagccacagtggaaccttcttctcttagtaggctattgtaacatagatatagaaaacaaccagtgcaacgctctatactaatccactcctgagaacaaagccaatccattcttcaggccgagccctcatggcccaaggtctcttaaaggccccacctagccatgcagttgtattgggaattaaatttctaactcaaaactctggctgacatgggtgacatatgaaaaccagagcaacttttttagaagttcttttgaaatatatggtatgatgtggagacagagtcaggggatcttggcctggtatggnnnnnnnnnnnnnnnnnnnnatcaaccagcacaatatcagcccccaccaaggcaacgccatactggagaaggtaagggccctgtcagcccaggcagcttcatcttccctgagcaatggcatcatttagaagcctctttacataggtatacgcctaaacaccagttgctttcacattgtcacactggggcacttagttgactatataaacccagctgtcaatatttttcataacatttgggcaaagattttaatataattttccagcaagccagggctgtatttgcgttgtattaaagataaaaatctttcatcatttttcctttcttgagatgtaccccagtgtgcatatgggtgcctttagtgttgctgtacctgctacctgttggttatttgattcaaatctccttaagccaaggaggaaacagaggaaggagagctttcccatgctctaggatgggttctggatgccaataaaaggcactgccttctggctgtttataaacacaataacctacagttcacccgagagatcttcaccatggtggcttggctaaggaatttaagttaaattttgcaaatgattcatattttaaaaactaacttcagacttggatgtagttcagtgatagaacacttgtctggggtgtgtgaagctctgggcccaattcccagtcacatacacacacacacacacacacacacacacacacacacacccctctttaagagatgagcatgtttttcccagttttcagaggttaaaaagaggtaggggatggatttggttttctatttctctttttcaatatgactgatttacagtcttttttcttcattgtcttctgctagtatatttctagattaattatgtgaaaggacttcttagggctcagcaaagtcaagttataatattaagccagatcgcacttagctaggagaatagctttgtgcacacagcaaggaagctaaataatacccttctgtaataaatggagcaacttccaggtcttatgtttcaaatgatctcagtcatgtgattctctttatccatggggataaatagaaaattatttatcaaaaataattttacatactgtgttaacaatacagtatattaattttaaaacacatttcagttttatttgcttacttattttgagccaaggtctccccctgcaccctaatgttccaagatttctctatgtagcctaggataccttgaactcacaatccaccctagcctcccgaggactagtaggctcactagcatatagcagcacacctgggcagttttacacttggcatttccgggatataaattacttctctcctgttcccacccaattttgtctgtatttctacacagcagtactctagacagcttgattctccaaggatgccagaattatttctgttgccatagcaattttgttctctaacaatgactgcctgtaaatacctgcccaggaattttggtagtgtgctctgatatagtaatttctttatcagcagccacaaccaagtgtttgctgttgaaaacttggagcaacagatgaaaatattttttccagtggtcagattaaggtggttttaaatattgcatagctcaaacatcttctacataaacttcttagtcatgaacccttgagtcagggtcagtatttggcatttctagagcctagggtttgtagtcggtgactctgtgcccagggcaaatattctcctctctgctggtggagaacaggacatctgccagagtccttactttaagagatgactttaaggggacgggagcttgctcttaaataattgggagtataacttactttatgtttgttgctcatgtgacaatatgagcagaccctattgggtatgtagaaatgtagagctgttggcttcgcttccatttgggttctctactgcatgcatatgtttatatcgatcggttactttgttagatgaaaagagacccccataaaaggatccattcatagaaggcttatacagaagttacatgggtcacatgctttgtcatttctcctaggtctacttaaattgctatagtccccagttttctttttaaaaaaatattctagaggcatatctattttattttctgagttttgctttcatatatgtatgtgcactacatgaatgcctagtgttgcagagatcagaagagggggggggtaatattctctggaactggagttactgatagttgtaagcttccatagaggagcaacagctgcccttaactgcagataaatccccttagatcattacagtttgttttttaaatgctacataaaaacagaaaattgcactatcagtggggtaccatgtgatgttttcatatacatgtacattgcataatacacttaaataatgctaaatattcccatcatctcaaacattttctatatcttcatgacagaaataaccacaaccctgtttctagctgattaaactgtgcagtaggtatgttactgctatctgtaactatcccatagaaggagccaaagcacaacagacattcttttaaaaaacctaactatgtggatagggatgcagatggggatatgtttgtgtatgtgagcataagtgcccttgaaagttaaaggtcacaggagctagatgcccctaaagctggagttacggctgtgagccacctgacatgggtgctaagaaccaaactcaggtcttccaaaagaccagtaatgctcttaaccactgagtcaccgcccccccaaaccccccaccccaagaaattcttaatcctgtcttacctgtggtgatcagtgttcattgtcagcttcacagaatttggaatcacctaggatatgagcctctaggccagtagttctcaacttgtgggttccaacctcattggcaaacttctatctcaaaaaatatttataccatgattctaacagcagcagaattgcaattctgaagtagcagcatgaaatgctgatcaaagtgattttaggactggtgggtgggggttgccataacatgaggaactgtattaaggggtcacatataacctgcatataaccactgctttatgcacaccctgagggatgatttcatccttgggtatgactctgaggggttgatgacattaattgaggagggaagatctattcttcctggtcttgggtcccagaccatacaaaaggagaaaaaggcaactgagcatccatgctgtctgtttcttgactgtggacacaatgtaaccagttgttcctgctgccatgacctccccactgtgatggactgtcactttgaactgtagccagaatacatcacctttaagctactctcattagcatattctatcatagtgacaggaagagaaactaagtagctctcactgatcaacctccccctgttgctttctatccctctactctccgaagtttttggtagggcctgttctatcctcacctctatgaggtcaactcttacttttaagtggagagactgagacatgtctgtaggattgttttattttaaatgagatttttataccgaaagcaccagctaatactgcttccactgttcccagtgctctcactgctattgacaaggcagggccacactgccaacatctctgccatgcttacttcctccaacaacagtgctacaccggtactgaaacatctggatgcttagtacgtgtcagggttagtaaaccatgaggctgttttattgatacattcaacatcccttgggagagatataatacccaaagttagcaagctttgcagtcacagcaatgatagagaccatgcctctattgcccagtgtatccttaaagcctgccatggtgctcatgctaaataaatacctagtgatcaagtaaagaaatgaataattgaataaatccaaatatttaccaatatgtacatatctgaagaaaaattgcaatgtttgaaagttatcatcctggatttgatagagttgtggtttcttggatactaaatgttttaaaactgtttttattggttattttatttatttatatttgaaatgttatcccaccttcgcagtttgcccttcacaaatcccctatcccatccccctctccctgcttctatgagggggctcccccacccacccacccacccattcctgcctcaccaccctaatattcccctacactggggcattgagccttcacaggaccaaggacttttttttccattgatgccagataaggcaatcctctgctacatatgtggctggagccatgggtctccccatgtgtattttttgattggtggtttagtccctgggagttttagaggatctggttggttgatattgtttttcttcctatggggttgcaaaccccttcagctccttcattccttcccctaactcctccattggggactccgtactcagtctgatggttggctgtgagcatcctcatctgtattggtcaggctctggcagaccttctcaggggacagctataccaggcttctgtcagcatgcacttcttggcatcagcaatagcgtctgggtttggtgtctgcatataggatgaatccccaggtagggcagtctctggttggcctttccttcagaaccccttgtgttgtacatatgaagatataaaaataattcgtacccacagatattatacaatgggccagactctggtgctggtgggaagaagctacaccaggactcagcccttgatcctgagtcctgaccacttataccacacactggccaggctctccaaagggctcataaagaaggggctgaggcccaaggaattttagcttctcaggcagcaggaggtgggcagttctgggaagagttcaggagaagtcccacagagtcgggcactgaagccatcacagagctcctctggatcgccttccttcttggcgtgtgctgagtgagtattcagccttggtttgtacacattaggacttgatagtcaggtttactctgagaagaattgagttgaagcctagatggaatcccaaggatttggggagtctggaaggaattcccatgtagtgccaccacctcttagaaggttttcaaaaagcaggtgcatttctggggtggttagaccttggtggtacttggaaacagagcacagctctgtcccttcatgaactccttccaataggaaaggataaagctggaaaattgagaactactggcatttagagcagcagcggtatactgtgtgcttcttctgaaggtagacttcaggaagtaccatatgctaagcccgttctcttcatgcacaacacaggtaaaatgtaggatagaaaatggttatctgccaagtgaaaccagtgctgcctatgtcatgagaaaggcgcactcaaagcagctggctgctgctgtcctgtcctgcactgtaatgtttgattctcaacaccatttgctaaagttcttctgtggatccaaagtatctttaattttaacctttggagccaatattattatgttatgttatgttatgttatgttatgttatgttatattatattatattatggcttcacaaatgtgaatttgttccagatatttaggactaaacaaacattcttcactttcatataaataggaagtttaaattttttcttttgaagaggaaatggaaatttgaaaagtaaaaacaaataaacaaccagtaaaaacaacaaacaaacaacctaaacatcaggggtggggatgtagtttggtgatgaagagcttgcccatcatgtgaaagccccagatctgacccaagcaaccagcaacaacccttgtctattgctaatgtttctttcatttattctctgtcttcaatggactgagtctccacaattacacttccgaaatagacataatttctaggagggtacttactagtaagccggaggaaaatagtaccagaataacaccgtaatgctaaagtgcaggtgccaaaggtttgtacagacccccaggcactcagaagtgctgctgtcctgtggtggcagggctgtcagggaggcttacaaagaagcatcctgatggactctagatgcaactgtgggagaggatggggtgagggtgggaagacatcccagtcagagggagggccacggtatacaagtgagaaaagcaataaatatcccaggaaacgaagcatcttctattttttggatgtatggaagaccagaaaactgagggcagattcgactatgggagccactgaacaccaggttggccttgttcacgctagtcagcagagaagggggatgttaacaaaggcaaaggcttagtttggctgcagcaggcaggaaataaagcaaaagcagagacagcacttgggtggaaacccaggggcaggtggagaggaaggacaggtgggggtcggaaggaggggaggagctacttggtattcccctgtgagttcataggaaaggggatgggaaaaatggagaaggagttggattataggggaaactcacagttttaacacatctcatcatgaatatgttcatgtgtgttctagcacgttatatatttacactgctgagctgcaagggcgggtagtgcattgaactgggatgtcgggtggatcgagtcccgtttcaaaagttgtcagcactgttaaatttatcacttctaccccccataaatcagatgactgcagtgaaccgacaaaggaagctcctccgtgaaaattctgctaagtctccacttcctgtttgaaaagtgacactgtcagttgcttaagggaagtggtttggggttctgtatactgctgagtaaaaaatgtgctattgtttcaaaaaaagggaatctgatcccctcccagtaggtcacagagctactatgtgactaagacttgtaagaatgttaaaaacaaacaagcaaacaagacttacagacacagctaactatatgcctttaattgggctcttccctttaagggaatcagttaattaagtctgcttttctcactgtccatatttcccttttgattcttacatgtttatctatctttgagccttccaggcttttaccgtgtgacattcttgcacagaggccagggccagagctcttctggcaataggaacagtttgatcaggcaaagtcaggagataaatatgtgcagttaacagtggggcactcttgggaaggatacaggaaggctggggggacgatctcctcctgtaaagcttttctagacacgctgggagggagagccccagggtgattaatcgccataagggcttggagacgctttggcaggctactcacggtgtagtaggttttatccatccttcacattctacagaaacaagctgcggtgattcctgtctctctatcttgaccagtcttggcataagaggaccccagtgcagctcaagcttgcagagaggaccctgaggctgcctggacactaaggggctttcatttaacccttagttaagagaacacttgttataaagaaggaagtttacttacaaaatttataacttgtaaattgtaataaagaagcagtcccactgggttggtctgaggtgagggcagcagatggtatcacttcacagtggcacaacgttcaggaaaagatggtcacatctcaaacaggagcagaggggtggtgggcattcatttgaccaggctttcctcttcccgtaacagacatttctaaagaacttgagggggttgcatgagcagcaccccagaacctagaatccactgttccactttccacaggatccacattctgtggaagtgaccctggggagcaaccttctctcacaatgtgaccatacccaagccatagcagtaaacacaaactcagtaaaatgccccatgcacctacttcaatcctatttgtttacaaattccatgcaaacaatgccatacattataacacatatataaaagtaaaaaatttcaaggattagccgaaagcaaaatatgaaatctcttctcctttctactactctgtagagcatgggacacctcactttaaggatcagcaatgccacttattttatgagaactgttgttaccttaaccagttctgtcttggtccattccaggccttggcaatggaacataagcagataaccatatacgataacataaatggaggtaaacttaactcatcgttctgaaggttggaaaccaaagctcaaggcacccacctagtgtgagctcctcctacagtgtcagcatgaaagccatcaagaggtagaagcaggaggaagggataagggaccacaactcatccatcttcctggaacacacttgttagggtttgaatctagaacggtccctcagagggtcacctttggagtatatagtccctaactcctgtctatcctgaaggctgaggagactttatgaagccagggcctggcgtgtggaaatggtccaatcctnnnnnnnnnnnnnnnnnnnnaaacaaccagtgcaacgctctatagtaatccactcctgagaacaaagccaatccattcttcaggccaagccctcatggtccaaggtctcttaaaggccccacctagccatgcagttgtattgggaattaaatttctaactcaaaactctggctgacatgggtgacatatgaaaaccagagcaactttttcagaagttcttttgaaatctatggtatggtgtggagacagagtcgggggatcttggcctggtatgggatgttcttaggagcagataaacctttggggaatacaaaatcaagttcttttgtgtcacaagcacacagtctcaggcccactgttcattctccccttatatttagtagtcttataagttttaatctgtgatgctttggttaatgtccctcatctccaaacttgcaaagcctccaggaagtcagggcctaggtctgctttctgtcacaccatgctcccagtgtctgtcacacggtggatactctgtagatcttgctttctgtcactccatgctcccagtggctgtcacatggtggatactctgtagatcttgctttctgtcacaccatgctcccagtgtctgtcacacggtggatactctgtagatcttgctttctgtcacaccatgctcccagtgtctgtcacatggtggatactctgtagatcttggcccatgaatagatggtgcaggaaggtatctgtcagtttctgtctgagtggttatctgtcgctgccacagtgtgctgtcttaactgctgactatttttgtaatgaaagtgtgacataggtttatcctcggggtaaaacacacaagctccgaaaggggttttgctactcaaaggattggacaagtctctcctctgaacattctgacaggtaaatgggaggcagagaggttgatgagaaggtggagaatagggtagaccctgaaggagcaggggaggaaggaggctacccattacaggctgagcccccgtagatgaagttgaaaatggatctttcacccaccaactctgcttttggtttgctccttcaaaagcacaaaactgacagagctgcactgtcaccatggccggtccccagggagcacttacataaagctctgtcccatggcactcaccactgtcctccacaggccacctgcgagctcctcagcagctggggtagcagacacagagccggccgaactgaaggacgctggtcaggcagctggctcgtcttaagctgggacagaagggacactctactgctccttgcatataattttcttttctgggaaaattattatgattctgattattattactactattggtattgggatagcacccagaggctcattcatgctaagcaagtgttctgcccctgagctccatcctggtgcctctcaggtcatttcttatcacaaggcccactaggccctgatggatgcagttctgcctcaggctgagcttgataccacaagtcaggttaatcttgccttcctttctgcctgttgttattgagctcccagagaagcagaggcccaagcagaggcaacaattggtgatcagggcatcagtgcctcgggattgcacttctgatggctgagagtagaagggtgtgagaggggaaacaggctgaggatttggtttgtctgctttggaagctgtgattctgcagtgagcagggactcagagccagcctcatctcaaccatgcagccccaccccaaaggaccaaactgttgtggaaaatacttaatcccagtcaggagctgctaccacctttgattatccaatttaaccccaaactattacttagtatgtttcatctgagctgctctcaactccaactggccagcccacgtggtcatgctttcttgactcctaacccatccttccttctcaccttcctctctcccacctcattgtctcctccaatcaaacccaagtccaggaacccaagactctgactatctctattctgcccagctattggctgcaggtatctttattcaccaatcagagatgacttgggtacatagcatcacttgggtctaactgtggactctctctcatctctggggcaaccaggcctcggggagcccacagttagtattacaatacatagcaacagaccaaacctcaacaccaaaccttattctgtgtctggataggagatgttctggatagggtgtgaccctgggagaagtggctctgtcgccttggcagccattgaatagacttatcacatccctggcagcaggaacagcaaggtcttcaccagagagatctctaatctagatgacacttcacagtgtcagattttatgtccctaaaccacacctgtcagttactgcagagtgggactccggggtctcagtgggaaagcatccgtctcccagctccggtgagctgattggtcagtacatttttcggatctggtgagccaactgttaaatttgacagcatgaaatgggccacaagagaaatatttatgccatatatattagaaaatgttttaaaccaagcttataagattgtattccctcaggagagacgatttgccaacagagaagatttgcttaagcaaatgtatttttaggataattggaagtatccaaacatctcagtttttatctccctgaaatgcccgtctctcacaatggctgccgtagagaccctccagtaggtagagcttcacatcctctaatatgacaagggaaagtgcattatgccttccagtgagacccaggactgaacctcattttgcccctcccaggagcaggactttaagcttcatttctccgagcaaaattttccttatctgtaatgtaggggttagtaatagctatggcggaggtttgcttttcaaagcaaatacgaaaatacatgtctcgtatcagacatattgtaaatattagtctgctttcattccctaacactgtgacatttgcccttgccggcacttgcttgccctagactgagaggtctgaggtgggccgatggaggaagttaggtgctccttgtttcctgcacgatgttgaaggcaaacacaccatgtaaatatgtattgcctcattttcatcatactttctgctgatgtcagcgtgcactccttcccctcccgccccctccagcctgcctgctctgaccctgccttttgctgactcagtccctcccagttcagcttccccaggccagttgctccctggtgagatcttatgatagggaagctgtatacacaattcatagctgagcctgctaaggataaggcaaactcaaaacagttgccaggcttacagagaaactgtggggctgagattcccctgtgtctggagtaatagaagcacagtgtcattggcctgaggcatcaaggttggccaagagtaagatcaactccagactcgagaaaacgcagtcactcttgttgggagactgtgttgggtgcataggtcctgaggaatgtcactttggagagatggaagagtaggtccttctcttgtccagcggctctttactctattgtccatcctgtggcagtcttagagttgatttgtcctgtcaccccaaaaccacagactgtgaggcatggccggccaccaccccatgaagagatcagaagcagtctgaccagcataaagttggttaaaaggtgagaagtcttggcatctggggtcaggtggaagcagctgctgcatttgcctcacagggtggaacctgagagtgaagggagaggctacattcgattaggggagggcaagaggtattatgtgtagccaggccatccaggtctccttagtaaagagtcatataggtgtgtgagaccaagaaacttaagcaaaaaacgggagcctgtccaggcaacaggtttggtactacaatgatgatgtggcacacctgctgcatggcaggagatgagagacacatgtagcagctgactgggtgacctcagtctacctcggtgtgcagaagagacaccgtgactgagaggccattccctgagctctatagcttggttcaaatgttactttacatctatatgactttaggaattctaggtaacctccttaagtccaatcttcccatttaaaaaaatccagatatttctcattacagtgcagggccatcatgttgcaaataagaaaacacgtgcaaaggacttaaaataacatttgggcctttgtaggagctctctgtgttgacctatttattcttctaccaaagtcacttttgctgtcaataaactagttaagagctgtagctggagtctagaccatgttgcttaccaggcatgtgactttgggtaaatcccataccagggcttttgttcacatctatacaaacaaggcatttcacaatatttaactgcaaaggttgttgggaagtatcttatctctatatttacaatttgtcagtgcatcataataattaagaatatgacaaattatatttccatgatgttatttagcttttagacttcctttacatgtagcaactcagttttttcccccctgtggtatgttgaatagatttattgcctataaagggaaacatttaattgtggaaggcttacagtttcagaggtttagtctattatcatcatcataacaggaagcatggtagcatgcaggcagatgtggtgctggagccgagagtcctatatcttgatccaaaggcagctgaatgagactagattgcacactgggcagagctcagacatttatgaaacctcaaagccccatccccacagtgacataccatgacagtggcaatttactggaggtggagcaacatactgcaggaggaaaaactgagtttctacatgtaaaggaagttcgaaaataaaaaaataacatcttagccaggtgtggtggcgcacgcctttaatcctagcactcgggaggcagaagcaggtggatttctgagttcgaggccagcttgatctacaaagtgagttccaggacagccagggctatacagagaaaccctgtctcaaaaacaacaacaacaaaaatcttggaaacataatttgtcatatttgctaattattatgatgaactgatatctatctatctatctatctatctaacctcttctttgctgttctagtttgattgtaatgtgtataatttttattatttatttgtgatacaaattttattacatttttgctaaaacttcctgataatatcataaaatgtccattttggatagactgaaaaattttgaaaggaaaaaatccaaataattctacaattataaaccaccatggaaatgtctagatatctggactatattactatatgtatatttatagggagtttaggcagactctaaaactttgcaccttcctatttttacttaatcttacaccttttctcagatatttaaaaactccagtgtagtggaagagacttgtgtttgatatttgtgttccttttaaactgtcactcatatgagggacattttagtgaagagcatctctttaaaactttccctacattctgaagcactaagtgggccatctttctgatagcaggcataaaatatttattgaaataaatgcctcctgtatctttggaaaagcattaggcagtagccacaaagccaacagtaatcattgggggaaaggatgaactacttaaaaccaggtccttccctgggacaattgcagaaagaaaatgagtgagtacctatttcatatcaataacatacatatttcatatgaatcaaagtactaattgtacaataaaaatacaaaaacggtgaaattgaggagaaaatatagttgcaatatggaaaaaataaaacaatcactataactcaaataatataaaaaatgcacaaatttcacattatagttatgagactgtcaacaatgttaaaaacacaaaccattgaaggggataatagaactagaagaatgtatttgaaatataagatacaaaacagaattgtaacctgattctgggaattaacaagtcaataaggaaaactaaactggatgaccaggaatgtcccgtaaaagatatgatcaaaggccagcaagcaaaataaatatacttatttcattagtaataggaaacaaagctaatgatgcgatgtttagtatcaatcagattgccaacaaattaggaaattatcaatacaaagtgttggctagaatataagaaaataatctaagaatcccctgtgtaagtataagtgggtgtggccatagcagcatctgtagagatagtctgtgtcatttactgtttagcagtccacttctagaaaggcttttaagactgcacaaaggcttaagcacaaggatttctacctcagtattttgtgttggtggaagatagaaatcaacccaactatcagagaacaaaattcccagatcctgatccagtcatccaataggatgttccaagacagtttcaacactagccaagatccacatgctcattaatatggataattgatgtcaaaattgatttcaaaagtagacactgggattcaaatggatctttactgaattcctacaatgtagaaaatgcacgctactgataattgtttactaaaacatatttcaaaatgaaagaatgtgtccgagaaggggaggacactgactgtcctgtctgacttgcttcctggttgagatgaagatggacttcaaccaaacacacatcacttacattttccagatgtaagctgggtgggttacatgcctgccagcacttagtagtttgacataggtggattgctacaaatttgagatcaacctggcttacatagcaaataccaaattccccaggactgcatagccctatctaaaagatcaccatccccataaaaagaatcctgaagaagaattaagaccagaaataaaataaagaatggttgtagcttaggattttccagccctgtgctgcccccaagtgatcaggacttgacatgtatgccttggctgccccaggttttacactcaataaaagcctaagacagccttacagagtgtagtacatgtgaaggcaagctgctcaggcaggaagggaagctgatctagggtaggaagggaagctgaaccctggcaggagatgagcaggcacagggtaaactcccactcccattgcctcccataaaatgatgtagctcctctaaaaatgcctgcctctgaccgttctgtatgtaaagcacctccttactctgacaagtgaccaatacatttaagatttaagggctctgcataaaaatctgaagaaacgtaagagtgttttctgcatgaataatcatcccttagtgtggccaagccacagtcgagatgtcccgattgaaaggcagtcgttatcactgacgtgctccaatgcctggaccacttaattttctcctgaagctctgtcaatctcttaactttgcttcactcccctgttcagcctccatttttctccctctttcctgcttgccatctttgtccctttattttcctccccttcacccctcctttatatctagtccctacttgccaggtccctaaagacacccactcccaggagagaggggcctggagcccactgtgcctgctttctcagcacatacttcttctataacccctgtccccacttctccactgaaggcaaacgaaaaggatcagcagtgcctccaaaccatggctgctgctccaggaaccagcatctgggtagggtggggcaggttggtcccttcccagcccatctcgggagatctcgagagatcagtcataagcaaaacacagctcattttggaggtttgcattcttgtccctgtctgaagtgattgaatttcacatagacggtgactaactgggaaaaatgtgtcccagatgtggtgctcagaaattattctgagaacaaggttatgtacacaaagctccagcctccctgtgcatctgtcactgatgctggcacctgcatccagcagcagcaacgttctgtaattctttattgggctcttctgcagctgagctctttgtctgcctctcagtcatctctgtctctgtgtttctgtgtctgtctgtctctccctctagctatctttccttcggcctgtatctctgtctctgtgtttcagtcagtctttttctctgactgtccctctatgtttccttctgtctctctcttctctgtctctgtcagtctctgactgtctctgttcatctctccctgtctgtctgtctctctctcattctgtctctgtatttctgtcagtctctgtctctctctctcttaccgtctcctgtcccctactaacccctatcccagccttgtcctctacctgtttcctccctctgtctgtcagtctctgtctctctctcctctcactgtctccccccacccccatagcccccgccttaagccccatcccagccttgtcctctacccgtttttcccatgacacttactccccagagaccctgctgcacggatgattctggagtgtttctccttggctctgacctttccatcaagtacacaactccaagtgttgcagacagccgggctcagtgagccagggcccaggaggcctgaggggtcctgaccttcccacccccaccgagtcagccgcttcacagccacactggctgtcactcaaccaggtgtaaaaacataggtctcttctttttttctttcatttttacctctctatttcaaccttaagccccactaatcctctctgccatctgcccagtttattttaagcaaatccttgttgagtgaagtgctgtctgtctcattctgtcagagccacctcctttagcaccaaccgtcccttgagctggctttagtaactgcaacccgacaatgttttccttttacacagctcaacttcgatgtctctgcaaactaatctcaagggacttacctttttaaaaggggggggggtgatggtggggagaataaaacactgtattatttgagtaagtgagacagccatatgactcggcatttaaaagattcaaagtatatgttgggctgttgatgcttttattcagtgacttttctgttggcctcgttttgcagctatagagaagcagatgggagttcagcagtgtggagatggaaagcaaggtgggtagggaggttacaatgtagggactaggggagaaagggaaaagagaggttagcaaagatgtaggagccacatggaaggagtaggtatcacttctacctggattcagctggaattcagacctagatcccacctgaaaacagttgacatgtctggacaaatagggatggcatgtgtgagtccttcgcagtttcagtctcatatgccaggcgtgcagctctgcccttcatcctttggagctgatgaatggttaaaagcaactttatccatttataggctgtttctttagctttcccaatcgtcacttcaagtgtcagctgtgcaatatgtcaccatgtactaaccaggccatggtctatcccaccatcttctattgctctgtgggagccacatgcatacaagcctacttggaaaaaacaaattctcagattagatctgccaaatcaagtgtgtatagacaatatttgcacagtcattatcaaattataccacttggagatcatccaaatttctattcccagtagccatttgatgtttggtcctgtttataaaagtatcttgactttcttcatcttcgagtgaagagagttcaaaatcattaccagtggatttgagagtgttttacgtatgggtctccaacccctggtccacaagcattttctttcatttagattcggatccatagcagtcagaaatctccaaattcattactcctctgaagccactagctggtagacacagagtgcaaatggggaaatgaaatgagactctgtctgggaagctggaaacgaagaccaaactcactcacttgattagtgccgtggcatagtctcattaagtattctcagttttcccttcctcttacttctggggttcacaccaaagctaagcatgctagaagaaagataagcatatccatgaaccatcacagttgtgtcctgtggctgtgtgcacaaggtcatccgagtctcctttaaaatcgaaaggtattgaaaatgcatgcgggtcctgagttctgctttttaacatatcttcactcattttggtatttaaaattattttaagttacttgctaccagatgttattgaattcatgaaagtgtcttgcttcccttgtggcttggaacgccctggcccatggggcctatatctggtgactgagcaggtctctgcatggaggggtccagggattggttctcatttatcctgcgaattccaactcgtctgatgctttgatatcaagagttcccataggccagccatctcagagtggtatctctgtcctggagaactccaaattacagcttgcctcagagccttgagccccacttgtgctgttcgttgcctttctctgtttatagcctttatataccaatctgttacatgatgtatcttcggattctttgtaccaagaggcctgctaagttatcaatgactaaaacattgaagatgactgaacctgccattttgctggctgtttttactcgtccaatggaatcaactattccccaaattaacaaaaacctagttcttagttccatatcttcctttattatatgaacttagttcccttgggaattatgcatttagttggcccatatctacacattcaattcccagtgatatccctgtcatgttgactgacactgggcatgccattaatttcctctcctgtctctggaaaatagggataattgcatttgccagctaccactttggaatgttgtcagatgtgatgaaatactgtttttaaaagatgtctttggaaggtctaggccatatctatcacagtctttcaccagtgtggttactttagtgcttatttacctagtaggtcagtggaacattggcatgtcttgtccgacaagcatggagactcgttgcattctcaggcccaagcacagttttgcatctgtaaccttctgaagccttggggactaagctcagaatattctttctgttcttggaaattttctagttgtctttggaaacatatgtgtgggtcattttagtcaaatactgtttcctatgcaaaatagcattccaaatatattgcaccattgtgaacagactaatagtctgctggccccatgtagtctttaagatttaatgtaggttgcttaaaaaaatctgttctcttaaagcataggtaatgcttgcgtctcagagtcctaggcctgttgttttaaatcaggctcgtgttgaacagtgaaatagaatgtttgcaaactaaataatgagactgtggagtctcgctgactgtgcaaatattaatatgctacccaatttccactagccaccagtgttagaggtaagaatccagtcatccagttcaaaagcccagcatgccacgtggctagtggccacatggctagtggccatgttccagtttcacggtcatgttctgatgggcagggtctgaaggtccaatctgtaatttgtgtcttgaaagccatgcaaatccttgactgtggcattttgcctctctgctcttctccttcatccattgcttaggacccagtattttaattaaaaaaaaaaaaaaaagatggatagttcactaccagggccatgaccagagaacaagtctgagggaaatggcatgtggaatttccaatggaggctgccacagcagcaaatccagccatttctgagaaatcgtctggattggagtcactcccagaactctgatttatctgcaagtaagcctagagctaggctgaaaggaacacaaatctgtttgtatacacaaataaatcctcccatgctgcgggccactctctgcctgccagcctcatctcactgctccagaaactataatacggtggtgaggtagttaacccagatgcagtgagtggaatattctgattattgaaaagttctgccttggcggcagttagcccgattgctgcaggaaagcagcagaggctagggttttcctgtgaggaggtcttgccactgagagttccctcttccagatggtcagggctgtatgctcatccctccagcttgagcaatgctcctctctgcttggaacactcgcagctgtcctgcagatctagagcaatgtcagtgtagtggggccatctcaggaagcgttgacctagagggaatgttaaaatctctacccacactttaaacaggtcaggagatcctgaaaatggaagagttttggttttggttgttgatgtctgtttgtttgtgttttagtatagaaatagtcttccccaaggaagaacatacccgattatttgatatgaaataatcatcccagaacacatgtgtgcaagatatacagactcagcaggttatatgtaggaatgtatatatatatatatatatatatatatatatatatatgcaataacaatgaaaaaagagaccatggatttgaaagcaagtgggaaagcagtatttgggagggcttggggggagaaaaaggaagaaatgttgtaattattataatcttgaaaataaaaaaaaatacccttgtgctgtgggaaaacaacttttgtttggaaaatgccataaggaaacctaatgctttgtatgttaacaaaataaatgaatgcattttaaaagcatattttgagtaagattttattacatttatttggattttttactgtatataagtgtataaagatgtcacagcacacaagtagagaccaagggccaactgtggaagtcagttctcttctgatacaatgtgcgtcccaaatattgaacacaggctttgccccaaacatctttaatcactgtgccacatcgttttatgtagactcagcataagctaaagtcatctgagaggacaaaacctcaattaagaaaatgcctccataatcaggctgctggagcattttcttaattaatgattgacgtgggagggcacagcccattgtgggtagtgccatccctggcctggtggtcctagattctataagaaagcaggttgagccagtctgggggagcaagccaataagcagcacacttctatggcccttgcatcagttcctccctccaagttcctgccctgcttgtgtttctgttctgttttccttcagtgatgaacaatgatgtggaagcataagccaaataaatttctccttccccaagttgcttttggtcatggtgttttatcacagccaccgaaaccctaagaaactcactgagtcctcttgcaggcccattacttaaaaatccttagtcctagatctttattttattaacagtgaacatctgagaactgctaactaggaaccaggaaatgttgaagggctttacggatatcatcacttagtctttctaacgaccttatctgtatacaaagtatcaagtatcgttgtgtttattgtacaatgaagacatcaaggcagtagaagagtaaacagccatagactaagaaaatgggatttggacccagccagcatgtcttttagacccacactctttttcttttctttcttcctttcttcccttcttcctttcttcctttcttcctttcttcctttcttcctttcttcctttccttccttccttccttccttccttccttccttccttcctttctttctttctttctttctttctttttctttctttcttttttttatcttttaaatgattttattgatctgattgaatctttatacatgttaccttgatggagaagcctcactctcttcctcagggcttggcggtcagctgttgtagatcatgaatttccctcagtgagcctctgctcctctaccgtttttccattaatttatgtattcaccttacatcctgattgcagaccccctccttccaggctccccttcactcattcccttccccactgctctctcttcttcatttctgagaagggtgaggtcccccctgagtattcaaccaccctggcatctcaagtcactgtagttttgggcacagcctcttccactgaggccagctaagttagcccagttagggggtcaggatccacagacaggcaacagagtcagggtaagccccattccagttgttgggagatctgcatgaagactaagctgtatgtctgctggatatatagtggaggaactaagtccagtccatgtatgctctccttggttggttatacagacccacactcttaaaactttcctagatactctatgtaatgaggatcctagatcataagggatttgggggttagactcaagaatagagtctaaagcacaaaccttgctagaattaggctaacttttttgagagtagtgggtacacatttgttgaacattaccaattttatgttctgtggagattgctgccttcagagggacattttttgagcaaggcagtacacaaaacaaaataatgagttcaactctgttcatatnnnnnnnnnnnnnnnnnnnnnnnnnnnnnnnnnnnnnnnnnnnnnnnnnnnnnnnnnnnnnnnnnnnnnnnnnnnnnnnnnnnnnnnnnnnnnnnnnnnnnnnnnntctctctctctcattctctctctctctctctctctctctctctctctctctctctctctctctctcagtctctctctctgtgtgtgtgtttagagaagcaaacatgagcctaaggcttcctttgctcctgaagtgcaaagccctagaagaagctcttcctttcctttcttcctcactgcctgtttgtcagctgtccatactgtctcctagcaacaccagaagatccccttttttccccagcaccaagcctggacactgcagttgtcacccactgtttccctgcaagcaacagttctcaacctgtggctagaactcttcttggggtcaaatgaccttttcacagggatcttatatctgatattcacattacaattgataacagttatcgaaattacggttataaagtagcaatggattattttgtggttgagggtcacctcagcatgaggaactgtgttaaaggatcacagctttaggaaggttgagcaccactgtcttaaagcattaagtcagatccacctcatctgcgctccaggttttcccttggactttgtcgactcaggagcccccacggggcctggtgcacatcatagtctggatcattttcttcacaaaactcactgtcccttggaaagcttgttggtttgattcacagggaattggccagttagttttgtctaccttccaaccatcagagagacactagatgaatggttatcaaccttcctgaagggttgtgactcacaggctgagaaccactgctctaaagtctatatcttagccacactgtctagtacaggagtacacaaagagagcctttaagacacatgcagacaaatgagtcttcctattagacaggagccactcattcaacaacagtcacactgaggagaactttccgaagttccgcagtcagtcaacagaaccttttggcagtgtctcctcagatgatattgatcagagtaaatctaactaatttatgatatcggcaggtaaggttttttagcatgcagtgtgtggaggaatgttagaaacaaaaaggccttgaagatagaaacctacatctagaattccagctgcctgacctagataaggtaagacatctcagaatagctcagcctccatgttctcatttctgaaatgggtttgaaatttcgtctctagaacctagtacatctttcagaatgagtgatgtagtcatgagtcacagcaatgcaagattggcatctcagttttcctgtaggtgctcaatgaaatgttacccagagtacaccaccatgtctctggcaatgaatagcaaaggccaaggagacatctcctccattctatcacaacaataacagccccaattagaaatgatgtaccatagggctttggtgaacgttgtgggcatagagaggggaccaggctcagttagtatcttctactgcatccaccttctctcctgaagtattaactagctgagtagagttgaaattgggaatgtagaagggaaaatagaaggtctgacattggcctcactgtcccatcgtgaaagctgagtcctagagaggctcttctgaatgatccttcacctgtgatgaggccaagcatagttcactccattttaacaggtttgattcccagaagtaaatttctcttcttttcagttgagtaaaatatatactgagccacagtctatacacagggagggacagaggtgaggcagactgatgaggcatctgtgtaaccctggaaaagatcctagtttaatggggaaagcagagcaagccaatcaccactcagagtatgccagaaaccatgctaccaggagaggccaaaggctgtgaacacacagagaagaggctttctggatggagaggtcagatagacccacagcagagccacttctgagatccacttcagagaggagagaggggaatggtacatggatcttagggatgaaatgagtagtagtggtgtgtgtatgtgtttgtgtgtgtgtgtttgtgagtgtttgtgtttgtgtttgtgagtgtttgtgtatgtgtgtgtgtatgtgtgttagagagagagggagagagagagagacagagacagagacagagacacggagagagagacatgcacaaagtggataggattaggattactgtaggatgattttagaaaccaagtgagttctttgcaaattgtcaagtgtacagaagatactggattcaagaattctcacatttcatttcatcatacttcacataagttcatactcttttttttttggctaagtttattttaacacaagtataaagtgatggataaatgctagaaaaatgcattttcattttcaactctgtttttccacagttttggaagtatattttaaactttggagtggaataaaatagagaaaattaagaccaagtctctacatgtattttatttgggaaactctttaaatctttgtcaacagctaaaaacgtgagcattacagctttccaactaagaaaaaagtgaaacataattaaaaacacctgagccatgaaaaaggagctatgcatggtggtacatacctataatcccagtgctggggaagctgaggctggaggattgtgaattcaaggtcattctggactagacagttaaaaactagaataataaaataaaattaggaatgactaatcaagtaaaaagaaaaagttttctttcccagagaaacttcatttagagttttgttttctgttattgttagcgtaaatgttcttctatgtgataccatatttacaaatttctaagtttatattttctttttgcttttgctgttgttgttttctttgtttgagacagggtttcactgtgtagccctggttgtactgtaagtcactctggagcccaagatggcctctaactcagagatctacttgcctctgcctcctgagtgctggagtcaaaggtgtctaccaccactggctggatttattttttcctctttcttattttctctttgctaatttgatagtatggctatatagccttcatacaatcttcacaaaagtgctattcctgttgggtaaacacatctgacttgacttttgtcttctttggcagatgacgtttgacccagaaatcttcttcaacgttttgctgcctcccatcatatttcatgcaggatacagtctgaagaaggtaaagctaaggaacgttcccttctcttatcattcagtagaaaacttggccaacactaacaaaaagtagttatattttatgggatttcctacatggtaagaacagcattgaatagattacgcaataaatgttcaaccctgacatccttggaattcttttaaatctattagacctgtacccagggcttagtggcacacagctaatgaactctgtggcttgtctcaagtgagatgcactgtaaatctaagatgtacactagatattaaagtctaattattttaaaaacagtatgcaaatcatctcaataatgtcttatactgacctcataaacgatagaatcgataatatactatgtcaagcaaagcattaacaaactccacatcaccttttaaagtttatttattgtggctctctaggaggtctgtaaatgtccaatgtgatgtgtgttacctgacccttgaacagtgttgtcctagataactgtgtgccaagagctaccattactagttcacagaggcagactgtagtccttcacaccaagagccacagttttcagccactgagctagttccagcagtgctcaggcacaggctgactgtccgtgtcacaggtcagtaactcacttaggtaggtagtactgtgccacagagtgaggcagagggaacacgctactcttctgctgcccaggtactaccttggagactgccaatgtgcacctctgattccctttggctcatagaagccaggcagcttcctcattacagacctggaggctttagttgttgctgttttggtttttttgttgttgttttgcttttttttttggttttgatttgttttgtggactccaggctccctcttgctgtcagtggtggctgctcagctctccctaaaactctggaagggagtaattcctaacgaagaagcatttgaaaggatttagaaggttcgattcctgcaggtcatcctttctcatagcctacctaagtactactcatcatttcatgtttcatgcataaagaatttatttatttcagggttttaatctttgattgcatcgcattcagaagatgcatgaagaagaaaactcaggatactccatgaaagccagatgccagttaaatttcttagaataacatttgaaaagttaaaggtgttatgtttgcaaaacccatcatgacaactgtgtcttgattagtcccagagccccagatacttgttgaccatccggttccctctagctgcatctgtgggttatctctcccttgcctgtcatcttctagagtttttcattgctttttcttcctcctcttttctttggggagaaatcacttactaagcttcatgcccatgtacaccaaatcccaggcatgacccccaaagaagatttgctaaataatgagagaaaggaaggctctgagcagcttggcttattcagatgtactctatgaaatattttctgtttctctccagagacacttttttcaaaacttgggatccattttaacgtatgccttcttgggaacagccatctcctgtgtggtcatagggtaagtgacatttggaacctgggctataggtggctggagcgcagcaatcagagatgggatctcagacttctcgatgcttactctttggaccaagtatgtgtctgtgagtgtgcgttattcctagtacgtcatgtttaggtttgttttgcttgatttgtggtatagccattttgttgtattaccaacatctaacatgttgggcaagccttctgccattgagcaccatccccagaccaggtacatcacatttttatacatttttccagccctggttcaacatttctgtatcctacgacaaacataaggtacagacgacctgctccagcctttaggggaatggtgagtagaacacagcatcagacgaaggtcaaagactgatgatccctggcctcatactattattatttgtgctttaataagcgctggtttcttcctctgtaactctcttactactttgtactaataagcaatggtttcctttctcctcaaagacccaaggccaggggagaggcttagagctcattaactcttcatgaaccagatagaaaagaaaggtcatgccaataactcaactcatttgtgagccaaagagaaaagatcttttacacagccaatatgtatagactcactcacacaaatttacacacacacacatacacacacacacacacacacacacacacacacacacacacattggtctggcctgaccacctgtctcatcaactccacaagtgttcatgcatactcacacacacacaccacacacacacacacacacacacatatatacaaacacatatacacatatgcacatacatataaatatagatacatatacatatacacatttaaatttggtggtttgggcagaaccccctaagccacatatacatacatttgatggatggatggggtagagccccagatgccacactttattccttctctctggccttcttgtaccttcttgggtaaaagttctttagaaaattacctcatagataaaatgttacacaaaggggagttacagaaggatgtcgatagtaagttcaaagcagtgtttcattccataagctcattataagctcaaagcaaccgtttcacgtggccttgctttatcacagtgcacacctgtgacctcattcttggacctgacttagaatgaatgtttttccttgatcacaggtctgtcctaagcccatttatctttttagtgtagttgtgaaagctcatggtactccttattatgcagtcatactgttctatgaggagtgggcacatcttatttttgattctaactttattatatctttctggcaaaaaattaaaatcattccataaaactttttttcctaaaattatttgactcaaatcaggagttgtataaagtcattgtcaggagttatggagctatctatcaacttctctatacaacattactacatgatggtacatctttgttgatctgaagaaaatcttcccaatagggtgggctgatgcccaggaatcattagattactgacaggaaaaggcatatctgctgcaagaaacaatcctgagatgaagtttcttaagaccttgcctctcagaactcacccatcaaaggccatgcaataaaaagtgggctacctcccaaaaaagtcacccactagccttagcctctcctacatggctcccaacaatagggcttcatcaaagcaaactgccactgggtggctagatttttctctgtgagtttgagtttctgatttagggtgtgtggactacttggcctgagttatgagaagcatatcacattcttatttagcctgcataatgtatatggcctcaatgtatttttccatcatctttgtagagctctaactatatttgacaaaaatataatatagctatatggtgaggggtttcttctaaaagaaagtttgtaagtggagagtttgaaacagagagtttcaaatatcagtgggattgtatatggcttgggtggctttgtagctgatgaattgtagaatgtgaggcgtttttccccctcaatatatttattggttatgctgctggaccaaagatgaactgcagagactctggcatgaagctcaccataaagcaaaatgaggtccaatatggcaaaaattgttctatctactacggtgtgacagtcacactgcagaaagatgcagctgctgtggctatcgtgacgcatctgtcttaaactgtgcgtcacagccggctctacttgtgataattctttaactgcctcagctatcgtcactcccaccaaggaagtggcactaagcatgcacagcagtcatgcctccagcccatctcttctgtgcagttcagtgtgtgccagtcaaagctgaggtgatatctgggctctatacaaacctgaaggcaagtagatttctacatcaaacacttgtttagttgaggttaaaaataactgagctagacaagtcccttccgctcgactcgagactcgagccccgggctaccttgccagcagagtcttgcccaacacccgcaagggcccacacgggactccccacgggaccctaagacctctggtgagtggaccacagtgcctgccccaatccaatcgcgcggaacttgagactgcggtacatagggaagcaggctacccgggcctgatctggggcacaagtcccttccgctcgactcgagactcgagccccgggctaccttgccagcagagtcttgcccaacacccgcaagggtccacacgggactccccacgggaccctaagacctctggtgagtggaacacagcgcctaccccaatccaatcgcatggaacttgagactgcggtacatagggaagcaggatacccgggcttgatctggggcacaaacccccttccactccactcgagccccggctaccttgccagctgagtcgcctgacacccgcaagggcccacacaggattccacacgtgatcctaagacctctagtgagtggaacacaacatctgccaggagtctggttcgaacaccagatatctgggtacctgccttgcaagaagagagcttgcctgcagagaatactctgcccactgaaactaaggagagtgctaccctccaggtctgctcatagaggctaacagagtcacctgaagaacaagctcttaacagtgacaactaaaacagnnnnnnnnnnnnnnnnnnnnatgtggtgtgtgcagccataggaactactttcaattctgggaggcagcaagaagacagtataatgcctgtattgtttgtggagcgtctcttggactcccttgaccaataactcaaaagaaagtttctcatgtcacacacacacacacacacacacacacacacacacacacaccacattgtcctaagtactcattagtatccctatgtttgttttgtatgtgtgtgtgtgtgtgtgtgtgtgtgtgtgtgtgtgtactctcttgtaccatggtactcatgtggactttagaggacaatatatgattagccaattctttttaccacaaatcttctaccacacgaccttcaggaattgaactgaagtagttagcttgatggcaaacatttttattcactgagtcatcttgctggcccactggagcaggctagatactttacttttttaatattcttggacccctgataattcacccaggaaaatctgtatttataaatatggtattgtttacactactcatgccaacattgctaaggaatgacttccccagaggaattcttagtacacacagaatattaagacgctcggcagccttgtcgatgatgcacaacaatcctgagagggggcttcttgggtgcttgttactgccctctgagtggacatgtctgctccccgggggactgttatatgtagtgatatggtgagttcaagaagccctccccaatactgactccttaaccctaaaaagaggcatattgttaatttagaagccaaatgtggttggcagctcagaggtggacactgagagttattcatctctttaaactctaaccttaggaacagagtaaaattgagatgagctctcaacttgggaaacagagactctgaggtcatgctcaaagacttcagggaggaatgaagctctttaagttagtcgtgaatttttataggcgagagcctgcacagatttcaccatttcatcagaccctctggggagctacaatctgtaagaaagaaagaaagaaagaaactggaatttttttaaagccttggcaaaacccatcgctgtgacagtaagggtttcatgtatccctgtatttagtaggactgaaggctccgttagaatgcactgagagcagttataaagtctggagctatgtgtacttgtcattttagattgtgctgtaagggagcaacaataaagtagttattatgcattttgttccaggacttgatggccatctgtcctatccactgcagagtgcaagtgctgagctgtatgtaaatcaaaaatggtcactcaggtttttgcaaaataacaccaaaattgtttttccaatgtaacattaccagctttatttttgtttttgttcccccccccttaatgtttagcaattggtaggtacaacatgaaaatgcatctctatttgtgtcttcctgattattgaattggctgtacttttacaatccccctttctatctgaggtgtttggtcctcttttcacaaacttttagagttcttttaatgttgcacgtatctatccatattcacttagcaatgtagtttgtaagtgcatcttacaaatttacaaatcttgggttgcatagtatcttgttatggggttaacagttttgtactcatttaataaatccttttgtcctagaaccccccaaagtactttctcctcaactgctttaaacttttgctatttgtagtgactctgttttagagaccagttttgggtttggtggacagtagatttccagttaaatttttcatctcaaataccatttattgctagctttgcatttcttcagaaatttcctctgggtattgtggtttctatttcttggctctctggtctcttggaatgatctataatttatgcctatgatgacacacctaactactgattagtcttcgttgctacagcttcttaagttttaatgttttatacagaaagactcaggatttattattctttaggagtcattagttttttatttgttcatagaaatttactacaatatatccatgaatacaaaatattttatgtttgtaaaaatcatattttgtactgttttataattgtatacctatacttatgatttccctaggggtccccttggacacgaacaggagggagcatacaaaaggagatttgttgcttcagtagtcaccacagtggaaactttgacataacctagagcccaacaataggaaaataggcaagcaaatttacacaatacaaaattccccagcagggaagagcaagagcatcatctataacagtgcagataagtctcagaaatattacataaaatgaacatatccattatactatcattgttcagaatggacccacactgaacactattaagacacatgcgtgtggaccgtgaagtcaagtgcaagtgtgtaataagtaaggggactgagaacacagactttggtgccatgactggtgtttagaggaagaaggaaaagagcaatacaggaagaatcacaggagagatgcattacagataatgtattggctcataggctgggcgtttttatattttccttggaaagaatttccttaggaggtatatatttagtatattatcatgacatataacttgtatatatcttctatatagcctcttgcgtatatcaattacattacaaagaacgcaagaagggcaagtagaaggagcaatttgacagctttatggaattctgttttgttatcctgcggttcattttcgatcctgaagaaatggtctttcattgtttttctctgtgtgttttaatgagaacagtttgagtttacaggcagcagtagaggaacacagtgccaagggagggtctgccagtagccccagccattcttgtaagtcctcaacccccgatgttttccttttctcttctatccacacttctatccattttcccttctccaagaccctttcttcccacccatcttcttttccatcttttgagaccagttgggctgttctgagtctctctccttctggaatttcaaaagctatagctcaaggacacctgttgggccaggctggaaggcccaggccttctgtctgtctgcattcatttactctgggttctgagctggctagagtagctatcactagtatatatgtagggctcaactgggtaggttttagttctcacgaagttattgctgtgacctcgaccctctgaacactttaattagggggctgacttaaaatggactctggcccatgtctggtgattaattatgacctggttgtcactcagagcatgagtgttggtctgggtaggacttcaaaaaacacgtaggggataagactgctgacctgagatcttaaactattccacagagagccaaacagagacccagaggtggagctcctctcagacaagatgatagagcagaggccaccagcgagtaagggctttcatgctgactgttgttcaaagaggccagaggacgccataagcagttaaagataaagatggcagggaggcactactagcccaggtcttgaaacctgcattctggagtttcaatgtgactctgtggggtagcaacacttttaaggagccactttttctcctttaggcagaaatgtgaagataataagaaagccaaaaagaacagacaggaaatagagttttgataatggaagctgtgtagtagtgcttgcctagactctatgcaggtgatgaagtggatagggcatgttgatgtttggatgaagggaaatccaatttcccactgcttcaactttgcattcactgtgggtttgactgtcagatgcatcccagtctgaacctctcacactagtcctcttcatccttacctcaagcttcctgctaggctgaccttagttgctgagtttcttgcttttcatgagtcaatcactaaattgcctagtgagagcacaagtggttgaaataggcgagctatgcatcccttgttgtcaaacaggataagaaacagaagtgaccccagctagctttgtgtggaccttccgagtatttagctttaactcaactgctttgtatttgttgtctcattttaagctcactgtaatcaggacagagagatgtttctattcttagctccctttttaaagacaggtacctaaggctcaaattgtttagtgacttttatgaaatgtcactggttccagagtatgccaagcccacactggcaactgaaatgacatccttggactgccaacacatcagaagcatcagcagttggttatgtatgcccagtctcaggttgtgctgcagacctcttgaactcatagctccatcttaaccagagccctagataactcccactggtactaaaatggtccgcattcccaagttagcagagagatttaataattttttttctaggatttaccaaacacagactctaggcatggaaataatttcaaccaatatttaatctatattatttagaactcaactaattttatgatttacagtcacaagcattatatgacaaatgaatacaccaaatactgtatgtttattatacagaagataattggtagaacaccgttagcttgccatggagaagtgtcacagtgaaaaaccttcagtgttctggtccagggattttagcacttcaggtgtgggaagtgctcaacctgatttagcaattacattccgatgtcattaaattaaaatggtcccaataaaaggactaggagtcaatcttaactacagctctgagaggttttactggcctatttcactcttgcctgctaatcctcactgcatgagaggcaggtagaaagctcattttccatgggcaccccacgtgatcaacagaataatgacaactgatgtcattgctcagcattgatgagcaagtgccctcttggaggtcattgctacgtgacaggtatctcaggcctgtgtttccaaatgattcttagaccctttgctttttggttgcatattctgcctttaaaatgtaaggatgattttgttctctttgcaagttctggtactttgtgaaactattaatcaatttggttttgttggtatactaaggataccatgtcatttattttctcccaagaaaattctgtaacataaagagatattaagtatagagctgggtgtggtagcctgtaatctagaacttatgaagagtggaagaccaggagctcaaggtcatcttcagttacacatggagtcaaaggccagcatggccacttgagaccttgtctcaaaaaacaaaacaaaatccaaacaaacaaaaaagagttacgaagtacagcaataactgttgcttgcagcattaagcatgtcatgtgtgccaatcactgtctttagtagggaaggatcaacttgcctgatccttccagatgtccattaaaataaaactgcatgtattgacttcaataaaatgtcccaaatttgctgtatcaaaccagttttctaatttttgttataatagcaagaaacttaaaacgtattttgagaaatcttctaattcgttgtatagacttgtaacaaacattttgttaaattataatagaaactttaggaatctcaagaaggaataaccacatagagtctataaagcagatcctaatatcaactatgagcttcagtcagcaataatgtatcagtgtcaggttagaagctataacaagtggaccagacagcacaagaagtgagactagactaagggcatgtgatcatacttagaatacttcttgctctactcttctataaatctgaaaaaaagtctgttaatttagaatagaatttccacattataagtattttatatgatcccagtggtaatagactgtaacagatattttccatggcacctcctgtcatgtcctggttgaacattggcccccttttaggttcataaactccccaaagacattaggcttgttgtagccaaaacagttgtctaatggtcttttcctacttcttctgtatcttggcacttggccttctgagatgagcactagaagtggggctctaaggctgctgggaaagtcttgatctgattagcctcacatctgtaatggtcctcttctcggtctcttagaatgtctcttatgagtacaatgcttgcaccatagcccacacctaactttagttcctctatgttaataaggaatgggtattagctctcttgaggcttttgcttcttcttaactatccaaactgtcagaggcaagagatgcctgagacttatcctattatattgctgacctttcattaactgtgattcaggccatgtttttacaggtcatatcttaattacattttttttgtgccatataacatgacaacagtcccttccttctacacctcctgttggtattgcttctgagtctcgctgccagttctccttccaagcttacttgttcctattgatttcttataacttagcattccatcaccaaacactcttcttcctaggcaaacctctggcttcctccacaacaagataaattgcttacatgattgtgaagatgttgctgttaatttgcagcaaaacagtagccattgtaggctgcagatttaaggcctccacagaaaccaatgacctgattatttcacactgcactgcacagagctaaatacaattactcccttatcccagtggagaggaattaggagtgcagaaagaggggaaacattatcctaggagagaggaatgtacggagaaactcatttggaagagtgtgagtatttactgtgcatggttcaggctttagggagtaatttcacttctcagttctctgtgtctaaggaaaggcaattccattaaaggttagaaatgcggtaaaaggtactgttttcataacctcctgcccacagtgtttctatgtagttcattatgttttcattttatagtgataaggagactgtcgcagcagcatccatctaccatactgatacaaacaccgaggctcgattacttccccaaatgtgaatatttgtcggaggataactatttgctcagatttctggatctctgaaaatgtttttcaaaagtggttaagggtctaccccactctgatttgttcttcaaatcagtcaatcgaaacaacaccaccaccaccacaaattgagacatatgagacatgtgataaataacataatcacacatgtagtatatgcacccatgtcacatatgcagtatatgcacccatgtacagctttattcacccagctctttcaacctcaatgagattttaacctattcttttcatttgcttatcatgcaagctatgatttaaatttctcctcaaagatgtctgtctataaatgataaagttgttcagagcctggaggtaaaacttcatgttactaaatgtctagcaccagtaatggcaccgtgttctcaaatatttcaaaaaccgagtttaggtcccctagaggaaatacatacacagagcatgcaggttggctagcatgaacttgctcaattacagcccacactacatgtttcaggagctgtgtctctaagttcttcttagactcagatgatctgctgcttccactgacctgtagtttagcttggctctttccattgaatttgtagggagcgagaaattgatattcctgttggaaaaaatacaactcacccaaatgtttttctcctattccttctaaatttaactatttttccatctatcatattaggaaaatacaactacttttaaagtatctgcttctaaggttgccaaataatttccacccacgtccctcttcctccctctaggcttccagtagaatcagttacaagaaatatgcttagctaacacactatccttccaaaacatatgctttgattccattctttccacgttgaaaatttcctatattctggaagaattgaaacattatttttgttttaaatttccataaaattaaagagacatagtctaacgttgagttgctcatagttatttaaacatgttgaagaatttttgaatagtgttaatattcttcatgcgatgtaattatggccatgtatgcgatgtaacttgtcaaagccatgttagaatcatactggaagaggatgtgttaggatcatactggaaggagactggctcttggctcagtgtcatctgcctggtgggtgagatgagagctctcatacacagaggagacagactcgctgtaaaactgaacaccagcatcaaggaatattcatgaggacttggaaagaatactcctttgtctgttaagtctgacaaaaattggatcattttacttaatacaaaaatgttaactatagacctaaacctatagtcatataaatgtgtgaatcggaggcaggagaatcactacgagtttaaggccatctgggctacatagtgagtttaagatcagctttgtaacataacaaaaccctcaaaaacaccccctagccaaacgccctctattcagcaatagtttatagataaattagtgcaataatttatagataatattagctgaattaactagttaatcctccctctcagagcttgaaaagggcacaagagggttgactcaacgctcctctttgtgaggtcattcaagaagaaaaaaaatacagaaacattttttagataatagtttagaaaatagcttttggttttaagctgaataattgttaagagatctgataattaatttctcaagataaattttaacttcatcaaacatcatcaaaaagcacctaaaatatatatattttttaaaaatggtatttttcaaaataatttttaaaattattttattttgtgtaatagtattttccctatgtgtatgtctgtgcaccacttgcatgccttgtagccacggagaccagaagagggcactggatcccctagaactggtgttctattcagccatgagccatagtgtaggtactgggagttgaaccctggtcctttgtgagagcagcaaacatttagccatagagttgcctttgtagctctagctttttttttttttcctaaaacagactcttgggtaagtttttttgattccaattttcttttactggactgagaaagagagaggcctttggatacttagctgattttctccataacttgatttttttcccccagttgattgtgtgcttaaggcagctaaatttcaagaaactcttgattgtttgtgttgaaatgaaaaggttattctccagaaaaagccagaagggctctgacctcagttttgtgtatttttcaccctgactatggtgagttctttgactctatgagaataaattccacactaagaaaagtgccctgaagtgagtttgcagagttcttatggtgagaagtcttaagttgtacaacctctctcaaatcagaaacatctgttgggatatgttctcctccatcgaaacaatgttcttagcttagttatacaaaacctggatagaacactgctcgtgatacgttataggctaaaaatattcttatctagaaaagaaatacccttttataaattccgattttttgacatcaaatactatttgagtcttctattttgatttatagtttaatcttttttctctaataagacagcttcaaaaaaccacgagcttgtaaagaagtttattgagaaaagtagcttttagactaaggtttgactgtataatgctttagaatttgccctccctttcatttagatttaatgatttttgtacagtggtcacttcattgtataagtccactaaatcagaatcaagaaaacatactagagataaatgttttacacacaatttattttgaggaggtgggtaatgattttacccaaggatggagagttatgttagcaattttccttctgcagatgtaaatggcagagtattagaaatcctgtccctaacttaagccaacacacatttgtagaaagtgataggaaatcggtccggtgcccccagacttcagatttgaagaacagatatttaaattttgagggtaatgtattttgtttggaatatagaagagtgttacattctctcagcattccaaggatttgcatacagactagattcagagcgcaacacaacctggtaaatctagaatatacttttatgtccccaaacctgctcagagtcagagctgattttgaatgtgcttagagacatcgtcatgtgttattccaaattcagatctcaaaatcgttttaaggttctcattgctttgcctgctgaggcgaagaggaagaggtggctcttttaaaagcctgttttaacaagcaggtgtgagatgtcattttggtaaaattacttgtggatttcagagtcagccaaaccctaaacatgaaggatagagtttgggttatattaaaatggacgctgacgatggatgggacgactgtcaccatgaagaaagctgctgattttcctctctaaaacatacaaaatgagacaactgtgcaaggtaaatggcccgacctccagggctgagcagccatcagcttttgcatcctgccctctggtgggaaactttataaatagcaacctctatagctccacatttatttgataaaactttctgtataatcaagcttcggcttttggcaaaatacatggcaagaatcaattaatccaaacaccaaattttatctgcaaatgataaatgactcagtgagcttgaaagaatttaattattcattatcaagttctccagcgtttccgggaaggtattaattattgactacctactaagtgctaatactacaaaagcatcatttcattaaattccatcaactatgagtttagactgagacatttctccttcattatccctgtagctttagcatcttcccaggcgagctgaaatccatctacacacagcagacagttgcattcatagtcactaagtacatcttttcttatccttccttaaagagggacctgtgaggagcagtgtcagcagggttgggcccctccttgttagaacatggtcctgcaatccgggattcatctcaaagttagccctgagaatggaggcaggactgtgaggagaatagtcacaatgtttctgtagtcaggcagcagagagtgggcttcaaactacatggactacctgtagtgacccactcctctaaataaggctttaccctcttcctcctcctccttctactcctcctcctcctcttcttcttcttcttcttcttcttcttcttcttcttcttcttcttcttcttcttcttcttcttcttcttcttcttcttcttcttccttcttcttccttcttcttcttcttcttcttcttcttcttcttcttcttcttcttcttcttcttcttcttcttcttcttccttgttattaattattttatttattttcatttcaaacattgcacccccaatcttggtaccccatcacagaattcttcccccaacccctccctttcacctctgagagggtacctcctctgtatctccatacccttgagcatcaagtctctacaggattaggcacatcctctcccactaagaccagacaaggcagccctctgttacatatttaccaggggcctcagactagcctatgtatgctctttagttggcagctcagtctctggagtccccaggggtccactttagctaacactgttgacagatgcagatagtcacagccaagcattggatacagaatgaggacccttatggaagggttaggataaggattaaaggaactgaaggggatggcaaacccataggaggctctaccttctatagcagttctcaacctgtggatcatgactcccacaaagggtcacatatcaactattgtgcatatcaaatatttacattaggattcataacagcagcagaattatagttatgaagtagcaataaaataattttatggttggggggtcatcacaacatgaggaactgtgttaaagggctctaacattaggaaggctgaaaaccactgttctaaaggatctatgacctttccaaatagagcagctgaagacccagtgttcaaacacatgggtcccaacaagttgctataccagtgaggcacttgaaaagctggggaggaagctgagaagtcttagaagggcaggaagcacactggaacattttaaccaagtttctgggatactgtcagatcaatccaaaaggctcagcttgggcatcccgaatagaatatgtatatgtatatgtatatgtatatgtatatgtatatgtatacacacacatatatatacatatgtatatatatgtatatgtgtatgtatgtatatagtctctacaattacagttgaacttctggccttgctttttgaagaaatattacctttttccttgttttaatatatgtaacatgatgtacctagtcagagaagaacaagtacatgtcaacaattattatatatgtgatatagcctatcatacttcacatatatgaacccatacagtcctcacacacacaaaatagataataccttgctctcaatttacaatgacaagacagaaactcagaaagaagagagaccttgctgaaggtcacatggcaattgtgaagagctgggatctattctattaacaggcttagcaccgtgtgtgctcaaaactcagacacaatgcaacttgcaagtccctggctcaactacaaaaacaaacccaccacgagtaccagtgaagactccccccaaatggctgttcgatgattcctgtaagcatagtcacaatcctggacagctcaacaactgggccacagagcgttgctgggtcttaccaagttaaattcagacttcttgtctcagtcagggtttctatcatcgagaagagatgcaatggccacagcataccttataaaggtaaacattcagtttcagaggtttagcctgctattgtcaatggtggtaagcatagcactgtgtagggagagttggtgctagagaggagccggaagttgtaaatctggtcagcaggcactgagagcctgggccgagcttctgagacctcaaatccatccctttgtgacttacttcctccaacgaagacatatctattccaccaaggccacacctcctaatagtgccatgccctatggaccaaacactcaaacacatgaatctatgggagccattccttttcaaaccaccactgtactgcactgactgacttatattgtgaccatcctagaagaaatgaagatacattcaaaagatatgtgttcccatgcttttcctaacagacgatagaaacaatggatcctgagaactggagctatctcatcataaagggaaaaactgggccctggcaccagccagatggggtgcttgcctcccaataaggatttcacacagttctgactcaccagccacgctgcaggaaagaccgtggtgggtgggaccatgtcttgatagagcatctcagctaagcatgccgtgcttcttgccttctattttaactcaaacatcacatcgggaccctaggacgatagacgtgagaaccactgagcaattcatttgacactcctcccgttgtggacacattgaataaatcttcctttgcttttcaccattacttctccatttcattgactgatcagaacaggtgcctgagccacgctcatgagggaaagggggtgggggaggtccaggctctgaccctgacaactcctttaacaatgtggagatgacattacagagcacaagaagaacagaaagtctactagttgattagtaattcattgaggcccaacccccccccccaggagtgttgcctgtgtgccttttcttttacatattggctgtacccaacattaaggtttaaagagacgtgtttgcatatccagtcagcatggtgtgcgcttgtgttgtgttgtgacagctttcgttgtcaacttggctggattgagatgcacactcaggctttagtaaaacacactgctgggtgtatctgtgtttccagggagaattagccaagggggaagacccttgatagtaggatctacatagaccagtgaacctcacccttcctaattcatgaccctttaatacagttcctcatattgtgatgaccaccaaccataaactattttcactgctccttcataactgtaattttgcttctgttatgaatcagattataaaattctgtgggttttgatggtcttaagcaaccacagtgacagggtcatttgtccccttaaaggggttgagacccataggttgagaactgctggggtagactcatcaggaacacattcacttgtttttgtttcctggcctccctgaagtgaacttcactgctctgctctgacatcttccctgccatgatagactgggagctcccacgccgtaagccccaaagtatcatccgtatgttgtttgctttagatgtttgtcacagtggtgaacactgactgctattcttcctcatggaaaatacccaggagtgtctatcatcatccaggaggcatggatttaaggctaggaccagctgagaggactgacagctaatgtctcaggcataaaagcactgtaaagatgggctaacaagcatctcctcagagttctaagcttagaggtatcccatgtttagcttgaaattgggaattctgtaagtatttattccatggaaatcaataaaatgctacaaacccaggcttttcctcccaagccactagttgttgaacattaccatcacagcacagccacagtgatagttcatagcaccctctagcagcctgaaaatatttttctaatagagccagtgatttgaacaatacacttgattttattttattttattttattttattttattttattttattttattttgaagacagaaaggaaagctgggcggtcaataaatcccactgtggttcttagcaatgataatttaaaatatcacttaaccgttgataggaattaaaatcaacccaatttccatatcccccaagaagtcaacagcccttggaatttgcacatagaagtacagctgatgctcttgaaactggctgcagctgccaggaccacctggggcaggggcagtttctagtcagtgatggatctttcagagactggacttcaagccctctctgctggctaagcagcagctcgtggtaaaagtccccagttgcttcccttccgatgaaaaggcctctgcagtgtttagccggtcctttgccagtgacaacagtgggcaccagcttccagggctggttctcacttcagacaacgctgaagcggacagattgctcagaaacccaggcagtaagggcttatagcataagcacacatgacttaacctggaatttcaggccattctggctggaactttccttctctgatatcagtatttgaacacattttaattcagactgttgtgtgtgtcatcaatagatttttttttaaacatctagttgccagaggcttcagtgtgctagggcatgagggatgggggcgcctccagtccaggttgttatctgggcaggctggatggcatagactgctctttagggcattcggcacacccctccccgctgcaccgtccttgttctggcaacagagccacattggttgccagcagtcggggtcatgttgatgccattctgcatctcatgggagccagtctgctgctgtctgttccctagtgtatatgtgtaacacacacacacacacacacacacacacacacacacacacacacacagctctgagtctttattggtcctcctgcctagacaagccctagctgtatttaatgttatgacagtaattacacgtccttccaggaccagccagttatgcctctgaccatcatccaggcatttcctctagcttccgctgcccagcatgggtggtctggagaggaaacaacttctctctctatattacctcaggaacaggatgcggtcagtcttccagcccctgagaagtgaggagagcaagagaagtcctctctcccagggactgaaggagaggctccagcgctcccatagcaaggaacatagcagtgagcagaagcagccgggaagaatggagtctttttgacgagttctattctaaaggtcaatgaaatctcattatactttaggagtttcttgaagcctaaattatgttaggcaggaagggaatgattcggtataagtaataaactcctattcaaaaatttttttagctgcctctgagcttgagattctagccttcctccgacggcatgtatttcaagagattaacgctacagaataagttgatgaaggattatattatctgtgaggttaaattctatgggtcaagaaatttgaataagaaatcatcaatgagaatgagtttacttgttggatatttgtaatgaatgtcaagatatctgtgagcagtcatgcctattatattgacagcctatttctgtaatgggggcttcagtgactgtcagtttcctccacctcccaccttagcccatcttatctctgtgcagaggagagtgtgttctacatgtggacagtgaccacccttccagcgccctgggaggtgtgggagatggtgctgcacaatgctcttgtttatccagcatagggcgctatgcttcactggccttttcccagagtgctttgcctatcagcgttccctaactttcgtcttatatattattatgtttgtagggaggtttcaatgcattacatcacatggaattgcaagttagttttggagctctggggccacagggctgccactctcagacagagcagaagaaggaatttgtaacagagtaggaaggaaacaggccccgtgttttcatatattttctgctgattttcgtttcatttcagaggaatgccttagggacagaaaaataaaacattaaatgagctggactggtatccacaacagaattcaatatgagcttgtttgcactaatgctaacataggtaaggattgcatgaactgatctagaggaataaacaggagcagaggaataaacagaagcaggtctcacgtagggagaagctggtacagagagggttaggtgtgaggaagccattcatttatcctcaagattataaagtggaatttgatcttgacttaccttgttagcatattatttcaccctaactactagtaatatcatttactactcaaaatgtgtagaatattaaaggttctatgatgtctgtcttcatcaaatccagatcacactataatgtggtttcttcttactcaacagtagaggaagtgagcttagaagtgttagttaactcagtggacggtaaatgggaaacttgagaagggaactggactctgagccacagagccatgtagagtctctcatgatagactaaaaggtcttaaaaagcattttcatacattaatttagtgtctgtgtgtctgtctatctgtctctctgtgtctttctgtgtgtacatatgtctgtctgtctgtgagtctatgtgtttctgcttgtgtctgtctgtgactctctctgtgtatatatgtgtttatgagtctgtattatatttgtgcacacacgtctgtgtgtatttatttgtgactctgtgtactctctgtatgtgtttggggtgtgtgtgtgtgtgtgtgtgtgtgtgtgtgtgtgtacacgatgctataggtccgaagacaacttatctgagttaatcttttcctttcacttgtggatcccaggggttgaactcagaacctctgtcttggcagcaagtacctttgcccacagagccatcaggctggccctaaaagatcttattctttttagctctgtatcttactataaagtattccatcaaaatgacaaaatgcttagcgtctaatcttgtctaaacaatacagcatcagaatttgaaatcttcctaagaaattccattttcttcactggttcccatattctggtgaatgaaggcagcagacataaagtagctcactgacatcagtcactgtacataactcgccaggcagttcctgtgtgcacaggtctacaggtctcagtagccattccatccagcacccccaaagctggttgtatgcataattaggaactcctttaacctaaagaaagcctcccaggattctaaaagcagtttctgcaatgcttagatggcatacattccagtgtcttctaataaatattccattactgctgccatgttctcccagaattgcctttcattcccttaaaatataaaacaaccagctaggtgggtggcactcagctttgacccaagcacttcgcagatagagtgtgctttaggacagcaagggtatatagactctgtctaaaaaacaaaacaaaacaacaaaacaccagtttatcttgaacttttaagccagacctaaaacatggtacaggttattgtcaatattaagcaaatgaactctgttaaatgacagttttaaaacaagcccagataccctggtaagtgttcttgtctgactgctcattataatcaccatgattgtggttagggagtggtgtttcgtgggtgttctccctgtccaagaatcatggagagtgaggagcctctgggagcactctggaggtcagcaagtggatggggcacgtagccgagaggacacactcatgctgaacaaggacgggaagtctagcgagctggtcacatttctgtggctgggatgaaaatagcaaaggaagcaattgaaatgggagaaagttggatggggtactgtacacttaggtggataatcatgatgggggaacatgtgtaataaagaagatttttacatacagtgggcaggcgaggggaaggggccagggaggaaccagggacaaccttccaatgcatacatccagtgacacatttccttagctacccccattcttcagaagaacacagttgtctgagaagcagccttcaacccatgagcccatgggggacataaaatattcaaaccatgacaacaagaaagatgggaaagcctagctggtagaaaggaaagggatgcggctgtcatatttctttaccttcaatttcctggtccaaaatttacagcatgcagatcagcattagaattcacagcatcctgcttcaataaaacatattttgatcctaaaacaaatcccgaaggagcgggaactagagggatgtaattactgtctgtattgttaattctaaatcattaggctcccctgcataatcaccagcttataagatggaaggctgtcagaaagacacacaaaatgttacagactttttggagcatgacatccacacaaccatttgcgtgaggaagtgggctgttgtttttccacacacacggcatttgaaaaatccatgctgtaacgaatagaggaagagttgcatgtacagttgaagaaattctatttcttttcacatccatagaaacaagtctatactaaatgttctttacagcaaagaacaggaacaaagcacatggctgcagaaagcctacagtatttcttccagcagcctggaatgctctgagggagagagagagagagagagagagagagagagagagagagcatgagcattcctaaggtgcagctactcacaaaactatcctccttccaaatgtgaggaacagttaatgtcatcctttgacttcctttcttccacccccctccccacaccccaaaccattcacaggccaatgctctctcttctgcctgtatgccagggaatgggataacacgtgggaaattgacaggaagtggttctccttgtcttccaagctctggctgctcagcactacccaaagataccttggcatcaatgacaggaggaagccaagtctcagttctttaatgtgctccctgtagaactgggagatgctggaaaggggaggggtgtgcgttctgtaaaccctaagcatagtcctctgcagctcaggtacgcacacctcaagctgctctcagtgctatgcctcctgcttccccgtgacttgcagccattatgcacagacccgtcacagctgctaaaatcattttgcaaaggaataaatcagtataccgaaattatagaattccaggacacactgaaggctttagaactcctcctgtccatacccttcctttgcagcagaggaattaagacccagctagacaagtacccgcatttacaagtcaatcagcaactttgaacctgtggtgagagtggtcaccacccagtggcaatcctctctcactggaatggaatttcattcctttacacattcagcaacccagggtttgattcattctggcttgttgtctgactgtttcatttccaattttctatcgtaaaatgtcaacttatcctcaacgtggtcattttcccacttctgtgtcctctggctttctttgttctgggtctaaactacagcgtcatgcttgtaccttagtgcagctgccaatcagaacttctgcttaaccactgggccattgtaaaacagtgtgcatcctctgtcagtcacacattgcttcaccaaaatgacaagaaaaccatggcaaattgttcaaaggtcagtactaccgcatatgtctgtctgctgagagaaggggagagggtagggaccatcacttgcctacggcagtaagaactcagagaccgtgcaggccaaggcttaaagctgtactctatcagctgtctagcttctgtcactagctctcttatatgtgatatgtggctggtgtgtaacaagctgtgacacttgtgtctgttgtttagtagatttacctggacctgtttttatggcgctgactggggcctttcaggaaataggaatgggcaagaatgctttgaaatctttgctctggcctctcctagacaacctattggccaaaataagccatgtgatttaggccatatcccaaattgagaggacactgtgaagttacacagcaatgcgagagagaagtggagccattaataaaatcttctcattatatgtccagagtaaaaactcaactaaagtcttattgaatctggctaccagagcccaggttgacttggaggtaatgggttacaatcgtgatttatatcaatgaccagtaatttctgtttatcaagatgatcagtcgtcttcaccaaatgtcaagagcaaatgacgactgctgcttcttcctgttgtgaagaacagctaacagctgaatctatttaatttagtttagtaaccaagtctttactaactgcgaggtggtagtcagggctgagcagcatcaatacaataagaattcagtaggactccaaatgcctgcatcttttctaggcagcctgctgacagtctcatacatccatggggttggagtcccataaagctggccttatggctccttgttttaactggaatggactcggggtcctgaaagaaaacactaggaaataatgaaaaagagtatggaaaatccagaaaaggaatgctcagcctttctatatcactgaggtggccaccagagggaagtgactgtccacctaacaattttccacacgggcttaaagctgaagaggaaagatcacaactgtcctgggacaatgtttcaaaagggagcactgaaggatcagagatcttagtatatcttagcagagaagacaatagataataattttggagataaatgtacctgttgtcttatcacacactttatatggaaaagagataattcctctgacttgatgcctcattccatgttttctgtattctgggttttcaatactccttacctctagatttccactaggtggcgctcctgagccatagtctatggtttatggcgcacatgaagacatgtgaaatgcatttttttcttcccttcaattttcaagactatttttttccagtttgaaagattgcagagaggaattatttatcagttggtgtattaaagaaaatcctgcatgtccaaacaagcacttcaaaggattttttagtaacacctatcacagaaggctgaattgatatgaagaagtgggagggtacatcccgtgctgatattttattatcaaagagagatggaaggggttgtgtttgtctctgcgaagccacagtgaccaaaccacacatcaactgttgggactgatttgtttatgaagatattttaaatcagatgtctggattcttgcaacttaaaaatctctttgttcagagtctagcaagtaaacatcaatggaaaaaaagagaaagatgcgcactctaagacgtgtgcactaaatacttcttgctttggtggccaatgtgcatctctgaatgccactgtgagttgtaccttgtgaatttccacattgtcacactggttaggtctgttgccacccaaaacccagtggtaatatcttatatcaggcatttaaggacatcttggtcaaatatgtaaaaaaaaaaaaaaaaaagcctgagacctactaagtaattctcttttgtttgtgggaaaggatagatccaggaccaactgcttccatctgggcttctgattctgccggtagcttctgtctgttcccttacttgagttctggtatcagaactccacagcctacagtcaggaccctgaaaactcagccttctcaggtaaaatgctaattgcctttaccagaaaccactgactcacacttcagtgccaacctgctcctgagctgtgtagcttcctttagacctaagcattttttatttgtaaaagagggaaggtcgcaggaccttcataaacacactcttgaatcactccaggaagctcaggccaacctgggggagataatcacagaagtagggttcatatggcgaagtcgctttgatgatcaccttacaattaatagaagatattgccaagttttgttttgaaatataaaaattgtgcttctatccgattctgctgtttattaaggatttcgtgtcatttgctttcaattaaattgaagcaactcaaattcaatgaaagtattctatgaagacaaacagtgtttgtgctattaggtatgacagtagtagttactattttaactgtctctataaagccagggtttcctgtcttttccatgttggcagcatgtagctcgtctggacatgttgtctaaagaaggctgtttggggaaattcaggaagcacatggtgagattaaggctctgagtctgtctattttctcagcccgtctgcagtgttccccaacgctcacaatgcagtgtgtgagctctgcactcggggatctgacctgcagtgactttggctgggtagttttgttgccagtctttccaatagaaaacagacatgtgcttcttcccgatgctcttagagctctctaacactgaatcctgcccagacttaaggaaggatgataccttaccagaaagaagacagaaatgcataaggtgcattaaacagggacaaggagggaccacacagaccctttgtggggtttgagtcaggatggtgacctgactgacagtaaggaatatggagcagcttggatagcttagctttcatcaaatctgctgccagaaaaggagactgggtctcaagaaagtcctggatgtaggtgctagacagcaattgctcactttgtatctctgtgcatctctttgtgtctgctcatgggctctctctctctctctctctctctctctgtgtgtgtgtgtgtgtgtccagtaaaaaggaaagcaactgttaaagagattgtactgtttctcagcagaaaaaaagaccaatcataaaaatgtcatttcaatcctagtgcttagtatccaggaggagagttgagtgggtggttgggccatatgcccattttgatttgacaagtctgacctctggtgtggggaactctctggggacgacattggcagtcctcagataatctgtcatctactgactggcatgacatgtttgatgtggaaagttatagtgttgccaaatagttatagacagcgattatgaccagaaagatttctccaatccttccttttccttacacaaaattggcagcttatttaactttatcgtggtgtcttcagctgggaaataagagaacccacaatgttggtaagataaaaaagagtgaatacttgtaaagctgagaacgggatgcccgccatgtaactaataaatattagtttgagatagttgagataattattaaatggcacagatttcatcttaaggtctggatttgcttggctctgactctgctgtaggttggaggtctgaaattgtctgctagtaattctgttatcatcccaccaccccacctcggctcaggttctcagccaacaatcttgtctccaagcagctacaagtctgcctgtgttagtaacgtttctgttgctggaaccaaaatacaccctcaaaactaacttcatggagagaaggctcttttggctcccaattccagggatatatagtctattgcggtggggaaggcagggtagtgatcagggaagacatggggcaggctgttcactttatgccagcatctannnnnnnnnnnnnnnnnnnnnnnnnnnnnnnnnnnnnnnnnnnnnnnnnnnnnnnnnnnnnnnnnnnnnnnnnnnnnnnnnnnnnnnnnnnnnnnnnnnnnnnnnnnnnnnnnnnnnnnnnnnnnnnnnnnnnnnnnnnnnnnnnnnnnnnnnnnnnnnnnnnnnnnnnnnnnnnnnnnnnnnnnntcagcaaggttccaccttctaaaggttctacaacctttccaaacatcacccactaagtatggaccaagggttgaaatatctgcgcctatgtggggctatgtacatttaaattacttctgccgctcacaggcccatggccaagtcttgatgcaaaacatatcccacccaactttgcaagttccttctggtctttaatagtctcaacaatattaaaaaaaaaaatccaaagtctaaagtctttttagaaacttgaggcaatctcctaattgtgactctctataaataaacatttttaaagtatatgcttctgacatacaagggtgcagcgtatacactcatatttgaaaaaaggagaaatggagcataataaagaatgagtgatctgaagaaagatggcacccagaatggaggaaaaagaccctgtacctccatgcctggcatttgggactcatggtggaatcatctcagtccaaatagcttaggtagctttgctaccagctctgctctgtagcacgcataacctctctcataggataggttcactctgagtgcagtttttgtctatggacatcctgctggctctgggctggaagattgggtgttcaaggcctgcttcaacgttatagtgagatcttccagtttctcaagtggcctcagtttcttatggtagcatctttgcaggtactttgaccctgtcacatatttcttgaccttagtagctctctatatccttggtacaatgtaagaagacccaaagaccccttcaatcttgtatctttcatgtctgttgacttgagggcattgggagtctgaagtgatcagggaaatgttagattccaaataaatggaatgtttgttagatttcatgacaaagggacaactccttgcccttcccctgactctgaacctacatgtttaggtcaacagcataagactgggaacatgaattaggactgggctataaaggctcaagatctaccccctatttctacttcctgcagtaaggttccacttcctaaatgttctacaaccttcccaaacagtgccactaactggggaccaggtgttcaaacacataaccccataccagacatttaatattcaagttgtaatattttctgggatactattttaatctcctcaaaactgcaacggtaactcgccagcaaggactttttctaggaccattgggtcttcgacgtggcaaaggttctctactcagaagaagcaaacaaatgcaagacaatactctgagaaccgacaccagattcattgagaacatcacagcatgatctttcaaaagtagcttctagccagggatggctgacatgcctgtaatccaagagactggaagattgggtgttcaaagcccgcttcaacgttatagtgaaatcctatctcaaaaatccaaacaaacaaatccaaaagtcctttctatttttcaacagaacactatttaatagatatataaaccaggattgccttaaataaatcataacttgatacttagatgaatttttcatttaaggaggctaattgtatacactgcagcactgtgggtgagggctgttgaccgtgagttggcaatgacctcattatgtagaactgggcattataaatggtagtcattaagacaggattctacttttagttaagggcaagacacaaaatgcagagtttcttaaattgggcagtctgggaaaggtccaggctgatggaagaggatgaaagggagaaggcttgaaaatccctgcagttggtggccagagaggactggctctgccttcctgtttgcatacttttcctgctgttacctctgcctagtgactgccttgcctttgatcattnnnnnnnnnnnnnnnnnnnnnnnnnnnnnnnnnnnnnnnnnnnnnnnnnnnnnnnnnnnnnnnnnnnnnnnnnnnnnnnnnnnnnnnnnnnnnnnnnnnnnnnnnnnnnnnnnnnnnnnnnnnnnnnnnnnnnnnnnnnnnnnnnnnnnnnnnnnnnnnnnnnnnnnnnnnnnnnnnnnnnnnnnnnnnnnnnnnnnnnnnnnnnnnnnnnnnnnnnnnnnnnnnnnnnnnnnnnnnnnnnnnnnnnnnnnnnnnnnnnnnnnnnnnnnnnnnnnnnnnnnnnnnnnnnnnnnnnnnnnnnnnnnnnnnnnnnnnnnnnnnnnnnnnnnnnnnnnnnnnnnnnnnnnnnnnnnnnnnnnnnnnnnnnnnnnnnnnnnnnnnnnnnnnnnnnnnnnnnnnnnnnnnnnnnnnnnnnnnnnnnnnnnnnnnnnnnnnnnnnnnnnnnnnnnnnnnnnnnnnnnnnnnnnnnnnnnnnnnnnnnnnnnnnnnnnnnnnnnnnnnnnnnnnnnnnnnnnnnnnnnnnnnnnnnnnnnnnnnnnnnnnnnnnnnnnnnnnnnnnnnnnnnnntttgaatgcaaaatgctatgatggagaggatcaccttcagtcataccatccttaaaccagaaaatcacagcagacttgtatgcagacgaaggaaacatagaatgtgaagtttgaaaatgtcaagacaagatatgaaataagttagcttcgggtggaaagagatatgtttggagttctgaaagagggagcattgtagttgtctgaaagatgtccactggcttacagcatgcagggaattctagagtgagaaatgtctgtacatgagaaactttagtgggagggaggactgtcctgtatgttaaaaatggatctcagaaaacacacattaaccaagactgtgacccttagctgtatcgtgtttgccctgaagtaaacattataaaatttccgtatgtgtttggtgggaaccattatccctcgtttcccagaaggcctggctcccttttggtttttactgagtcactcgtttgttctacttacctagaactcaaaggcatttgcctctgtctcatgattttgtgtcacttaggtgtcacagatcctatattattggagagtgatgcaagctctaactttttactgaccttactctgattttcttcctgctcgcatttctgaactgcttggccccgcctccagcactgtttaccacttagaatccctgggtcaatcaaagaagcctgaaacctgttcctttggcagtggactgcagtcaacagagaggtcaaacaactagtcatagtgctgagcataaaaggaacatcagtggtcaatccccaccccaccccacccccatctccccaccaaggctcagggaacacctctgaaggggaggggcaaccaatgtcagggcaggagaatgggaaggagtacagcgaagtggaccttcttctagactggacttggctatggtgctcgtgaacttacagacacaggagtgacctgcacaagatcaagacggtccaaactacagcacagattgggtagaaatcgatcaccagaccccatcccttcccgaggagctttgacacttggtagttgctaggggaagggagaatcattcattgtggagatttcccatgctccagtggactagctggactagcgcttatctaacaagaaaaaaaggcatgaagttgggaggggctgtgaagaacatggatttgcagggggaggtggggagtagattcaatcatatttcattatataagttatgtaacatttttatattctataataaatatgtataatataaataataattatataagtatgaaattatcaggataaaaatctgtaaagagaataaaagaaaattaataataaagaaaaaataacatttaaaaataaggcttaaggggctggttaagacttaagactgctcttcctgaggactggggttcaaatcccagcactcacatggcagctcacacctgtctgtaattccaagacctgacaccctcacacagagataatatgcacatgcaagacaccaatgcactacaaatacaaacattaataaatgactttcaaaatataaaccttaattctccatcttctcttgtgcttggatatgaatattttggttcttcctacagctctcctaagctactacagaaagcactttcagtttctacatttgttggttcatgacttttggcctgttctaaaaagacttgaggcagcttggagtagtaacaagacaaaaacaggatcagagccattaaaaaattaattctaaggatgagaattactggggttaatttgttacttcagtcagacatttaacttaatcgagtgtctcctcagatgagtaaaaaaaaaaaaaaaaagaaatgggttataaaattttcattgttcaaatgagaagaaccattcagatttagggacacagatctcatatgcggacattgactgaaaaagtatttcattacatggattcacataactattcctgtaaacattttcagtctgtatgtatgtacaaaagtggattatctgtcgaataaactgtgctgtcctcaagtgttctgggttctgatgggcaaagttatcaaggaccagtaagtgcacttgaaaatacattatcccttatgatatatatatatatctgtgacagattggcctcaaggccctcacatattccagcattaaggaagctcaattctcccacataaagttaccaacgttttgtatgtcactcccatagaccctcatgtctttaaatcatgtctagattcctggcaatacttactgtaattaaagcaggatataagtggttgttatgttttgttctttaaggggaaatgaacagaaaaactgaaaaaaagtctagatgtgtttagagcaggtggaaaaaaaataccttcaaatactttggatttgtgatttgttaaatccatggaaataaagcccagaagattagactgcatacagttttgaaaaacctttggctgttgatgtctgcatgtgtagtacatcagataaaagttgcaaggtagatagatgtttagaacaaaggaagcacgcaaagataaggcagtggaactggtggttggaaatgtaccaccagtctgtgttttccacgctgaagcccttgcctggccaccccaaagctttagctcctgtatttcaatggctcacctagcccgactgccattcccagagaagagtctccctcctctgaatcttggatctattgcaggattatagttcaaaaggcctccaggtattttctccatatgaaggatggcattccatccgtatgaaggatgagatgccatttctgcgactgctctgccggtgagaagcaagatctggtgggcacgaagtggtgatttacctggcatggtcttccggagactttccccctcaagccaccactgcatcacacagacatgccactaaacacgtttctcagtgaacttggtcttcaagcgttatgaggaatccatcatcccccctttctttcctaagagacaagggggaagtcagagatagtttttctcgacttactttactggggaagggcattgagaaaggctcacattgtaggccaagctaaacttgaactcctggcaatcctcctgccttagcctcccaatgagagggattttacttcttgattcttaatgcaatgttcttttattctccttccaggtacatttgaaaagtcacatacatagcaatttgcatatataattgcagaatgtacttgggtttaaatatattatagcattatattctaagtgacttcaaattccttctgaaagttaggggcataatataaatgaattaagtaaataaaaagccattactttagttccctctgtgtgtagcatgtgtgtgtcgtgtgtgcatgcacatgtggtgtatgtgtgtgtgtgtgtgtgtgtgtgtgtgtgtgtgtgtgtgtgtcagccaaagctcataatgtttggagtttttctcaggtgctacgcacgttattttggggacttggtctctccatgaacttggagttgcccagagtgattagattggctgaacaacaagggagtgaagtgtccccacctctgctgctctaggtcactgatgtgtccctctctttatgtgggtactggatacccaaactcagaacctcatgcttgcacagaaagcactttaccaactgaaccttctcctcagcctctttagctcctttagcaatcatttctagtttcctttcttgcacgtggctttttagcaggaaagttaattctatgtgaccagaatagtttcacaagtgtttttcagatggtgtgagagcccctttgtttctaacagggctttaactcattttgaaactggagatctttcaataaatttcaatatcaaatggccaggaccagagttatataatgatctaaggcagtggttctcaaccttcctgctgctgtaacccttcagttacagcagttaacagttctcatgctgtggtgacccccgaccataaaactatttttgttaccacttcaaaactgtaattttgttactgttatgaatcattaagtatccacttatgtatatagctgtctcctgtgaggctatgccagtgcctggcaaatacagaagtggatgcttacaatcatctataggatggaacacagggctcccagtagaggagctagagaaagtacccaaggaactgaaggtgtctgcaaccctaaaggtggaacaacaatatgaactaaccagtacccccagagctcgtgtctctagctgtgtatgtagcagaagatggcctagtcggccatcattgggaagagaggccccttgttattgtaaactttatatgccccagtacaggggtatgccagggccaagaagtgggagtgggtgggtaggggagcagggcagagggagagtatagggaactttcgggatagcatttgaaatgtatataaagaaaatatctaataaagttataataataataaaaatgaatcattaagtaaatatctgtgctttccggtggtcttaggcaacccctgtaaaaggaccttttgacccccaaaggatcaccacccacaggccgagcaccactgatctaagtgttcttctttctttgtgtctatggatgcactgtataaaattctctgttctgagatggtatgaacagatgaaacatgcgagagaacgtgcctgcagccacataagtgttttagggaagatatcaccaaatcttttatttatatatactagggggatctaatgtgttcaacttggtaactcattgagacaccactgtcttcagtgttgtttggggatggtttggtggcagctggagatagcctgcctgacagttctccgtgctctctgagaaggttgaggctcctaaatcacccattgtgcaaacatctattccctagtaagttgtggctgtaagattatacatccatagcaagagtttgatggtgctgtaaaccactcaagcccagctcttataatttattgaaacatcagctcccctcaagggaattatagacagataattaccacttgtccagtgccataaagcaagtcaagtgcctctggatttctctatgtcgaaacaaaacccaacactggggagggagcaggaagaattcccaaatgagactaaacagcttagcagaaaggaatcatatcacaaagatgggacccttttgataccgatggttctcgatctctcctcattggccaccctggttaaatcactgcaaatccctctcttggaaaggcttctgtagtaattggcattctttcccagcatctctaaaagcctttgtttctatcacaggctttgtctcttgaattctggcttcatttccacccttctgttccccaccccccaccccaccccttgtccttttcctctcgtggtgtctgtctctgacagactcatccttttcagccacgaagccctttcagcagcttgctcacatggggaaaagtctattccacataggaccctctgaggctgctacatcaataaagcaaattgacagcaggcttaacacctttcccaatcattgtctgtggatgtttttcagagcaagcaatcctgggatcccttcttttatacaagaatacaccctcctggcagagagatcttgttgggagcttcaaaaggaaaaagcagaacaaatgaagaatagaagataccctgtggtggccttccaggcacacacatccctcccttgtagaggaataggaacagggagtatctttgggacattgggggataactctccctgaacgagacaggggacagagcacctctgctttatcaccgcagtggctactctgctgtctttgcacaccgcctttttttagctctctactgttctgattcaacagcttagacaagatggcattccttcctctgtgtctttctcttgggagtctttcacaatgatctctgtcaaaattctggaggatgggtcagcctcatacctttctcctgtcttctgaaagtagaaagagctatcacaataccccagacatggtagattgttcatctcaaggttgttctgaaatgtgctgacagacagtcttagtgagttactgctgtgatggactctttctttctttctttctttctttctttctttctttctttctttctttctttctttctttccttctttctttctttctttctttctttcttccttccttccttcctttctttctttctttctttcttaaaagtccattctcctgtgtcttcctccccttctttacacaaaatattaggaaaaatttaaaaatattattatcacatgtccttctgggcagagctggttatattgagtgaccccagtgagaccagggatgggacagaaacccatgtcctctgtcttgtaggaaatgccccaccttgttcctccaacctcccatagccacgagtagagcttggaaagccctgtacattaacagagggaggagggaaggtgcaggtccctcagcgtctcgagcatctgagggatgcagctcctccaagttctctaccatgcaggcacctgagagcagagtgatgcatccacgccttactccatataaggcgaatcttaatttggcagaaaatccttccagaggaggcaaagcatgggaaggcatagctacagcctgcaggcagatgtgcgccttcgaaaagccgagcaaaatttccagtgctactctgctccaagggaatggaaagagagaaggagccaaggtctggacttcaaagaaatgtaactaaaaatgccttccactctgattttaatcttctcattggccctttctgcgaggggggaccttgagtgagtggatttgccttctccttcagtaaatcaaagcttttcagagagggttcatcggcagggactccttaccccaggaaactgtaattggaggtaaatattaattccagaggaaggcctttaagcgcaaggagcgcggcgacaatgtgcctccaaggaaccacttcttttattttctgtatccgttggaagcagattgtgggagcaaagcttatctcccatttttatccgttttttaacaatgccctgcctactgctagttaaactgagctgccttaagctcagcacaaaaagctcttttcagagcatctagtagataacttttttttttttttttaaagaaaagaaatcttttcacatagctctcctggtgccctttcatgagttgggactctgtgcaggcagctgagcctgagatggcttttggggacaaagccaccatcaagtattaagtccacatacattctgtaaagccaccgccatatttggaaactcctaccttccgcctcctgtgcactgtgctctcattgagtccagtgtatgtgcatcagtaaagcacagtaagactgtccaagccaaatacacgtcccaccctcactgggtgatgatgtccaatgtggatgtcctcccctggagcctggctggattgcgtgtgccgaaagtgatgaaaaagggagttcagagcccacagaacggtggccagattccgtgagaagcctgaatagctgggttcgtatcagcagccctagtgctcgactgctgctttctctgataatgagagaaatttctggaatctcattttccttcaacaataagggcaggggtggtgcccactcagctgcagccgccgatgagatttctgaggactctgtagtctattttcaaacctctgagccacgctttgaagtaaggctgctttgaagcaactctgaacgggatcctgacgaacttgatgcgcatctgagaggtgattaaaaggttccgggtggaagagctgaccccgtcctctcaaccttggctgttcggactgctctaacctgcctgcagtgctcacgagtcaggcccactgcgggtgcccggaccctggcccacaagtagacctagatttaagggaaaataatggcctcgtgcaggcttatcaatgatatctgcatctccctcacgccgcgtttgctttccttagcttccctgcaatttgcctgctgaggctgtatccacctcattaacccgagtacccaacctcacagggcagagggctgtgggatcagatagcctgttagtgttatcctacactggtacaggctgtctgatcccacggtcctctgtctttagacttttttttttttttttttatagcattgggtgcccgtgtgaagaattaactcttgggaaaggtggctttcttcgaccaatgtaaggcctgtggtgactgacagctacaggttgtcttttcactagcaggggtgataagtcagatgttctgaaaggagaagaaatctgtgtgacatcacccaccaccatcccctagttataccagaaatatttcttctgctggcagcgtcctgttcttgatttgaagatgaaatttttagtgaaatggatgactcttaagagtgtgccacttcccatgtgccaagaaccaagttgatagcagtaagcccagtccttgctatgcttgactcaatgaaatgccaaaccaaggccagctgagaatgccccgagatctcagagaagcaccatttaaggcctgtcctctttagcagacttgagaatggggcctaccatctggagaagacagcgccagttctcagatgcctcaggaaacttggatttcaacaaaagaaaaatacataaatatttatctaatcacataattagagaaaaacctactggcctctacagttgcaatctaaatagcccacttcattaaaatgcagaagttcttgtgaaacactttaaactattttctcctctgaatggttttatttgttaagatgaggaagaaacatttgccttaaatatataacattaaaatttaaatatatttacatatgcttatgttacatataaagacacttatgacttaaatatagcatcatacacatatatagactacctgcactggctttactctgtgccttctttccatttcatttggattgtcagtggttattggtactgatagaaggccttatggaacagcagtggcctcagctgcagcaacaatggcgtctccttctatgttaccaggacaggacaggacagcaggcagatttgtctacacaggtgagggaagtggagaactgaattattcaagggatttgattaatgtttatgtcagagcaggaactaatgtatcagtaatggggaagttcaattagtactttaattaattaggctcccatttttagtcatattgtgcaggataattatttgttagctttgcttaggacctgagttaaggccttgattacaggtatttaaaaaaaatataatacaaggaggctggggctctctggagtaactaaaagctcccaagattagaaaatgtcagagaaaatgcaaacccttgctatttcctaaagttgttaaggactgtgaaaagctagaacatcgttcaaaacaaactgttgggattgatgatagcatcggagtgggcagggcctctgagacattgattcttctctttgctttttcatctgggccagttttcactgtgctgtcatgtgcaagtgcctactaggcaagctgactctggtgtcgtcttctctctctctctgcttctgctaggagcttccttgactaagaacaacaataaactcactaagaaatattccagttcgggaggcttaatcttacagccagaacagaatggagcaatgctttcaggggagcctgtactgttttgatttcaccccaactcacagccagcttttgatggtgtctgaaaggcgagggacttgatgtgtgcacacctgtctgtagacagacttgccttttgtttgtgttcttagtgagccagctgtctcagactttagcatgcacaaggattatcacacagaaatacactctggaacccaggatagccatatcctacgggccagttaaggaatttctacggagggtttaggtgatgagagttagagtataaatcagatcaattgttgaactcctaggttaggaaatcaatctactattctcatcaactctggctttccagtatgataaaaacatgctgctaaaactactacaagtacagctgattatgcctctttgaatgagttagacagtatccagtattcattctataaagtggggtacttgctctagagagcttactgtgttgttctcagtgggaaaaaaataaaattcccaggccggctctttgattctcagcctttcgttgtccatcgtgacttctttaaatgtctgtggtgtttgtggagtgtgatttcctcctaacattagctgtggacacatttttgtctagaaggaagactgccttagttgtgtgtgagaaagtttaataccacagttctttgttttgtaaactacaacagtcccagtgcacagaactggatagagatgtatacagtttccaagagtactattgttaaaatagcatgataaaacataagattatatctccacctcaccatatctaaaacaaaatgccttaaactttctttagtttctatctgtgccgtactaatacccatgaagttacactgctgtgcttcactgtcagcttttgaaaactgatgcccatattcatacgtttatttatcatggtgatagagtctataattttagcttgaacctgtcttcagttaattctagccttctatatagcgttctatataatatctcttaccctgccttttagtgatttgtatgtagttggcatgagtctttcatgactttaaggcatctgtgaaggaaattcttctttttatgaaggaaacatctataagtaaggatgtcagaggaggaggatgggagcgaaccagcaaatgaaaaagtattcttacaaacaggcaagcacacatggccctgtgccttgagtgtgaggctgtacctagtcaatgagtgtcatcaggaggaaggcttggtagggattgtacattcaggacatatgcagtgaacataaatatttaatgtgtttcttactttctggcaaaaagaaaatgattgacaatgcatagcctctgctttcatggtaaaggaagattatagatctatggtctgctttgtgtgataagttcgaaaattgcatgggtttaggcctctagaaagaataagacctcgtgacagagatgccctctgtcatcatgcaagcaaactgaaaggtggccagagtgtggtaaacagggcttcactaaccccgctatggacgaatggagaagtgctgtctacccatcagagcttgaacattcctgaagcaagaggcaaagaggcctgagggtcatgcaccacccatattgtcaaacggtggggtcatgaccttcaccatttgtgaagcgtctcacctgagagtcacaaccaacctttacaactgctggagcagcctgaagtaggagctcattcagaaacacacctttgctggactcaggggtggggggagggggaacagcaagaagctagtcagtaagatcctagcccacaagacaacctccaccaggaaagatgctcagaaagaaagcaatggcccccaaattgtgcttgatgagatcgtgcttgcctgccagagagacttcaggaatgaatgggcaagctgggatgtccctggaaggaggagaggtaacagctccattgagctcctgagatataaatggactcagcatatctaaggagcaaatctgaggagggaggggttggacacagatgaaccagaagggagcaataggaagaataagaaatcagagggacacatgctccactatgttcatagcagccttatttataatagccagaagctggaaagaacccagatgcccctcaacagaggaatggatacagaaaatgtggtacatttacacaatggagtactactcagctattaaaaagaatgaatttatgaaattcctaggcaaatggatggacctggagggcattatcctgagtgaggtaacccaatcacaaaagaactcaaatgataggtactcattgataagtggatattagcccagaaacgtaggatacccaagatataagatacaatttgctaaacacatgaaactcaagaaaaacaaagaccaaagtgtggacactttgccccttcttagaattgggaacaaaacacccatggaaggagttacagagacagtttggagctgtgtcaaaaggatggaccatctagagcctgccatatccagggttctatcccataatcagcttccaaacgctgacaccattgcatatactagcaagattttgctgaaaggacccagatatagctgtctcttctgagactatgccggggcctagcaaacacataagtggatcctcacagtcagctattggatggatcacagggcccccaatggaggagctagagaaagtacccaaggagctaaagggatctgcaaccctataggtagaacaacattatgaactaaccagtaccccggagctcttgactctagttgcatatgtatcaaaagatggcctagtcagccatcactggaaagagtggcccattggacttgcaaactgtatatgccccagtacaggggaacgccagggccaaaaagtgggagtgggtgggtaggggagtgggtgggagggtatgggggatagcattggaaatgtaaatgaggaaaatacctaataaaaagtatatataaaagaaatcagaggagagcccacctacagagtatggtggaaagagtggcttttgttctaagtacctcaggttatgctgagagagtttccatgggggaggaataccaaagagagccctttgtgtacatggtggctttataaataaagatgggtttcaatcagggactgttgcaggatgggaaaccttcttctagaactttcttatagaactcgggtccaggcataataaggacgaatgtggacatgggaggtcagatggcaaccttgacagttttcttgctgagagtaagccaggatgaagaatttgtgaagaattagcaagatgcctgctcttgaagagacaccccaaggtcaagacctcaaggctcctgaatggagtttgttcagtccctcctggaagaattctaggaaacaccagaggccttcttcattcctctggatatgaatcctctcgttttttgtcttttgttcctgtgggtcagctaggctgattgctagcagaaggacctgctgtattatatgaatagccaggtgtttaataaggagatttctatgaaaacagaaagccaggttctgaatccaaacatggtcagtagagaagactctgaggtctcatgcttaaagaaggtttgcttgctagattgaggccagcgttgctaaagggacagactctcagttttcacgtggcatgtgttttggtgataactggttctgtcagctttgctgagtcctgatccagtccctgacttctaacatttgtggatcacaggataggagcccactggtattcccaaaacacatctctggatatttaatgctacaaatcaagttaccagactgctagataaacccgtgccatagttctgccttcagtacttcaatactgacctccaagtctgacttgctttagagtgcttgacacacaaagttctactcagtcctgccccttgtttcacttcagctccattctaggcttagaaataagacccatggtgaggtagaaacaggctggaggccaggagggcaaggaaccctcaggtctcagacacacaaagcatgacttagctaggggatttgtaagcctacacattaaccaatttgtggagagcatctataacagagcctacaaaaacagattctgaaatggtgtgtgtttgttgcttttgttgtcagttatgtgtgtgtgtgtgtgtgtgtgtgtgtgtgtgtgtgtgtgtgtgtgagagagagagagagagagagagagagagagagagagataagatacacagaaagcagacgatgtctcagagaattctagaacagtgtttgaagtggatggagcatgcctgcacagctttcctctggtgtggggaatcattatttcatcttcccgtttccagtggctgctgctattccttggtatacagctccatcactccagtctttctgtttctggtgggtaccgctaatccttggtaaactgttccatcattccatccttcgaggatggtcttaggcttctttctgcttagtgctcatatctcctcttgtgtgtgaggtcaatctttctctgcctctcaggcattgggaatcttgtgattctctttagggtctatatgaataatctgagatatgtccatgtcaatatttgtagtttaataacatattcaaagcccctgtttccatttaaggtcacatttacatattctgggtgctaaggtctgttttcttagtgggactgttattgtttcaatcaactcatgtgttccaatttgaatgatagcatttggtgaggaaaaaataatgaattcaaaaagtatcagttttgatggagaaagcacataaagttgttagaaagtttaatatagaaagataaatatttcaatgttgggtgttatagagacctttatcagtgatgataacattttttaaaaaaatgtatgactttatttcatgattaggaagtaaaaactatagcatgtacctgaaaaacataagcctttccagccaactgtgtttccaagtttgttattaatttgttattttttatttgtgatgagcaggcagcaaatcataccatgtagagaataaactgtttgagtgatttcaaaaaaataaaaggtgaacatacccacactggcagtcttggtgacaagctctttttctgagaattggagatagcagccttgaattcaattcaacttttcaattaaactcaaaatgcatttattgagaggccagtaactgccaggcactgggctccgttttgcaaatagaaagataaattatatcccatgcatgtcctctgagacctcacagtttagcttgggagagggaatggtagtaaacaattagtaaaaggaaacaacacagtgtgtgttgggagagggttgtgatagaagtgccaagatagaggtgcaaatggaaaagagagccaagcaaagtgcctgatattcaggggtcatttagcacatattcaaatgaaaagacccaccccccatcatctggaatgtaagctgttcttacctcctgtttcaagtattggtgccactattatcctcacaaatccattctccaaagaggagaccatgtcatctctgcctacaacctctagttgcaactgagctcgctggaaacaagagctccttctcagccaggcccttccagacctgcctaccttttggtccttgattcaactacacaagactatattactctagaacctctgagttctctcctggcccaggccctctgttttgtactttctgtggctctaacctgtctcctgtccatccacgtctctactctggtattcctgtggagagaatccatctttataagagggcacttccagtgaatcgcttccaaaaggatgtcttctctttgctttcttccatactccattgagatgcaatttcctaaggcagggaccttgttaatcttgtgcagcatcttatccctggtgtccttcacataatagaagatcattctggcacctgggatggtatggacattcaaaattccatcagcaccttgatggaagaagttccaaaaataatataacaataaccaccactataccaatgcctagcatcctaggcatgggtgaaactaccctccaagcctgtacaggacctcgggagttaatgatatccagctcattgtgcactgttgtaaaggttttataaaggacaattttagtgtcccattttcataggcttgagttagaattatgacataagaataaaaatgaccttagtgaaatgcagcagtattttaaaataacagcagtccagaagagaatcctggtaatctggatttagctacatcctttccttccttcactggcttctattttctgcacctcaaagacaaaatacctgtggtttatttgcaactagagaaagtcctggttaaataaatgggccttggtagcttaaaaaattcagtggtcagtatttgctattcattggtctctgggctctgttttgtctgagcgcctagtctctttttcctttgagttatcacccaagcatcaaaccagtatcttctgtatgccagtcatattaaattagaggttaaactgcaaaagctcctgtgtgcaaaggctgggcttctctgaaaaaagcttctggcattcaaagccgaagcaataaacaacaaaagaggttggtgaagccgaacaaacggccttaattggccattaagtgtggactgcgtggagaataatgcctaaccctgcacaggggtatctacctcattggaggagggttcccttggtggtcaaacttctgatgaatgccaccttcttccttcctcattaaaaacttcctcggcatgttgtcatggtgaatacctatataaagagagatatatggcttgcatcttattcctctgattcttcaactcaatcaagcttaattgttatatatttgcctaatgaaaaaaaaacatttaaacctatttttcacttaatcttttgactagaaaaaaagcagtaaagatgtttgaagtttgtttaaaccatcagagcataaaatagtgggttataattattatgtaaataacacggagaaactgaatcagaagttcttttataactagaataagacatgcagggttcaggcaggtggctgagggagcacagggcactgggaaagagagccattttgtttctacattgtagttcagctctgaaggagtcttgactcaggaatacctgtataaaagccactatgtatgggtgactgtcatcatagattatagcatcctgcagtcctatgatcagctcctctggagagaagcagccatatgttcaggtcgctaaagaggacagacagtctctgcagatatccaggagccttgtggctgtccaaggacaccagaatttatgatgacaacgggaacacagttatactttaaacaaaatagaaaattgccattagccgggctctattaagaattctgaagttcccagagataaaaatgaggttgaattctggtgtctgagacatgctgcgaattgcactgatcttaactactggcattagtgtgagcaatactaggtgttcaccacttgcattctttgcatcttaatgcctggatggttccatagtccaaacactcacattcagaggctcaaagacgtcagaacttattatactaaaagttttcatttatattcattgctaaaaacttgtgcagcagaaaggatagtgttctgactttcatactcccattcctgaagcagtcaggaatgccacggagcccaccagcacatcccagtacattcaagcattgggtgcccatgaaacacaaacaaaaaggggtcccttatacagtacagcatgttatctgggccacaggttctgcaagcagaataggagttggattttggtcctgattagctccatatatattgccctccacaacattcctattggaacaatctgcaaagggcctcctggagacagaaaacaaactgtccccaagaagtgtgatatattttattttggaaagcaatgggttctgtactttggaacagttttaggtattgacatattagtttagaactgacttgttaaaattgttcatttataacaatcaataaactctgtgtgatatgttattattaaacactataggttttgttttgttttgttttgttttgtttgtttgtttgtttgtttttagtgttccttccctgttttaagatcctgtctagtattctgtattacatttggctgttaggtcaccttagactcttcttcgctgtgacaacttcccgtccttccttccttccttccttccttccttccttccttccttcaagattattttttagtaatcattccattcatttacatcttacatgatatctccttcctgattaccnnnnnnnnnnnnnnnnnnnnnnnnnnnnnnnnnnnnnnnnnnnnnnnnnnnnnnnnnnnnnnnnnnnnnnnnnnnnnnnnnnnnnnnnnnnnnnnnnctccccacccatacacccactcccaccccactgttccagcatccccctatcctggggcatcaagcctttacaggaccaatggcctcccctcccattgatgtcagataaggccatcctctgctgcatatgcatctagagccatggatccttccacatacactcctgggttggaggtctagtccctaagagcactgggtagtccggccagctgacattgttcttctaatggggttgcaatccccctctctactcctccaatccttctaccacctcccccactcgggtccctgagctcagtctgatggttggctccaagcatctgcctctgcattggtcagttgctggcagaacctcccagagaacagctgcactaggttcctgtcagcaagcaccttttggcaatggcaacagtgtcagagtttggtatctgcagacaggatggatccccaggtggagcagtccctggatgatccttcctccagtctctgctccatttttttgtccctttctttctttagacaggaacatttctgggttaaaaaattttaagatgggtaggtgaccccatccctagactgggcggtgtgcctatctactggaggtgatctctataggttctatcttcccttcactacattaagatttatttttatgttatgtatatgagtgctctatctgcaatcagaagagggcataagatcacattatagatggtcgtgaggttcatagatgtactatgtgtttgctgggaattgaactcaggacctcttgaagagcatcctgtgctcttaactgctgggccatcttttctacactggctgggataatctcttaagcttgcatttgttttaatgactttgacaattttatgggagttaggcagatgtaggatagaatgtccttgtactggaatttattaggtatttgtcttattataagatgggattttgggtttgggaaaaaaagatcatgggggttcatcccatcattcacaggcacacatgttgaacatattttatgacaaccaatgtgaactttgacctcctgcctgaggctaccatggtcagtttctcactactaaagctgcttcctcccctggcccactgcatgatttgaaaggtgctcactgcgcagagcccacaggatgcagcctgtcatcattttctccacttttggtggagtagcagcacactttgtaaagaggactctgacctctttgcaaatgctgcattattcaatcacttgtttatgtcagtgtggacccatggctatttctatactttagttaatattgtgagaatccttcattatgatgctgaaattatgtcacctttggccactgggatctttctcagttggcgtgcatgcctgcctggcatatagacaccactctgaactttcttacatacctggaagcacaagatgccgcaggctagtgttgaatattctcttttctctccttcatgtatgggaaaggttctttttattaaataatgccattagaaactaaaatttgttgctagtactcataggtagtttccttcagatgccctaaggcaacaaagaaatgcatacttgtctactaacctgtctacatatacatatgtatatatctacatacatacactttttctatatataaccttttctatttagagtaaggtaaacctgaattattatttatatctccaatactagttcattactacattctggcctctttctcctgcttcattctaacagtaggaaactcattaattgcttgatgctatattttacctctgcttccatgggaaagaacttgagttcaaaattacagtccagtactattattggatagctcagattgtctttagtctcatagactctgtttgtttccataaatatcaagttcagatcctttctctgttccattttcatgagatttttttcacacattaatatatatatatatatataatattatatatacacatatataatcttgtcagtctgcatttatttctggcattcccaatgggaagatgtggttgtttattagtcaaattaatcttatgttcattaaaagatggtttacatgatgcttctgaaagtagatgtttttatttgcatgattatgcatttaattttaccataaaagtacataattatctatcaagtaatagtcttataaatgctattaattaggacaaagacagatatatgtattttaaaaactaaatcaattcaggaaacctgatggggaattgtgaatggctccagtttgggattttgcccacaaggaccatttatactctgctgttttttatgcactgtaccttcaaagtccaaatttctctttagatccccaaaataggtcatccttgacatttcaaaatgataaaatggactgtatgtgtgtcctacatatatttatatttgtatatatgtgtgtacagaatcttgtgtaaatagcaatgcttctgtctctagtctcatatgactgtattctacacagagcaataatcaatctataactcagtcaacttctcaagaaggtggaagattttttgacagggcagaaagtagaaaaccacaggggaagctggatgttgtcagcatattcagcatgacagtcctggtgtcaacacgagcactttaattcatcccatggaaactcagatgagaagcagcttcttggctggggcatgggcatggtgctgatgccctcctaaagacaaatctttatgcccgtccgttagtacacctctcgatcttcaccacagaagcttcttattgtaatagattaacagatatctacaattgattaaggttcagaaaatttaaaaaaaatgggagattctcagtcctcaacatgatatctatataatacaaggttcagggatcatggaggaggagggaaacagaaaggttgtaagagccggaagtagagaatgtctacagtgtagcactgttttccagacataaaagagcatgtgctgacagtgactgtgacactgtgatggtttggtatatgcttggcccagggagtggcactatttggaggtgtggccttgttggagtaggtgtgtcactgtgagtatgggctttaagaccctactcctagctgcctggtagctagtattctgctagctgccttcagatgaagatgtagaattctcagctcttcctgtaccatgcctgcctggatactgcgatgctcctaccttgatgacaatggactgaacctctgaacctgtaagccacgccaaatgttgtttttataagacttgccttggtcacagtgtctgttcacatcagtaaaaccctaactaagacagacaccatgcatgggatccgcacacaatcaaccagacaaatatcccagcatggaggatgaaggtggccagggacttccattcccagatggggatattttggcaattaagtcagattttttgaagtcagggtccccttgttgtttagtcttggttagttagctcaaatagaatagctcaaagaaggaacctccttcaaataaaaatattttgtatagttttagtccatttgatgcatattaatatcagaaacttaaagtgagatattgtagttcaattttcaggaatctctttttgatataaaatgaaaagtagggaaatgtagtcaaaatttgagcacagagacagtccttttatcattactgaaaagtaaaaattgcaacccatccaaaagtccaatattaagaaaccattaatataaaatatgctaaatattagcaacagaatattcttcaagtcttgcaagtcaaaattataaatgacattaaaaaatcttcatactatcatttaaaaatagaccattgtaaagttctgtaagtggtatgagtcataggttggtaaaaatgtataaaatgcagattggcacaaagtgttccaaagtgagatacagtttatcatagaacttgtgttctgccccaagatacacacccaatgaggatcagccccagcttttaccccttctatcttggtgtcctcaaatgacttgttataaaatttcttccaatcatccattaggatattgctattgaagttatgatatgatgagaaatatctttttatatgttcacacacacacacacacacacacacacacacacacacacacacacacacacaattttccctagcatttggtatgaagcctaacaccttggaatttctctagaggcagaggtgataggatcaccttactactgacaagtcccctccctggatctgtttatgctctttaggtgactggtgctggtcccctcctacccccatctagctgtagggtagagactggtcatcaaagacaaaggcaggagtatgacattgagcttttaatcccacaccctcctcccccaaccaaagggtaaattcagtcatcagtggccaagagtttgctccattatgcctgtacaagtgagtctcaagcaaacctgaatatcagaaagctctggcttggcaagtacaggaagtcactaagaggccacgtgaatcccatgctcaccccggcttcaccctgctcctctcttatatgactaattactgagtggcatcccctgggggtaaaccaggacaacaaggtaaagtactttccagaattctagaaactgttctagcaagtaattgacaacttactctaaggaactttgtggggatcactgatatataactaggtggtcagagctacaggtggcctggctctaggaactgtcctttcaagtgtggacagccttagggtaaggagacatttaaccagttgggatctgacagtaacttcagatagcatagtaacagtattgaattaaatttctggacaccctactggtgacagatgaaccaaagaactggtagtagggaacactctaggaacaatatatttttgtcacagtaagggcttaatcaggaaacagatccaccctgggtattaaaaatggaaagaatttaattatatcttacagcttataaaacagtaggaagaaaggaagaagaaagtcaaggaaatttacaactatgcccaaaccatcagggaatctgagacaagagtgaaggaccataggagaatttggcccagccagctctgagctttgagtagaggactagaaaacaattcagagactgccataaaaccaacttccgctaagtaccatcttccactgtagaaggagaataaatagcctcggagtaccaattatctccaaagtctagatccagcatgtcagtaggtgagaaaatatgaattgcagaacctgtggtgatggagtctaagaaatgtagcccttggtcttcaaccccaaagaaagcacatgaacacaggaatggatgtgaattgcttacacttgttttaaacttctatcgtagagtattgtaacagttttgtgaggactaagttacatatgtatgtacagtgttaacaggacatatgggtaatttcgtgtaattgatggatttaagcattgttcattatgatggtggtaacaaagccggtatgttagtggaataagactaggtatctgtctttttgttaactcacatttttattttattttacattgagcaatactttttatttagagagttagcttaacccccaacataaatgctggggagtcatgttttctgtaacaaatattggtgtcagatatcaatcactggatgtaaggtatggatcatttgaaaccctcaggttacttcccagatctgccgtctggggaggttttcattttaattctttaattcttattataggcattgagtgagtttggaatcaagtctttatttttgtgtttcaaacttcactatagtacctgctgcctttcttaaataaaaatgctgctgccattcatcagaacaacttggcaaaagccggaaatagtaagtgacaagcagagaacgctaattgtagctgggatagagcaagtaataagaaaatgaaaagatattattttcagtaaacccaaagagagaattccagctaaagactgattaaaatgccaagagagaaaatgttgttttcaagaagaaaatatataaaagatttggaaagcacaatccttccagaacaaatcttaaattgtaacatactaccaggacattttcaatgtgccatgctgtctactgagttattattgctggctgtaaacctttaataaataatgtgaagcatgataacttgctattttaatcaagggctattattagaatgactcgaaaacctgagctttgtcccacttagtgtattaaaataatttttttcaaatacaccaattatgattgtcagagtaagtggaaaataatttatttaggagagaacctcattcttaatactccgtacccaccgacccacagatgattaattctttataaaccagctgcagccagcctcagaagagccgtctcattattggtccgttattgtgttagtcctttttgtaggaaccgattagtgggccaattaacagccttctccttagaggtctacagctcaggtgggggaggggctgctccttccactaaatcctttgcttcagtcgcctattttgagcttcagacataagaataaaggggagagagatttcccagtctttggtcttctcagcattgattaaaaatatatctgagatttagacaaactctaaaggagaaaggtagcactcatgcatcagttgttgttgcaacaaaatgtcctacaaaaatgatgtaagaaacggtttattttggctcacagttcaagagtacagcccatcacaaacgagaaaacctgctagcaggggtaactggtcacattgcatggatggttaaaatcagagtgcggactggaggcatgtgtgggaggggcacacgatggtgggggatggagggcagctgatactcagctcattttctcctttgtactcagtctagggcctcagcccaggaaatgttgctgcccacagaggggatcttccctcctcaattaaccctatttagaaattctgacatccaatgcccaggtattggtcctgtggaggagataatcaatgctaattattatcaatactaatattatatcttatttcaacaaaggcctttcgtgtgtgctttcttaaaatgtagtgtttagccttgttttcttctgaatccaaatgcctaaaatgttgtctggcatatagtagctgatcagtaaatgtttgtttcacaaataaatgaagacttgctaagatgttagtatacaatagtcagagaatggggctcctttgtataggcagctcccaaactaggagagaaaaagacacagcagcagataaatctaaggtagtatgtgctgaattattaaagtgcagacacaggaagagtgcaagacaaagacagttctctctcaagttggcagcttgggttggaggagagaaatcttcctagagatgaggtcacagaagtttcatagacttgccaggaactcaacaagccaaaagggaggctttaggccaaagcacagcgttatgtaaagacgactcctggaagaacatttactgttaaaatataacaatatttatttaaaaatccatgcatttttttttgagatttcataatcaggagtctcaaatggaaaaaatgagaaaacttggggaaggagaggagttggaaggcaaatctgaacgtgcagaaattgagatgttgaagaaactgaggtttagcaatgccaagttgttcatggtcccgaggacaaccatggagtagagtttgtgagtccctttcctgagcatacccactgctactgtgctgtgacaggtagtgtgggctgcctgcctccccccccccccgtctttcattgaattagcagactcaaggaatagctcattttcgaaggcttccttggtgaccaggaggaagaaatcagaaggatcctgtgtgatttggatgattttccagaatcctattttgcctctacttggttattgtttgcttgttttagtttttattgtttttgttgttgttgctgggtttttttttatagctcactgtgttgcttgctcattcattcattcattcattcactcattcattcattccatggttcaagcttacagatggcaagctctgtgctacacactaattcatagccctgtgcattggcttcattgcagggacctgagggaagccaccatctctcacctcattttccacagggtcattgaaatggtcattcaaatgaaatcttactaatggagtacctctttaatttaagaatttcccaagcaaacaaattactacttactgaagaatactggagtttcctcaaggcaggagtcctcttacctggagactttcggtgcatgttatctgcctgtctgcttcatcttatagattgcagagctttcaatcactgttaagatttttacttatagatctggttctcaaagccttattctttggggaatgtggaaaaagaagggttcactttgattatttatcaagaggagatgatgattctcacgtgcatggatgttgacttggtcaaagattgcattctctgtacttgttggtaagtcctccttgtactcaaagcagacctttgattctgagaataccactggttgccatgtcataaataaatctgccttggctgtagccagggagaaatgataatctccctttttttcctgtctcggcccccggttgcctttagtcagtgttctatccctgtaatttacacattctgtatgtttccccatacatttttccttcagtgtttatgcatacatcaccgcttttgagatctatatattgttttcatgtatccaaacaccacagccttttataactgcataatttcttcctagtttatgttcactgaccacctaaattttctggattagctatgttaaaacaaaacaacaacaacaacaacaataaaaaaaacaaatggcatgtgtcaagatgttcacaataacaggacaagataaggactcctggaagacagggctcaagcaaatagaccatcccagacaatccagcgttctaggcatgcacactgtaacaaaactgcaaggaaaatcacacatatacagttcgtcatgggccgaataaaacttgctgacccataagtttcagaagtaccagaaatggcagaaggtggggcatctgcttcttttttgtcctttatccggagtccatacttgatgtaactcctgggtagtttcttacctataatcttttcacatttgaatacatgtcctcagcgtttgtacagcagggcctttggggctgccctgcttgtcatgcctacaagagccaccagtgagatgaacaagaaagttgcctctgccttctggttgggctactcacatctgtctccatccctccctgggaaccctccaccagagacctcttttcctggagtctacacaggaaacaatccttaagctctaatgctctgagattgcccctgatcaattctgtcaaccctagtggcttctgtcctcacattctgagtcccggtctacagaacagcaacatgccaatgtgtacaatccttactttccttctaatcccgtccctttctagcctagaaatctgcctttgatctggatttaggggtgacgtggggcttgaaaaattgcttcagactcaagtgcgttttgtccaattctctttgttacattctaagtctttctagacctttgatttcaacatttgaaacacaggcttttaagtaaaccctcaaatcattttctctccaactgttatatatcttaaagtataaaacctaagaactttgaaatcaaaagttgagctcaagtaagatgacaaagaagtaatacttcataaaaggtattatttgggagtgtgctggctagttttatgtcaacttgacctaatctagagtcactggagaggtgggagcctcaattgagaaaatacctcagtaagatcaggctctagaaaggcctatagggcattttttaattagcgactgatgggggagggccatcatccctgagcaggtggtcctgggttctataagaaattctgctgagagagccatggggaatgagcaggtaagatggtatggaagtgaagacacataggcctttcctccctaagttgctttcctcttgttctggtgtttcattgcagccatggtgtccccaaccaagacagggatgaaagcaaaacccattgatacagaagggaagacaaagtcctgtctttacacaacatgtctgtgtatctacctgtcatctgtgtacaaatcgtcactgggtgggagacatgtcaggcttatgttgtgatcagaggactatttggggaagtcatttctcacccctaccttgttgagtaaaggtctccactgtttctgctgctgccccaggctagctcttgtgcttgtagccttccaggtgattcgcctttctttcctctcatcataggaatgctggagttacagagtcatggcgctgcatctggcgtgttacatgacttcgagagatccagctctgctcattaggcttgtgcaagtaacatttaatttttagttaccgagccatctctccagccctgcatcatttttttaaaaaagaaaaaaaaaagaaaaactttcagtctacatcaagtatagtattagtctgagtcatcatagtcaaagaagagcagtcttttagggtttccttgctttatttcttctgttttttggtttgtttgtttgtttttgctgttgctgtgttgtttttgttttgatttgatttaaactggaatttgccatgctcttgcctctgcttcctgagtgctgggaatacaggcatgtgcctctatatctggctgagctttatgttctgaatgactttgtcctaatgataaccgtgatgtattttattacttttttcattccgctgctccaagttttctttctctgcagctcatgggttggtcaccactattttctgtgaatagacagtgttcctttagagaaggcatcagagcagcgccttggatccccagaaggtgcagcctgaagggaggttattgtagtgtttagaatgattctattgaagtgtggctttatctcctgtacaattgaacattaaacatctaagtgatggctttgttaatgagaagttaaagtcaaagcagtcagaggctgaccttaaatccccattcacaattcttgtgggtctcactgagacatccacacttgcaccagaaggcgacattgtgtagagctttctttgaggttagtgccacaaacagacactttcatttatgagatatgggtcattgatgatatttaaggtgtccctgccctgacatgagggcaataagagctgccctacttttttttgtaaaccctacttggtccacaaatagatcacagatattactttaaaggacttgggaggctaagtcaaggaacttatgtatttttagaagaaaggaataaactggaactaaggttcactcaatgcaaaaatattttaaattcatggcacagcgtatttaccttttgaggtgtgagatccgagccttctgttgttgtcaagtttatcttctgaatcagtgacacatgctccaataaacatcaagtgacagcccctagtcactatccaacacagggttcctggagcaggtccaatccacaggcacagaagccgtgtaaataaactctgctgggcaggtcatgtacagaaagtgaattagactaagacatcaagacagttcctgaacacactgctgtagctgaacagatggtcagcaagaggagtccttaaaggagccattggagcacaattccaagtgatgtctcatatcctttggcagttggagagtgtcagaagcaaacagttcatgagggcgtgttaacacttagaaaggaatgatcactctcagagacgacaccagcagagcataagcgcttctcattttaaaaagggtaatgggtacaagggataactgaagtataggcaccagggaagaggatagtgaccttcaggacgtgtcctaggtcagaggtgaaatgtagcaaaccacttgtcatgccctttctctaaacctaacttgtgattctaactccaggagaattatgtgtgtgctcaaggcaaatgtgtactctgagatggttgagtggagtgttagtatgtctgtgatgtccatttactcaagtcttatctaagtctctatacacatctctgtttgtatgttctatccattattaaaggggggaataaaagcttatttgcatgttgctatgtctctcttcaatgctgtcaacattcactttgttttttaaaaatttttatttaattttcataaaatatatttgggaggtccaaggaccctttcccaggggtcacatatcagatatcctgcatataagtacatagcctacatagcagtaggaaaattacagttatgaagtagtgaacaaaaataattttaggattggggctcaccagagcatgaggaactatagcaaagggttaggaatgctgggagccactgctccaaggaaacagtgtcttccagataaatcagaccgacccacatacaaactcatagagctggtgatagcccatacaagacctgcacaggttcaaacaggacaaaaccctgcacagacgaggggaaatggatacacattcccacccctagctaagaagctatttgcaactgatacctgctggaaaatggaaaatccattttggctaatgaacactgggtttatcaaccacaccccagggcaggccccattttgttttgctttgtgcgtgtacatttttgtttgtttgattgtttgtttttggcattttgtcatatcttaagagtcccatgtttctcgtgaggcactgcatctgagatcacgttaacggtaagaatacttgagtagaaggagacaggtgtggtcaagtacttcctacctcagaaggaggagcaaaggcacttacaaatgatgagcaggcgcagctgtgaccttgagaaccaaatagataacgttcaggaatgctccatcctacatagatcctgcacaggcccagtgagaggaaaagagcgcaattcaaagctgttcagatgtaaatattatgttgagagcattggctgggagctgcaattttggaaatgatagtgttgatcatctacttgacattgcttctcctttcctactccctgtagagtctctattctgttcaagcatccacttctcacccacagagccctaaggaaggtggcttcttccctggtctaagagtaagctcatgttagtatgagcgggcctactgctagaagtttctgggaagaggctaaactaggtccagccaatgagacctccagaccatatatgggaattttggagaagagattcctttgttgaaaaatgaaatggtctgttcatctttagtggttttcatatctttatgtaatgactagaaggtaatgctgtagtcatcttttaaccgcaaagaattgaatcatcagtttagcagataaacatggcagagcttaacaatatacatgaagggtttgccactggaaactcatggtatcttgactgatgcttttaaaaaatgctgggccaacttttcagaaaatatagtagtgatttggggtggatataagtcaatctataaggcttcatcttcttgtccatccatccattcacccactcatctgtgcgcctatgcaaccatgcatgtatattttcaacattaaccaaatgcctataatgtgctattcattatggtgaatgttaaaagttatgaaaagaaattagaagcagcccttgatcttcctacatgcatagcctggataataggtgacttataataatatgaaaaagtaaaccctataaaacatcaacctactgaatgccttggcagtgcagggtaatgagttcttatttccagatcagagttaagtaaggacataaagaaaatgaaaaaaatgtcgtcactctatgtcctgagctggaaacctgaagaaacaagagtagcggggggaggggaaacatcattgcaaatcaagatacaaatccattccaagagcaggctatttgtagatgtactgtagtatcagaggtgaatcccagagaaaagtgaactagagaagaggttagtttatttagcctctagaagaaaaagaaggtgaacttgagcagaagggttggaggtccactagaagaatagtccttgctcctaagttacaatagtcctgttcatgccccaagagccttccaatgaaatcaaagaagtgaccaccttactgaagtcttcatgattgcctttctggctctgatagacagaatcagttacatatttacttctatctaacttggtcctaaatgtacgtttgtgttatataaacctttatttaaatagttatctgcctcatgtatgccccagtttggaggatgagatgaggagacttaagagtttacaaggtataagggaaaagcagacataaccttgttataaagaggcatacatccaggtaaaattattgaaggatactgggggagaggttggccaggagcagataacaggttatagttctattgcaatataagtaacaagggttttctgtctgggaaaaccttccaagtagaaggaacctcaaagacagggaactccagtcaaaataactaaggttagaatttctaaggttagaagaaatcatgaaatgatgaatggagctagcagaaaacattgaagcagagtttagagcaatgggagatgggatggcttgtgagtaagcaaaggtctcacttgccattctcaggagcctgaatattattcatcccacatttactgagattccacacacaataaaatgaagtatcatgtcttctcaagacagtgtgtgtaacaatggaggggatagacacggacacccatagaagtgctagcatatatagagccctacctggactaacgttgttcaaacagtcttacagtccatcacaacatccaggggaatagaaactgtaaggtgggatttgcagaggacagactgaagtatagacatgtaagtgtctttcccaaaaccttatagattaaatgtagcagagtctgagttcaaattttgtcttgctgggtttcaagatcactatgacatggaaatttgaaacctcaatggaatgttatttaactcaagttgggggggtcaacaaagactcccttagggaattgatgcatacaatgttctaaaaatgagtacacgaggcaatgaaagttggcagaaagaacagtgtgagtggggcgtgagagctgggagctagctgcctaatggcagtaccaggtattggtttagccactgctatgaggccaaggaaagcagaaatgaacctggagcaggaatcagatcacggattcctttgaaagagaaagctggatattgtctatcctagcttgtttcctggacatcagtataaattcatcatcattacttcaccactaccttggttgacattaaacacacatgtcaatccaaaggaagtaagagatagtttattcttagctaatatgattgagtatggcctaggagcatggatccctgctttcccaaatgacacacactgccaccatgtcaatttgtgtataaggtcacataatatcacatatcatatatcaatagtcatatatcaatgtattcaccaaagacattgctgaggacattagatagacaggtaaaggcaaagaataagggaggtagactctgtaagaggcttcaaatactatctcatgatattcttagctctgggcatgagggaagtgaataatctactaattttatacatttcaaatatttttacctgatagttgaaaagatgtttagatcagatatagaataggtgataactggttaataaaaggtatcaaataaatcccctgaaagatgtgattatctatgtgggatactccaactcactagaattacaattcctagccagccagtcaacctcctgtctccaatgtagttgtggtcttttcaggaaacttcagatcacactatcctcacaatacagctacatgttgacaccaccatccatcgagttgccagaccttgagggtcatccttgatgccctccaccgtgttgaatgaatcagcactcaaagagaatatgttctgtactggaatacactttggaagctctagctttccacccagaagccatggaaatctcctgagaagaattcagactttatactattctcagatgttttggcttacatttcagaaaaacagcccaatagcttactatgactggtgagcctctgccctcctccccaagttcttctcaccctatgatccctggtccatttggatctactgtcgtctcctggaaggctttcagttcctccttgcctggaagccatagttcatgcagtaagttccaccagacatgatctgttctagatctttaaaagactttttcatcctttaaattgctacttcaataattttcttggtccccctgccccccattacctctttacaatttgctctccgtgtttaatatgattatttttttcagtgtcctcatgacagttcgtctccatgtctgtctcttctcttagtctattcactcacaaaaggcagtaagtactttgttgcttctgtcctgattcaatcccaagtgactatcccagaatagctactgtcattagaaaagtagttgtcttgtgtcagatgtctaagaacagttccacctactaacaactgaatagctaagacagctaagagactaaatgtgaacaggaaaaccgtgtataagacatggagagtagactttgccttggcaggcatggtgtatgggggcaactttggacagtaactgccagagaaagggcattggaaaatgtaaatgtttgtccaataaattaatattagctaactgacttgtgaagtatgtagataaacattccaataataacagataacgtagtgtccagggaaagaagagaaatagcccacagatgcatgggtcttcaaagtgtgcattttatctccgaagggaaatctcactatgaggcaatgtttcactttttttttcagctgctttgtacttatttactatccaaattgaagccaggatccactttgttatagaagatgaaccctgcctgccatgacattttgataggagagagacagaagcagttcccttggtaatgcatagaggttgattcagtaaagagtaatctaataacaccaaggaaaagtaagaatgtggcctaaagagcagccagagacattttggtccccataggataatgcagtatgggaaaggatgtgtttaaatgcgtatggtggtccaagtagaggagtggctgaggcaatcagacttggtgttctgagggcagcagtcggtcactctactgccacaataacatccttcaagaaaatgctttttatagggtcttcatggatagctgaaagcagtctgtgtgctttgagctatgctgattagcagcaaactttaaggcttcacactcttgtctccttacgccagtactcaaaggaatttagtttctgaatccctagttatcagtcaacaaatatttattgaatacttgctatgtgccagacagtgttaattaaagtttgctctctcttgtcatgttaaaatgctcagcttctgtctttgtttgccttataattatggagaagagactccctttcttagaattttagttttcaattccttatgactttccacagagggagggaattcttagggtccaacttttgagtaagggaccttcattctttagcaactattaaaaggcccagtctaaggaactatgggcagagttgtttaaacagcattctgggtcctttgtaatgaagacttccttcagatggaagaaagatcgctaccatttgctcactgttttcctgatcaaccgttacctcctcaaatgcaatttcttcccctaagcactttacaaagtaggtggattatttcttatcccacatatatgaagatatttaaaatctccagccaaaatgtgtgtaattgcctcttgctgcctcattttgcagacacttttattagtagctcggcttatctcctggagagatgtgctggaaactgttcagaatatttggggcaaatgcaaatctaactatctaagaatgaacaatatataataatgattcttatatttttctttaaaaatgaaatttattcagctacactcatatagcacaagcactaatttcatgtgtgcaaactagatggatgttaggaagtacatatctaattcaaggtcatcataataatcagagcattgcagttttctcaagagtttccatggttccctgtgtaatgggttccctgcctctagttcagaacaaccattgactggcactgagtttctaactttatgcaaattgctatctagagtacaagaaaagagacagctccagttgtgtgacaaagctttccctatgtgacatacaccccagatcccataacacaccagtgtatagatgccaccaaaatctaacatcgtaaactagtgagctttattggggtaacttacagagcatggctaaggggttgcttaacaagagcatatatgtatcaaagatagctgtatcaacaatgcccaccccagcatgggtgccgctcacaaaagctggaaacctggaatacactgcacagcttgaaagcagctcaacaggattggagagtgtcctttccaagtgacttggttggtctaaacctcttccatagagcttatctggtttctgcttcttccaggcagctggtccactctcaagagtcttatttgctgcttgcctctcatccaactgatgggactcttagattttattgtttattcctgcagggatggttctagtgaatctagtcatctttaggaacttcctgaagctatttttgtgttgtttaccttcctgtttaaggagatttctgaaggatggaatttttcagtctcagaggaagctgttacacaacacaagtcttaaatttatgacatgataattaaagatataatcacagaagaaactgaccaacaaggaactgtacacatggatgaaaggtgttcccagaggcctggcattgatgggtagaagcagggctggactaagcatcctgagctctgggtactgtctatacattatttccaattgtgtttttgctttcccacccataaaatgattagtgtcactatatggcctccagaaaccttcctgacatcatagccttcactttgcatctgatggtggattttcttgtgttgaggttcaagttgtgtgaaaatttgtactccaatatctgtctttgctgaaatacatttaaattaaatttttttttccattttttattaggtatttaactcatttacatttccaatgctataccaaaagtcccccatatccacccacccccactcccctgcccacccactccccctttttggccctggtattcccctgtactggggcatataaagtttgcaagtccaatgggcctctctttccagtgatggccgactaggccatcttttgatatatatgcagctagagtcaagagctccggggtactggttagctcataatgttgttccacctatagggttgcagatccctttagctccttggctactttctctagctcctccattgggagccctatgatccatccattagctgactgtgagcatccacttctgtgtttgctgggccccggcatagtctcacaagagacagctacatctgcgtcctttcaataaaatcttgctagtgtatgcaatggtgtcagcgtttggatgctgattatggggtggatccctggctatggcagtctctacatggtccatcctttcatctcagctccaaactccgtctctgtaactccttccatgggtgttttgttcccaaatctaaggaggggcatagtgtccacacttcagtcttcattctccttgagtttcatgtgtttagcaaattatatcttatatcttgggtatcctaggtttggggctaatatccacttatcagtgaatacatattgtgtgagtttctttgtgaatgtgttacctcactcaggatgatgccctccaggtccatccatttggctaggaatttcataaattcattctttttagtagctgagtagtactccattgtgtagatgtaccacattttctgtatccattcctctgttgaggggcatctaggttctttccagcttctggctattataaataaggctgctatgaacatagtggagcatgtgtccttcttacctgttggggcatcttctggatatatgcccaggagaggtattgctggatcctccggtagtactatgtccagttttctgaggaaccgccagactgatttccagagtggttgtacaagcctgcactcccaccaacaatggaggagtgttcctctttctccacatcctcgccagcatctgctgtcacctgaatttttgatcttagccattctgactggtgtgaggtggaatctcaagggttgttttgatttgcatttccctgatggttaaggatgttgaacattttttcaagtgcttctctgccattcggtattcctcaggtgagaattctttgttcagttctgagccccattttttaatggggttatttgattttctgaagtccaccttcttgagttctttatatatgttggatattagtcccctatctgatttaggataggtaaagatcctttcccaatctgttggtggtctttttgtcttattgacggtgtcttttgccttgcagaaactttggagtttcattaggtcccatttgtcgattctcgatcttacagcacaagccattgctgttctgttcaggaatttttcccctgtgcccatatcttcaaggcttttccccactttctcctctataagtttcagtgtctctggttttatgtgaagttccttgatccacttagatttgaccttagtacaaggagataagtatggatcgattcgcattcttctacacgataacaaccagttgtgccagcannnnnnnnnnnnnnnnnnnnnnnnnnnnnnnnnnnnnnnnnnnnnnnnnnnnnnnnnnnnnnnnnnnnnnnnnnnnnnnnnnnnnnnnnnnnnnnnnnnnnnnnnnnnnnnnnnnnnnnnnnnnnnnnnnnnnnnnnnnnnnnnnnnnnnnnnnnnnnnnnnnnnnnnnnnnnnnnnnnnnnnnnnnnnnnnnnnnnnnnnnnnnnnnnnnnnnnnnnnnnnnnnnnnnnnnnnnnnnnnnnnnnnnnnnnnnnnnnnnnnnnnnnnnnnnnnnnnnnnnnnnnnnnnnnnnnnnnnnnnnnnnnnnnnnnnnnnnnnnnnnnnnnnnnnnnnnnnnnnnnnnnnnnnnnnnnnnnnnnnnnnnnnnnnnnnnnnnnnnnnnnnnnnnnnnnnnnnnnnnnnnnnnnnnnnnnnnnnnnnnnnnnnnnnnnnnnnnnnnnnnnnnnnnnnnnnnnnnnnnnnnnnnnnnnnnnnnnnnnnnnnnnnnnnnnnnnnnnnnnnnnnnnnnnnnnnnnnnnnnnnnnnnnnnnnnnnnnnnnnnnnnnnnnnnnnnnnnnnnnnnnnnnnnnnnnnnnnnnnnnnnnnnnnnnnnnnnnnnnnnnnnnnnnnnnnnnnnnnnnnnnnnnnnnnnnnnnnnnnnnnnnnnnnnnnnnnnnnnnnnnnnnnnnnnnnnnnnnnnnnnnnnnnnnnnnnnnnnnnnnnnnnnnnnnnnnnnnnnnnnnnnnnnnnnnnnnnnnnnnnnnnnnnnnnnnnnnnnnnnnnnnnnnnnnnnnnnnnnnnnnnnnnnnnnnnnnnnnnnnnnnnnnnnnnnnnnnnnnnnnnnnnnnnnnnnnnnnnnnnnnnnnnnnnnnnnnnnnnnnnnnnnnnnnnnnnnnnnnnnnnnnnnnnnnnnnnnnnnnnnnnnnnnnnnnnnnnnnnnnnnnnnnnnnnnnnnnnnnnnnnnnnnnnnnnnnnnnnnnnnnnnnnnnnnnnnnnnnnnnnnnnnnnnnnnnnnnnnnnnnnnnnnnnnnnnnnnnnnnnnnnnnnnnnnnnnnnnnnnnnnnnnnnnnnnnnnnnnnnnnnnnnnnnnnnnnnnnnnnnnnnnnnnnnnnnnnnnnnnnnnnnnnnnnnnnnnnnnnnnnnnnnnnnnnnnnnnnnnnnnnnnnnnnnnnnnnnnnnnnnnnnnnnnnnnnnnnnnnnnnnnnnnnnnnnnnnnnnnnnnnnnnnnnnnnnnnnnnnnnnnnnnnnnnnnnnnnnnnnnnnnnnnnnnnnnnnnnnnnnnnnnnnnnnnnnnnnnnnnnnnnnnnnnnnnnnnnnnnnnnnnnnnnnnnnnnnnnnnnnnnnnnnnnnnnnnnnnnnnnnnnnnnnnnnnnnnnnnnnnnnnnnnnnnnnnnnnnnnnnnnnnnnnnnnnnnnnnnnnnnnnnnncctttagtgagtctagctaagggtttatctatcttgttgattttctcaaagaaccaacctcctcgtttggttaattctttgaatagttcttcttgtttccacttggttgatttcaccccctgagtttgattatttcctgccgtctactccctcttgggtgaatttgcttcctttttttctagggcttttagatgtgttgtcaagctgctagtatgtgctgtctcccgtttcttcttggaggcactcagcgctatgagtttccctcttagaaatgctttcattgtgtcccataggtttgggtacgttgtggcttcattttcattaaactctaaaaagtctttaatttctttctttattccttccttgaccaaggtatcattgagaagagtgttattcagtttccacgtgaatgttggctttccattatttatgttgttattgaagatcagtcttaggccatggtggtctgataggatacatgggacaatttcaatatttttgtatctattgaggcctgttttgtgaccaattatatggtcaattttggagaaggtcccgtgaggtgctgagaagaaggtatatccttttgttttaggataaaatgttctgtagatatctgtcaggtccatttgtttcataacttctgttagtttcactgtgtccctgtttagtttctgtttccacgatctgtcctttgaagaaagtggtgtgttgaagtctcccactattattgtgtgaggtgcaatgtatgctttgagctttactaaagtgtctctaatgaatgtggctgcccttgcatttggtgcgtagatattcagaattgagagttcctcttggaggattttacctttgatgagtatgaagtgtccctccttgtctttttttgataactttgggttggaagtcgattttatccgatattaaaatggctactccagcttgtttcttcagtccatttgcttggaaaattgttttccagcctttcactctgaggtagtgtctgtctttttcccctgagatgggtttcctgtaagcagcagaatgttgggtcctgtttgtgtagccagtctgttagtctatgtctttttattggggaattgagtccattgatattaagagatattaaggaaaagtaattgttgctcccttttatttttgttgttagagttggcattctgttcttgtggctgtcttctttttggtttgttgaatgattactttcttggttgttctagggcgtgatttccgtccttgtattgcttcttttctgttattatcctttgaagggctggattcgtggaaagatattgtgtgaacttggttttgtcgtggaatactttggtttctccatctatggtaattgagagtttggccgggtatagtagcctgggctggcatttgtgttctcttagtgtctgtataacatctgtccaggctcttctggctttcatagtctctggtgaaaagtctggtgtaattctgataggccttcctttatatgttacttgacctttctcccttactgcttttaatattctatctttatttagtgcatttgttgttctgattattatgtgtcgggaggaatttcttttctggtccagtctatttggagttctgtatgcttcttgtatgatcatgggcatctctttttttatgtttgggaagttttcttctattattttgttgaagatattagctggccctttaagttgaaaatcttcattctcatcaattcctattatccgtaggtttggtcttctcattgtgtcctggattacctggatgttttgagttaggatccttttgcattttgtattttctttgactgttgtgtcgatgttctctatggaatcttctgcacctgagattctctcttccatttcttgtattctgttgctgatgctcgcatctatggttccagatctctttcctagggtttctatctccagcgttgcctcgctttgggttttctttattgtgtctacttccccttttagttctagtatggttttgttcatttccatcacctgtttggctgtgttttcctgcttttctttaagagcctgtaactctttagcagtgctctcctgtaaatctttaagtgacttatgaaagtccttcttgatgtcctctatcatcatcatgagaaatgtttttaaatctgggtctagattttcggttgtgttggggtgcccaggactaggtggggtgggagtgctgcgttctgatgatggtgagtggtcttgatttctgttagtaggattcttacgtttgcctttcgccatctggtaatctctgaagctagctgttttagttgtcactgttaagagcttgttcttcaggtgactctgttagcctctatgagcagacctggagggtagcactctccttagtttcagtgggcagagtattctctgcaggcaagctctcttcttgcaaggcaggtacccagatatctggtgttcgaaccagactcctggcagaagttgtgttccactcactagaggtcttaggatcacgtgtggaatcctgtgtgggcccttgcgggtgtcaggcgactcagctggcaaggtagccggggctcgagtggagtggaaggggtttgagccccagatcaagcccgggtagcctgcttccctatgtaccgcagtctcaagttccacgcgattggattggggtaggcgctgtgttccactcaccagaggtcttagggtcccgtggggagtcccgtgtgggcccttgcgggtgttgggcaagactctgctgtcaaggtagcccggggctcgagtctcgagtcgagcggaagggacttgtgccccagatcaggcccgggtagcctgcttccctatgtaccgcagtctcaagttccgcgcgattggattggggcaggcactgtgatccactcaccagaggtcttagggtcctgtggggagtcccgtgtggacccttgcgggtgttgggcaagactctgctggcaaggtagcccggggctcgagtctcgagtcgagcggaagggcttaaattaaatttttaatgtgaagtgaggagaccttaaagtgtcctcacagaagtaatccctagagtgtgtcatttcaatgtatttacataatttgaaatcaattgcaggaactacctttggttcagttttgagaaatatgctaattgatgttttccaagccaggaaatagctctaaggtgctctttggactatatcagtggccctcatcctccatgatggtcagagaccctcacccttgcagttagatgtccagatagttacacccttctgcaaagagtgagctaagcaaaaaaacatgagagaagaggcctctacaatggcttcaattacaagaagggcaaaatgccatctccagatatgaatgaagaactggatccttttctaagcatcctacacctccaattttcagagctgtttatttcccttcaataggcagtacttcttgatctttaacaagttagactttttcagtagggctcatgtaaagatgcaaatcttagtctgagttaggacatgtgccaggtagataagctggaccagagaacacacctgcaggggctcagtgcaaggggtgtgtgtgctggtttgtgggggtgggattttgggggcattggtttgttggaagtagagtgtggtgtaagggtgtgaaactgggacaacacaaccactgagtactcgttcaagttcttttatatatccaagaaatctcaacatgcttggggaacaggcctcctgtgacttaagccctgtgtaaattagtgctctgacagtactgcaaatgaaaatacaaatgttaaacagggcaggcaacccagttatccagccttcttgctggaaaatctgttgtccttcaaattaacaagaaaaatgtgaaaaacactcctgccccaagtccttggggatctgtctggctgctgtccatgctctactcgggcctctcaaaggacacggcttcatggtagtgtggcctctgaaaggacacaaactcaaggtagtatggcttggtttcttccacagggacggctggccttagtgttcaacatttaactttgagcatacagaggtgagaacaaagttttgttctgaccttgcctttcaacaagttatttttttttcaactttctcccccatttattagtttgttgatttctaaaagcaatctttgttccatcaatcacacacccagggagacatattatttttatcacctaaggaaggcagatgctgaaacttggagcagatttatgtgttgttggctttatttatctgtagggtatctgaactaaatcagcctgttgggttgactagacaggagggatgtggagagtagacatagcgctgtagtcaggaggctgaggggaggaattacaacttgcaagttatgtggaaaggaagggctagatggcattagcaacggctggaactggtgatctgggatacagatgggatggaaactcattttaaatgaaatggagagttaggagacgaggccagattatgggtgtcctgagccctatgcactcttggtgaatattaaaattgcaattatctgaaataattgagccttaggaatagagagtgggtaaatagaaagaacttggtctttgaaaaagtagtactgagaccaattagtggccactgaagctaaaattagctaaaaataaaaagttgagaattggagaatgggaagaaaaatgtcaccaggaaagagaagcagaagaaaataaccctcccagttcttaaggcaacaagcttttagccttggtggtttgggaaggaaggctgtagggtactgaattctgcagatttgatgagactttggcaagccctgtctcgggtaccatggcttacccctatgggacctatccatgacttagtttgaacctgctggattaaagcacaactaaaaagtaatggcccctcctctatgcgtatcaaattctttaatacttgacatgataattaggatgattgaatccagaacttcccaaattctaggcaaatattctaccactgagcaacatcccagccctggtttctttttaaagagtagtgtactttatgcatgtctatgtatgtctctctcagcaccacaagctatttgagctgttcaacattggtgctatgaacaggactctggttttctgaatgagcagcaaatgctcctaactgctgaggctccagctcgagcctttgatttttggagacaaaaatctccctacgttatccaggctaatttcaaactcaagatctcctgcctctcccgtctgagtgcttagagttgttggcctgtgacccaccttctccccgcctatctttttttgttcacttaaaggcactttattttttttttaaaaagagtttcttaaaggacatcttaaaaacagcaccttttattttatgctctgacttgtcagtcaaattgcccaaatgccaaagtacaccttcatttaaaaaaaatgagattgagctgagagttcagtgcctcttcctggcactagcctggcatgtgccaagccctaggctggagcccttctacctcaaacaaaactgacctgtctgactgaatagttcctgaagcttgaaacatatttcaggagggagctccccatttatctccttcagcgggtgcttctcagttcttcctttccccttcccccttgtccactctccaccactgtagagacctaactgtccatcaccactgtcttttgcactaccttacatgtgaccacagctagtgtgaggagtctgaagccctggttgcaacaggaggaaggctctggagggacagtccctgcctacatggcccctgcagaatgcctcagggggtatcacgtaggctccctcccaaggtctgcttcccactatgctttctcatcagttactccagagcatcttccccacagctgttcctgagcccacatcgcatgaagtgatgctttttttcagccggaaagtgctcattttgaccacgacagcaaaaggatggagacgaatcttcccaagagagttccctctctgttcacatgagatggctttggcttggctcttgtttatatatccctcttgtacaccatgaggacctgacattgcaagagacagaggaaagggcctgtaggaaatttaataggtctagagagaggcataaagttcacaacctggtggtctggacctcaattaaataagagaaggcataaggaaaatgctttaagctataggtatgaaattttcagttagttcttcctaaatctagaaagccaggtcccacttcccatctcatcgccttcctaaaatggactgagaaaatagatctgagagtgaacggccttttctgtgctttgccaactctttaatgaaggatggttgagtgtggaggtgggttcaggctgagctgggggagataagtggagactgcagaaggtagcagaagaagaacagtccctggtagttacacagggtgtctaggatgccaggagacctatagaaatttaaggtgttttatatgggcaagagagccttgtttcctgatacctctgtatgtctggcttgaatgaaaaaataaaactgtacacctgtgcatttgttcttttctcagcgggcaatgccagaggcattggcagccaaatgcatcctcctcaggtggcccaggcctcacagcactgatcctgacattgagtgccagtaaagaaccagagagaaaagacctgcgtctacacaaaaatctgttttgattttttttcaaattgttggtcacatctattgccatatacaactttttaaatgtttacctcatacatacaatagctctattttgctgtatgcatgcatatatagttacatatatttatatgttgggttttcttctttcttttgtgttaaagtagtgtataggggggtagggttcactatttatcccaaaatattctcaaattcatctccttctgcctcatttttccagatgcttaagttataggcatgagccattatatactactcataatatatacaatatatatccacacatatgtatttatttctatgatatgttatctgaatctttacaaatatcacttagatttaacatagtatgttcatttgcaagtctttaaaataattctgctgtccactctggttaagaattaattataaccaagtgagagagaaacagcaggctcactattggatggagtgattactgagtgtggactctaacattgaagctgtttccagtgcaaaggttggggactgggcttcatgggtagaagtcctggacagccgacatctgtgcagacaggcagcaagtataccactgccagtctgtcctgcagattagtgacttaaggataagggctcatgtagtcattcaggctgcaaatattcccaggagggaaaaggaggcataaagaaagtaagttgtgccattccgttagctctgcatgttgttcaacaggaatagcatgcccatatctggacatggcctgtatccacgggctggtattgctgccctcacagagcagaagaaactcatgttccaagtagccatgtcattctgggttaaactgcctctaaatgacagtgcagagagttgaactcagtctttctaaaagggtcttctctttacattcaaccaacaagtggaaagctatttaatttatggtgattaaaaataatttatctttattgacttgtgtgtgtgtgtgtgaatgcatgtatgtgagtgcatatgtgaatgcttgtgtgggtgcaaacacgcatgggtgtgtgcacacacacacaaacacactcacacgcatgcatgcgtgcatacatttcatgaaggtcagtagagggatttgggtttcctgaagttagatcacaggtggttgtgagctacctgacatgaatactgccacgcaaagtctggtcctctataagagcagcaagcactcctgcctgctgagccacctctccagacgctcttgttcattttttaaaaattattagatattttctttatatacatttcaaatgctatcccaaaagttccctataccctccccccgccctgctcccctacctacccactccctcttcttggccctggcattcccctgtactgggacatataaagtttgcaagaccaaggggcctctcttcccagtgatgacaaaagggaaaacgaaagcttgagtacagctcgcctgtattcacctgcaaaactcagcctgagatcctacggaaggcaccataaagggttctagaactaacagaaaaatctgcctccattagtcaggtgggaaggctctggaaggtactgcaattcaggaattttgctttatgaggcaggtgagaggtgttcagacccgagggcacagctgtgtctgacctagtctctctaggcctgtgcctttaattcacatcctttgctaacacaggtagaaatgttctctctgtgaggatgctgttggtgttacagatactgtatcaacaaaggcatgaaagaattatgcaaggaaaacattttcccctgagttctgtctcaaaatcttatgtgtaggggagaaaaaaatctatatgaagaagggatgtaagtaagtagccaaccacacaggtaggagaacgagtttgcacatccgaatgagccaaccacacaggtaggagaacgagtttgcacatgcgaagattgcaagagggcactgggttatttcagccctatgttctctctcagttggttttcttgcctcttaatgttttcagatcagaggtcccaaagctgccagttcctaagatttagctaatgttgagagggtctccctccctctctctttcccctccccctctgcttccctcccccacagcttcagtagttcttcttcctcaccaactgaatgcattcttctgttgctcttggacacaatgagctgctcagtttttgccacatgaaagtgaaattcgcatctacaatttgaagcctagatctactaatcctgctgctgttggtgacactctgcatttttcctccccttatctgcaagtgaacgaggccaccctgcagcagaaaatattttcttagtgaactcgcatccactcccagtcccagtgatgtagcgctccaaaatggagaggtgaggtgactgccaaacatgccttactggaagcaaagcactgttccaataataaatagttcaaactaatgtatcagaattcacagacacaaatgcaaatggggccagggcagtaagagtagcttagaccgtggcgaggatggcacgggtcccgggaaaggcagacagacaaccccagtcagctctggtaatttccaggaagaaacagcagcccagcatgccttcagctgtattttccaacagaagttcacagtttgactttttacatataacctttttatcgttagtcaatgattctgaaaaaaataaaataaaataatcttctggctctcagctgccagtttgcaacttctaatagggagggatagagagaaaatctctactaagatagcactattcggtaggaaatggaaagcccatgtgtagttcagggctttgctcctaacagtgtgctccagagcccagcagcattggtgttggtctctgtcagagtccaggacgtcaggcctcaccctatctttcttgcatcatagaacatgaatttgtcaagagctctaagtgatcggcctggggttataatgataatggttgattcctgcatgaaggtagtgtaggagcatgccttatgtcccagaacaatgcctaccctgtcctcactctactgtggtccatctcttgcctccctcatttaccctctccctgttctcattagttgtagtcagtgaatgtggagctgtggtcttgcagcaaccaaagggcagggcttgggtaattgctgatgctctcactccagatgcctctggtttcctgggcctgtagtgcctgtctcttctttagtcaccaccttgcttatttgtctttagttgtggctgttcatattcatttgttttgttttgttttgcctatcctttgcccatcatgactggagttagagatcccagtctgggatgattctctggctcagatggtgcaatttttaaggatcctccatcctcttagctctcacaaacacctgtctagtctagtaaaatagttactttattacttaatcaatagccatgataggaaaatggtatgtccatattcatcatacatttttttcagctattcttcatcccttattggttgcatatacaaatacagaaaccagagatatagaggaacaattttgtgtgtgtgtgtgtgtgtgtgtgtgtgtgtgtgaatgtgtgtgtgtttcccttagatgtattgacatttgagtccaaaagtagaaatgtaatttctcttttgaaaatagctcaaggtaacacttctgtcaaaactagccaagttgctatggactgtgatggctttgtattcagtatgatagaaaacaacctatttgtttgggtgtagacctcacattttgaagacctatttaattgaagatagcccctttgaaaataatatctctagaaaacgtgtcaattttcctccctctagctttactatgacaacgggagatggggtgggggtgggggattcttgtgcttttacttcttggtttagcagcgtgagatttctatatttataatggccttgtcgctccagggcactgtcactgctgcctcagtctccatatttatcagcctttgattaggtgaaaaactactaagtatctatgtgttagtgtgcctgagttctcctcaaagcccaaaagagtcttgtcgataaatgtgacagaaagatcactagacttcatgatcaagatcattcaagatcattaggaaaagctgtgtggctcccagtcttggggaactatcctaatctgcttctattgctatgataaacaccatgaccgaaagcaaagaggagaagttttacttcatcttaaaacttacagtctgtcatggagggaaaccactggagcaggaactgaaggaaggaagctggagctagggactaaaacagagaccacagaggaacactgatttaacagcttactctcatacttgctcactttgctttgttataaatcccagtatcacctatcaagggatggcagcacccacagtgggttgagccctctcacattaaccattaatcaaaataatgccccacagacttgaatacaggtcgttgtgatggaggtattttctcagttggggttcccttttccataggaagctagcttgtctaatcgtcaactaacagaaacaagcaaaagagcaaccatctcatggcgtcaaacacgttgcctcgtgagtgttacctccatctcctggggagacaggtgttcagcacagaggaagataacttcttcatctatcctcgttgtactttcagactgagcacctgggaaggctatcatgaggttagaaaaaggaatggtggttaacaaagcctgtgtttggttttcagtctaatgaagttttctgtttattttgctttaataaacaactaaaacctagaaaatattatcaatgacagaattttctgtattcagaaaatttcttgttcccttcttttattttccttcagacttttataaaaatataaactttcagagttttaagacacattgaaagtcatttatgccacctcctgattttgcttcccccaatataaccatacctccctttagaataggccactttgtaaaacagttaagggctacttcagttcatctatggaaggaagctattacctcttatgtttacttcaatctaatctgactttcttgaacttttattgtgtgactgactgaactaactaagctccttgtcactccatggcaagcctgcttttgtcccctttgctgttgtccttgctcattttatttaggaagagtcaagacttgagatggtagtgttaggagccatgctcattttgatagatatttgccacaagattgccccctacactcaagagccaatatacagtcaattaaaagagtcatctctttccagttaggttttggcaacttcagagtgtgagcgtagacacaaacacatacgtccttgtagaaaacaactacccatgatgtctcttggcacattccaaaacaaagccccctttcttggagagacaaagctaagtacacttttgtgcattccagaaaaagtggcaactgaaaacacaaaaataagggcttggaaaattcaattggggttcctgatcaaacacacagaaaggaggattattgtagtgtttgttatatgacaagaacatcgagaagagatgaatagctgcctatggtagaaaaccaagtaccagtctgtcatttctgttatcccatcattgtccattgtctttcttccatttttgtgcacctggacacctagggttgggcaaataaatattgggctccaaatttaaaatatattttatgtaaacagttttttaccttttctctgaaaactttgggttctttgtttattaagttttagggttttttttttccaaagaaaagatatcaacattttcttcagttgtaccttaaagatcaggtcaggtttggcaaataacaagcctctttgttcttccaaacaaaggagccattatataatcaaatcaactatgagcctatttattcttggccttcatctgcagacagttcatgcaaacccactgtgcattatgcctgaatccaaaggctcctcaactcagaccagatgaaggcttgtaaaatatttcacctcagtgcctaatagtataaaaccattgtcaaaatggagtttggggagtagtgggcaggcagtaaaggagtaaggataagttatgtctattgtctgctgttgtatagcccatagtacatacatgaactggtgacatgtcaaaacatgccctcactgatcagttagtattggtttcatgtaagtcggacactagacttatgatgtcaggaccatttgagagtaactctagatagatcttgtttaagagatacttgggtacttggactgataggcatagagaatcaggactagtgatgggacagatcagggaatataaatcagataaatcagggaatcgtttctatatgaaagtaggtgttttatacgctgttgtcctttaaagcaccacggcaatttcttttacatttgattagtggataagttttgttataacagcaaagcctctgagacatctgtccactgtaaagagtaaattgaattattacaaaagaatttcagcccacactgtcaaaggaatttcaaataacaggttgtgctacacataccacaagcaaaacaggctgtttgaagctttccagtctagatttaaaagcttcccaaagtacactgacatggttgaaaatgagtcagggcaaagaagtaatgtttgattttcatctttcacaagataaattgttcattctgtcttgtcagtaataatgacaacatattttaaggccatcaatcaaacagcaaccaatgtcacattttaatttgaactaaatatgttttaaacatctacattatttatcagctgactgcttgctgggatattgatctgattgggggaaaaccagagggttgcgttttcttgtcatttatattctgttgcgaccagcagttgttttcagggttccaaatggtacagctggaagagataaatatgctttagagaatatgaaacgagatggaaactttcctatgagtgatatattaggcaaattatattcaaatcacagacttttcccctttgctgtaaaagacttcagggattggcagggatgccagttcaggtaaatttaggaagaataaaaatcatatccctggttctgctgccagacaacttcagtgtggcttcagctaaggcagtgacttgaccagatcttgatctccatagttctgcaagagtggattctgggtcaaattgataggctatttcctacaacactcaatccaaacaaccgtggttccaaagagtgttttagtttcacactaaagatgaaagatggcagggaacaggaagaggggataggcaacatttgtatatcttgtgggaggtcccttacttgggccaggggaatagtggaccacaattctctccccttccagaagaatggaagcagctgaggtgatggtcacacacatgctttcaaaggtggaatgtcacggggatggtcagaggttcactctcagcctcttttctttgtttgccaggatgaattttgcagtttcctttttaaacatattttaaaattattagtattatgtatgtgttcatgtgtgtgtgtgtgtatgtgaagtatatatgtgaggacatacatgctgtgacacatgtagaaattagacacaagtgtatgtaaaactacatagacttggttcttttctcccacttttattgggttctggggactgaattcatgtcaccaggactgtgaggcaagcaccttacccctgagtcatcttgctgactccctccccttggggtcttagaatgctccccattgtgtggttcatcagaggatatgtgcctagttacatgtgcatgtatatgtatctcacgcatgatactcacatacatgcacacatacttcacatcagataatctaaattgatgcaactggactcagagcagaaaaaccacctacattattatgttaattagaatatacctgttccttcagtaaacagagaaacttattccggggtttttacaatatttaaaatgagaatcttgagcagtcagtcacttgggcacttcctacaaacttcttcgaagcatgccatgagcagcatcagatgttccctaatgcaagaatcagcttctcatctattattattattattactattactattattatatgagaactatatatcctaacttagagtgtcttacttaatgtggcctggggccagcatcaataccaccacagggaccatatcagaaatgcagaatcttgaaccccaccatagccctctggttccgtatgtttggcttacacattgaagcacaagatgcgacgatttagaaaagttgtgctgaaccctgaccacatcttaaaacaatggacaaattttcaccgcatgatcctggaacccacctacagaaagtctgtcttactttgtctgagatatagccagtatcatagccttcaaatgattcgtagtcagcactgtagcctttctatgactccaatatgcagcaaaatttatggcccaataaattaggcaatctgttagggaccttcagtgacctaaaactttgtccacagcacatgcattacttcacttgtggcagccatttgtcctttctttgttgtgactctattcttgtttctctcgtaatcatgtctgatcctgggcagcctaatgctttcttcctcctgactgtgacttcccttctcaggatatgtgaccctttaaggagtgtgactagacttgcactttctttcagcattgttcaagcttattctccatcatcgacactgagtggtggatgggctctgggctggacacagctctttttcacattttaatggccagtactctgctaagcagtggatgtggtaagcataaaatcaggatgcttggtcaggttctgccctacgtgtggtttattttttggccagattctttttctcttctacattcaatattgcaattatgcttgtcctgcattcatgttagggtttgtgttatactctttcatgaaccttaaggcacttcatggaagggagtcttgatcgtggaaaggcaactgtgcagttttctgtagcagaagcaacaaccacaaaaacacaaggatgaagcttctggaggatgccagaaaggaaactgatggagggagacctaaggagaatggatacagctttcttcccgtggtctcaaggtcaaagactgggatcccatccgggattaaacaaaaacgtgtcttatcacaacttgctgtcttcaggcttttctactcttgaaacatcattgttgatagtggtaggactataggaagctaagtgtgaactggcaggaaggaaatcatggaagacaactgaagtcagtaaccatcttatgaaccatatttaatcctaaagcagataagatgttctacaatcgaaacaaaagatatagtgatggactttgcaaatgtggaaactaaggcaggtattttaaactgtcttcttagtacaaatagtaaaaataaaaaatgctttaaaatctactttatattgttagttttacctgaatcatgatggctgcccaactgagtgttctctctcctcaccccctcttgtctgtctgtctgtcacacacacacacacacacacacacacacacagagagagagagagaggtttcagtgaaattacagcattgtggtgatatactcccccaaaagccataagttatctaacgaaacccccaatagcaagcatgagaaccttcctttgcattattgtctagaggagtccaagagaatcccagacaatataggacattgctctgataggagcttgtgccttctaggtatgacagggaagagaggctgtacccacaaatctcaacaacatggccaactaaacaaaacatgaacacttctaacagcagctgacatcccaacatagatggggggtaggggtgacacatatccctacccttagataaagtgttataagtagttaactgctgagagaaggaaattagtttttcctaggaatgagtcttcttattggttatccaataccaaatagttagccctaacccataaacatgctggcaatactaaatgaacccagcaggttttattaatatggttattcatttagacttatctatagcaataatgattaaagatgaggcatgggcttggagagcatggagggttagcagtagaagaaaatatgatgtaattatattttaattaaagaaaaataataaagagaatttgagaatttgtagtggaagtcaacacaggacaagcctatctggtgtcccagtagtgagtggcagatagtgatcgttctatgattaccgatggttgggttttgtttatttgtccatgatagtttcttttgttttggttatttgttgttgttttgttttgctttgtttgtttgtttttctatgtcaaatagagactgccttgaaaagaaaagggtttacagttcagaaaagccatccgaagttgggcagcccacatagcccaggagccctgggaacaataatccttacctggatacaccatttaggttcatagtatggcagctgctgctcacagcttgcccagagtcctcaaagatacccgcttctctgttaacctgaactgtatttctcacagacacagtactttcttttcagttttcctgcttcagatgacatctcccttcctcagggtagacatcatgtgttggactagttgtatatttttttcccagaactcagcagagacttttatactagtaaatgcttactctctccatgggatataagaaacagagatgaaaggaagggattgtgagtttgacactcataagagccacgtggccctacagacactcaacgccatcatctatacaactcattgtatatacagatactataatcctgccatccagtgtccactgtgccatcttaagctcctaatcagatgaagcagaactgccatttttaaacctttctttgtgagtcccagtaagacatgcgcatcttcagagcttcttactcatttgaaatcaattccagtcccaccccagccctctgtctggagaaagatttgagttccctcctagccagatgcctgagagctatttgtgtcatttccatgtttccaggttctttcccacccactatgatctaactttacactctaatggccctacatcaattggtcctcttgacaccgttcagctcctctgaccttattaaaacatctcccttgtactcctgtgacacatacatctctgttgacagattcctggcctctctgttttcttcatcctcctttaacttccttcaagtaacccaagccttggtcataggccttcttctaatgtgtgtactttctatatttttatctatagccaaggttatactaatgcaccttaaatatttgatctaacatctgagtcttaagcaaacttctcattgatctatttcagacacccagcagtctgtctcactaccccagacccaacatttttaaaactgaactgtgtaagctagagatccctcagctttctccaggactcagagttgggcctgtgggccatctttatttctctgtagagctcttagccacaatgtgaatgaaatgagttaatgaactgttacacctaaagtgtagtctccttgagagcaggcataatctactgataattatttgttgaacgaagaaatttagtttccaaattatgaattcctgggtgacaaagtgaatgaaattggctaagtgacccaatcctatgcaacataggactactagattcatgaattctctggtggggccttagaaaggaaaatatactctggtaaaaacaaagggtaaggctgaaacctctacagcacacagacaaatacataggaaaaggtgtttactcaaagggaaacatttaggcacagaattcagaaaggcatgggctgaagacacagcttagggcttatgagtgggtgctcctcttccagacaacctgagtttggtttccaacacccacattaaatgactcacaactgtaactccagatccatggtgcccaacagcttctctgagactcagtaggtccctgtgctcatgtgcacatatgcaaatcaaacacacacacaattatacataaatctttaataaaaatttcaaaaatttcaggtgtaccttgattctggggtgtgtgaaccctagctttcctcactagcaagtgaattccacatagttccctacttcttgtgctcaggtaaccatgtgatctttaggggattaatgcaaataatccacacttcccttccttagccattacaaattcaatgcaaaaatctgcctttctttgtgttatagacacagcttggtgatggttattttctaataaaacgcaaaagagagaatttttttttaagataccaagatgaaaaggacgtgttttgaaattatccaagcaactgaatgttctggaactttttgttttgaaaccttctctcagcatgcctttaggtatacaagttagagactatgagacaagctgaagaaatttcaaatcagtaaatgcttcatgaacacccaggaaagtgagaacattgagcaattccccaaattctcttgcccagtgcccttcactcaagtgaatgacatactgccttttgtttctctactgagtgtcatagattcacagccactatccaaaggatagcactaagttggcatcacacctcttgtggaaactaaagttgaaatcagtgttatcaacagccgtgtgtctgatggggcagctcctgccactgtccaccactcacctcaggggtcactaattttagtgatccctgggcacctctgtctcaggttggccattctgagccacctgaaaggcgttctgtgaagggtcagcgggaattctgtggaaatatgtggctgccaataaattaactttttagcctttgagttaacacattcacaactaattgtcttattaatagtgcagcagtgacaataatgtgctgacatacaaatagcaaagcaagaataacttattacagttagtagtgatagtgaccattgttgggtcagtaagagtgaaaatgggcaaactgcgtacatactgtgctgggatcagtttttggagattttctttttcaattgttttaatcaattaattatgttaattcatggaagtaactgattttaattactttatgtccagtagttcagctggagtaaatttgtaatttacattgttaaagcaaatgtgtgtatatgcccccacccacacacagatttcagaagtgttccaaagccattgaaaagctgtgctgttagcgcctgtccacccagattcaactcgctgtgtgactatttaacctctgtgactcttgattgtctcattcgtgaaggggataattacaataccttcctcagagaaccatgaggattaaatacacaatgactgcctattgtctgtaacagaactcgttaatgttcattattgtttgtttctactatggttattatattaaaagaatcggggaaatccaggaaagcaaaagaaaagttcacatttaattccttttatgtaactgctattaacagtcataatggatcctatgctgttctagtttgctttctattgctgtgagatagaccatgaccaaaaggcaactttgggaggtttggggctggaacgggatgctagaggtgaatgttccggtgtgggatggtcagggagtggggtgtgggtgtttccgtcttactggggatgggaggaaaggaagaaaaggcagacagatggatacagggatagaaagctgggatcagagggtctgggctttcagatagagaaactgcaaccccccgaagcccagcatggaccagggaagtagtgttcaggttgtaaacacccagtacaattatggtgggcattgtctacacacactatcaatacccacagccagacgcacccctctacccaaggaaggcttcatcacttcattctaagtcttatctgtgaaaggctttgccattcccatggggctgtacctatagcaacaacacacatcatacacttcatgtgttcaacaacctcctactctcagggcttcctcccctcctcaccaataacaatagcagatcgcacctgagacgatgagcatccagcactctgtgcttgaggctagccacctcaacatttgggcaagtcccagacgagctatctcttgctggagagatggccagcagttactcagtccacaaggttggggcctcagtattcccagtctggagctagaaacctgggtcgttcctgaagagccactggtccctcgtccaagatgaaagcttgaaagtgcacgttctgttgtcagggaaggcacaagcagtgctggcagccgtggggtggatcccttcaatggcaggaaggaagggagccatggcaacagaggatgctcttcctttcgatgttccctttctgatgagggtgtgagctgctctacgccaatcaaggcaattcctcaggagaggtcccctatcaaggggattttaatctgtggcaagttgacataagaactaatcatggtagaagaaacgggcttatgtggctcatatgtccatgtcatatttcattagtgaggggagtcggagcaggagcagggaggcaggaattgacaaggaaaccctaaaggaatggtgttcactgacttgctttccatggcctgctcagtttgctttcttatattacccagaaccacatgacctctaatagtaggctgggatccccacatcaattagtaatcaagaaaattctcccacagacttgcttctaagccaagatgatggaaacatttctcaattgaactatctttttctcagatgagcctgactgtgttataacctagccaggacatattcttgcaggttttctgcttgaactcatgcctacattcactcaacttcacaatttttaaatgtattatttattaaattttaataatatattttccatacccaacatattcttgtatataattttgtctttaatagttgttttaatgattagctatatacaactgtacttttcttttaatttttgctataattaatacttgtgatctgaaacagaccaaatgcatatgtttcagaacagatttgattaatttactgatgttagtccttaggaaattttgatgaaatacaggctaccttaacattagtagttttaaagtgacttgccaggtgcatataaggacatcagttttgtttatagcaaatgtacaaacatggctcttagctttctcttggcttcattaagcttaggcagcaggtatgtgtgtagttttcttttctcaaattaatcacttgttaaaagtatacaataagttcatttcaacgcttattttctgtttcctataaattaaccagtaaatataaaagttagggatatgatcatagtttatactatttatcatggttctgtagcctgcttgtgctcagtgtctgaagtatagttcaaacaaggaaagacctttgtgaagctgggatgtgaaaaaggcccaaaaggaagaatattgaagaccattctgttatccaggttagaagtgtccagaatgtcataaggctgacagtacttgcagattccacccaacggaatgatgtggaccacagatattatttacatttctgattgttttcacttttgttcatcctgctaacctatatattcattgagggcacaggccttggttcattaattcttagtagagatcctgatgtagtaggagttcaacaaaatacatatgttgaacaacagtagcagcaacaacaaataagttgaatgcagcttccctggatctggagaacatttcatagttggccccctggggaagttgcctagaacaaggcccttggacttacctctttacagctcctatggtcatgtgctactggcacaaatatactaatattgaagacattcaatctggttaagattcaattcctaccctggaatccatactctgcaaagccatgtttagtgtcttagctctagcaccctgtggatccactcagtagtttaatccagaggatgctgttagcctcaagtttctagtgatgctctattattgactcttggacagtctagagcagtgtttctcaacttgtgggttgtaacacctttgggagttaaacagccctttcacaggggttcataacaaatactctgcatatcagatgtacacattataattcctaacagtagcaaaattacagttatgaagtagcaacaaaaataattttatggttggggatcaccacaacatgagggactcttaaagagttgagaatcactgctttagagcgattatttgatggcttgtctcagggtccattgcatgagatggcttatcagtatagtggaaaacattaaagccattcttccagtaacacgttatggtggctaaaatcaccagtgttggaaccaggctgtctcatctcaagcctaagcgtcctgcttaatttgccatgttaagcagctctccgcttcacactgtggccgcttttctcaggtgtaaatagatagtgtcaaccttacaggatcgactgcggatgaagttaattaaagcatgtgaagaggcagaaactgtaaataaatgtttcccatctccactttcgtgagaaatagtaagcagctccctgagagtgtcaagagcatcggacaccagtcatcttccaaagtctccatgggccactgttatcctagctgatgaacaatgtactgagggttagacaggtttaataataccttgaaagcatatatatatacatacatatatatatgtatatatacacacatatatacccattatatatacattctctctatatatttgagctctgtttgaaatgttccctgaatgagttagttctcctaagagaatgaaaagtgtctgtacgactgttgagatccttacatcctaatagctgacttttagccatttttcagccatactcactgcctcagcacgttttaaacactaaactgcaagtgcatgtgagagtttcaatatatatctgggatggtctgcagtttctaaagactattactgattttagattatactggtttgtaggcatgatttgctgtggtacatttgataatctttttatcagttaatttatttattcagtttacatcccaatatcaccccctctcctcccagtaccctctcacatagctccttccacatcccctacttctcctctgagaagggggagccccctgggtgtcctgtgtagttgtcacattgccccccccatccttcccctcctcactccagcacatcaattcactgtaggactaggcacatcctcccctaatgatgccagacaaggtggcacacctaggggaatgggatccacaggcaagcaacagattcagggacatccccctttcagtttttgggggatccacatgaagaccaaactgtacttttactatatatatgtgcaggggtcctaggtccagcccacactcattctttagctggtggttcagtctttgggagaccccaaggatccagtttaattgactcttgttttttctgtggaatctctgtcctcttcaggtcactcagttcttcccccaactcttccacaagattccctgagctcgatctagtgtttgactattggcctttgtgtctgtttccattggctactgggtggagcctctcagagaacagctatgctaggtacctgtctgcaagcataacactatcattaatagtgtcaggaattggttcttgcccatggagtggatctcaattttggccagactttggttggtcattccctccatctctgttctatacgtatcccagcacatcttgttggcaggaaacattttgggtggaaagttttgtgggtaggttgctgtctttatccctcctctgggagttctgcctggctacaggaagtgccaacttcaggatttatttccctcaatgctaggagtctcagcaagagtcaccctcatagcactctggggcctcttcctctcctgcccccttcccaaaactttgggatgctgtagagatgccctcaaccacccacctctgatttctgttctcccttccctgctctccctacacttggcacccctggtccactccccctctcctctgccacccagtttcctccctccatccactttaaatgtcatcctgagtgaggtaacccagacccaaaaggatatgcatggtacatagccacttacaagtggatattagctataaagtataggataaccacactaaaatccacagaaccaagaagccaaataacaaggagggcccaagggaggctggttgaatctttctcagaaagggaagtaaaatagatatggcttgacaatttttttatacatcctttaagcttacctcactttcaatagcatatgctagcaaatgctctgttaaccattggctaggtgaatggattgatattcagtgaaaatattgttcaaagctgagagatcaatagtagccatgaggatggtgatagtttatgcatgatacatatccagaaggcacaggagaatgttctctgagacagcatgggtttacacaggatccagctcgatgtctaaaggccttccgtttctcttttacaggttaattatgtacggctttgtgaaagccatggtgcatgctggccagctgaagagcggagacttccacttcactgactgtttattttttggttcactgatgtctgctacagatccaggtaactgttcaaataatgcatttcttttttttttttgaagagtcaaacatttaaattgatggtttctccacaggccgtcatttttgtctccttggtaataattcttcattcctcatcataggctgttgacacatctgtaagtgaattaaataagtcaagaaaggaaaaggaaaagaaataggcaatatcagacagctcccgagaaattggtcagaaaggagtctccacggtggaagggacttgtttaaagccattattgcttctctcgaatctagaaccatctgagctgttgtccttaagtttgtctctattgaacacttcttctttcaaaaattaattgttcaattaattagtttaaacattttttaaacattgtttactatggaactcttaaagttcatcaaagatagggaccagagaaaagaggactgccatctagcttttagtggccccaaatgagcacatgtctcccacctgttccagtttattatgactgtattgcattaaagtgaatttcaagtaccatatttggtacgtaagtactctgaaagtgactgccattatagaactgacaactgttcgccgtcatgacttaaaaaatctgaaagctccagccactgtttaaatatccttagttgacttgttcttgccattactggtttgttagtagtctatagaaatcatatccaaagacgacacataataccctgctccatctcctgagctatgtttatacttacgatctcctccatctgctatgctgtttgttgttcagagaatcagcaatagtgtcgcaagtaaactgaacatgggtccttaacatgtccctgtgtgcccagtgtttcttatggttaaagctagaggcttaatcagaatcggggtcaaattttttagcatgattctttacaaatgatgctgggaatatcccatcagaaggcaagtggtgactggcaattctgctgtcaacttagccatcatacccaggaattggtattctagcaatgtacctgagggtaaacgcaatgggtttcttatgcgatacagtgaaagagaatgctcactgggggtggggtggaggtgcttgctagcttcatgtcaacttgacataagttggagtcattagagaagaaacagcctcaattgaggaaaaaaaaaaagtcaagccataagacattttcttaattactgatggatgggagaaggcccaacacattgttggtggggggctgctcctaggctggtagtcctgggttctataagaaaacagaccaagaaagccacaaggaacttggcagtaaggagtactcctccatggcctgtttgagttccttccctgacgtcctttgatgatgaacagtgatgtggaaacaggagctaaacgaattcttttcctcctcaagttgctttgctcctagtcttttaccagagcagtagcagccctaagacagcagggagcaatgggttgtctcagagggtgtgataagggacaggcttatgatgggacatgagtttccatttgtgatatttagagaaggtttaaggggtaaggacataagtctggattagatatgtcaggaagtaaaagtaattccatataatccactcggtatcttatcttaaagggaaaaaccagactaagcttaatctataattgataaagaagccatttccctcttcttggttagaataggggatgttggaatttggcttggataattctcattgtgtttagagatgatgatgtagctgtcttgcttttgttgcaaccagcctggttacagagttaccttgcctgaggttgttctgtggaactgttcaacgggggtcgggagcagccaacacctcctgaccagtcatgctgacattaaatgggttatagctgcatattgtcaggctcaacctcagacctcagaatctaacttagctaattcataggcacagacagtttgacaagctctattgcagttccctgttgacattggctgctcccattgatggttactatttaatacagtatagtttcccagttcaactgcacagtgtaatagcaacaaacaagagccaagcaagacaaatgattgataatttcctctaacttcttaaataatgtgttgttttcatgccatcctctacacattgtcaccagggcaggtttttaaaatacatctttctgaatgcgtggattttaacataattgctatgtttcaatctatgctggctagtctttttttatgattaaaacactccttttattttttaaacaaggaagttcttcatgtttctcctgtatccttttgaaatgaccctagtgacctttgataaactttttgcatttgagtcgacctaatattccagccttatcatctatgacttctgtccctcaatttaaatattagccacctctccaagaagtcaatttgtttaaggacaaagtttgctactaagtgttttcattaccattatataggtcactctttttagaccatctgtgtttaggcagttatatcataaattcattaaagccataccataaattgattaaaattataccataaattcattttaatatattctgctcagttttaggattatagaaattttattatgatgccttgaattttaatgtacacttgcagtttttctgcctcttttttcctcctgctgaattaatagaatttttacttgcttcaatcatacattctcaaaattatctcacagacattattgctagaaatataacaactgaaaatggcttaagatttcatgtggttattttttgcctttgagtataccccacttgggatgcagttaaaagtttttctgtttttaaaatcactggaaaggattccaatgtgtggttaagcctcaagttcatcacaatcaagtgcgtccaattcgctgtgcttttttgctttgtttttattttaaaattggattaaatatctccaggattcaaaagaaaaaatacatattgggttgggggtagagagcctagctgctgtccctgtctgctctgccctaacttttgagacattttggtagttgttgggttaaatttctattcttaaattgaggctcacatgcaaacataaccaccctccactatgcactgttctgctggctctgtgttttagttttgtctaattaacagcacgttttagacattggcagcatctgaagatttctcttgctcccttttataactacagaaaaggccactctttagccaatctgctatcaatgggcatttgaaggtgttttcttgtgctttaaattagtaatcctgtagcgattagcagctcttttgtttcagctgttttgtttttttcaagacagggtttctctgtgcagttctggctgtcctggaactcactctgtagaccaggctggcctcaaactcagaaatccgcctgcctctgcctcctatgtgctgggattaaaggcgtgtgccaccatgcctggcgcaattagcagctcttaaattaacagcttttcatgtgtttccagtgtgtccttgatattgatttctagaaatagatattcctagatactaaaattctcccctgaacagtgtaccagtttgagttcagcttcggatctgtggaggtttattttcctcaaagatacgtcaaggcaaacttaggattctccataggtgaggggatttacatcttcctgtggtctgcgcaagcatctctcttactatgagtaaaactggaatatttatgttaaggggatacaagaagggtctcccctgcccctaacctctggtttggagcccatggtgtagatgagagaatcagagatccatgtgatgtaaagagtgctccacccctgggtgaggggtaacttggctattccaatactgctgggagatttatattgtgtttttcagaatgattccacactccatcacatgcccctggggaatgcagaggtggcttggcaactgctagaagcattttgagccagttagggctatacccttcagctaaatatgcatatactgcctttcagtggtgggtcaaatttcaggtcacctttacttatatgtgtatgtcagaaagcacctcctccattgtatctcaattctgagtttattgctacagcctgagtgtgctgaattctgacagactcaagcgtgtccaagtgtggccaaatttgttccttctttactggtgatattcccaaggttatgttttcacaacacagaaaactggctaaaatgggtttggggggttccagcctaataaatggttatttacctgccttgtgtcaagtggctaagtggatgagtcctttaaaatagaacattggcttgcagccaggaggagaacccagggcatgagtccacctctgtgtctggcatgcacagctctgcgactttgtgtagccgcttcagttccttagatttcacaggttcctgcaggtggaagagatgcaatcttctgccttcccgcctcagatggagacactgcttcttcatctgtaaaacggaaagttatgactttggctctcacgctcttccagctctgacggcggcgtgggattcttatttctgtgagatttcttttaaaataaactttagttttaaagaatctagaaaatcaacccaagaccagctgaccggagagtttgaggttctagccccagtcagcaaatgctgccatgatttctgatagcagaagcctgtagcatataagcaggagccctgggttcccctcctttactgagaactaattgttatattaaaacacattgaacctactctctgctaaattggtgtaatttaaggtcttcaataaccttaaaacacgtagttaatcttaccccacaattaatcatttattccctaaattctcatgactcactaatttatgaaagagaatctgtgttctctgggcttggggtttcttggccttctttaaatgaatcctttccctgttagctgtatccaagccaggggtcattacctacccatatgtatctgttagagaaacgtgttcagactttacagcttccagccattgcagactatctccagctagcttggtttgccccggctagtgaatctcctagtttagctaggaggatttgaccataatttgattaatttcatgtcaccaatgagacacttgctgctactgagacagtgagggtataactaggatcagaccctgagacagtgcaggcaggacagacaggtccaagagtatctgttaaatccctgagtcagctttccttcaggtaaattcagaataaatgaatcaaaaagatgggcaaagacatagaaatttaaattcagtagcaaaaggccccagtgtgggagcttgccttaataatgccattttcaggcctgcaggtagtgaagcccataaggaaaccttctgctagtctctcttcctggctcatccttcattgacttgggacactttggtaaatttggaattcccaagataatgattttgactacaaagacctaaataccgttacaggcaagtaggtaagatacaggaggggtctttaaggactgtgaagagacatggagcccccagtggagccacgtgccttgaatatggctgttcctgtggttatctcatttgtgctgttactcttcccactctaccctcttcaaggtctctgctcgagtgtcccctctgaggcagtgttaactgtgcccggcctctcaccctaatcaactccagatgctgttacttcaatccacttctgtcaacagcacttaccactaacaatcagctcagtcattttgattgatctacttattttggcctgctgcctaagtacgagggcttcttacctgtcttttaaagctaatacatctagtgtcatgggctttaataaattaatggatatgtttgtagaagaaactgtaagagccaagtctggagcattgaaaggaatctgagtttgaacatacaggtcactgtcagtcattaaatgtctcatggccctgcaagagtcagggacatgaagtacagatcaaactcaaggtagagctcctttctccctgttcaccagataggttagtactttcctgagaacaccacgccatggtttatagacttgtagaaaatgtcatagtgatataggtactttaggctggatgttattcaaagtaatagcttcctttaggaaaaggaaggactccacacattacaccatgtattaaatacttgtccaaagaattctagaaactcttcccggcttttgacaagtccgatcattcctgcaaggttcatagaaagctgctcattcgagcacgtgtgagctgtgcatttttgcacgccatcaatttctctatttcctttttggattcaaatgtcttcattttataggctgcagctgtactaagattcaaatacagctgcagcactttgagctccagaagttttagttcaggactcaaagcgggaggataagtgacttcataggcttgcctggttctcccaggagaaacactttaggctgtcttggatttgagtcaaattagctaaggtggggtctacagtcttgtttgctatacacatgactactgagcacttagaatgtgacacgcacagtcaatatgatctacaagcatgaatatgccctctgttccaaagacttaacacaataaagcatctcattagtaatttttaaaataacaataaagttgtttctatggtgctgaagaatgaccccagggccttaagcgtgctagacaggtgttatgcccatgaacatacccatgggacatagttttaaacattaattacacgtttaaatattactcatttaatattcagttgaccaaatatgctattaaaattaattttatctgtttatctttacttatttttaaaatatgaccaccaaaaaaaatggaaaattatgtgtgtggcttctattactctattgcttcaatagagcaatgtcaaaggggaatgttgtaagacaaatatatgatccttaataaaaatagcacaacaatttaaaattaagtaaaagaataggcatgcttatagggtgcactggtttgaataagaatggcctccataggctcatatatttgtatgcttggtcattagggagtaggtctacttgaaagagattaggaggtgtggccttgatggggcaggtgtggccttgtaggaggaagtgtgtcactgggggtgggcttttgtgtttaaaaggtcaagacccaatagctttctctcttcctgctgcttgggaatctggatgtagaagtcttaagctacttctccagtaccatgtctgcctgtgtggtgccatgcttcctgcaattaggatgctggactaaacctctgaatgtaagccagcctcagttaagagttgttatggtcatggtgtctcttcactgcaaacacacacacacacacacacacacacacacacacacacacatacacacacacaaaccaaagccattgactaagacactgggcacttggtggattgattatggaattggctgaaatacagatgatttacattttataaaattgaactagtatgtctggattttctttccagaattccttttccagtctcctttttttcccactggagttacacccatgcttcagaagcaaaacaaagagaaaagagttgatttaaacaccatagttgtgccttctaacccggaaacatttcagcctctgacctggggaaaggcggcttcaataatccccagcccaagggtctcaactgatcttctccttagcagaacataaataaaaggcctaaccgcctcagaccactgtgtgtgtgtgtgtgtgtgtgtgtgtgtgtgtgtgtgtgtgtgtgtgtgaaataactactactggttttaaatatacagtttgtcacaaaaccagcaaatctgacaatctgttagccccatttcaaagtgtattgagacatttgctgttcttgaattggataaactcaataccagaaataaatgtttatgtaaaagaagtcaacaaagacatgtggtcagttggaaaaatatatcccataactcttcatgaagtttagggtttatagctagctgaagtacattgttggttcggttctccaattaagcaaggaaacacacagaattcaatatgattcattatttgtcactgtcatcgctaaatgacatttagtgactatgtgtaagaaagtacccacagatgccacagaatacaaagggcttgctgctatggactgcacaatgcacaggtggctaataaatagaagaagaaatgttgattcttgtttaagagcagtctgctcggtgggtgggatgggcccatgctgaagtctgcactcaacctgagctacatgagcctcagtttctccatttatacaatggggataagatttatttaaaggtttgtctttgtgagtaagtgagctgacacatgttttgggtttttgttgttttgtttttaaatttttattatatataaatttatttttattcatatatatttatctctgtcttcagacacaccaggaaagggcacaaggtcccattacaggtggctgtgaaccaccatgtgcttgctgggacttgaactcaggacctctggaagagcagtcagtatttttaactgctgagccatctctccagccccactgatacaagtcttaacggttgtcactatcttatggtgacactgaatagagatgtcatgttgctgtcactgtaatcagatgttcacagtttttgcttggtttttctggcaatagtgctgacttcttcatatttagtggactctaccctggatagctgccttcctttgagggctgcatggttaaagtaggaagtactatgtgtaaaatgtggtgatttttcctttaagaaacaagtaacactttcacttctgtctctaccaatagagagaagataatggttcttaaaagtaaatttagacattgtcattacatttgaatagtatctttctacccctaagtatctagaatcatctgcaagcatgaacaagagcctttatcctgcaaaaacttgccaagggtttgaggatccactgctattgtcaagtaatctattccctttcacatagataatcagattgttgtctctgtctgtaatcagaacccaagcgtgacccacaggtggcatgtaggtgccacatccccaccttcttagtccagagccacaccccctgataccatgtcttttgaactgttaaagaaatgaggtcacttctagaggaggaagctcattctggactggacagtgtgcgtgcgccccgctgctccactgtttctctcaatatgcagctccctgagtgatggtcagcttcaccctcaggcttgtctccacagttccctacggtctgactatgttacctccattaggaagggcaaaaacagtacatttgttttttataactttaccctttcctcaaaatcttcatctgtaattattcctgcaatgaaactttcctatgtacttattctaagggtataccttatacatatcaaaaaggattatacagacatcctctggactcttgttcagagaaacaatccataaacaaatttccactataaacatgcattaaatttaaccacacggacaccattgcatctaaaatactaacagcaatgtttgtggtaggtgaagtaatggccctgccaagccctagtccccagaacctactaacccaattgcattaactttcttggctcaagagactttgaatatgtgattaagttaagaatcccgagttgaggaaattatcctatctcaccacgtgggactttacaaattgaagccccctgcttggctttgattggagaagatagtgtgaaaagaaggcctaggaagatacaatgtagctgctgaaaatggaggaagggtgtggtcatccaagggatgtaggtgggtactgccagctgggatgctcaaggaagctgattgtctcctgaagccttgtgttactttctctgtgactctgatgacacacctagcaaaggcatctgaaggaagcgtgagcttattttgtcttatagtctgtcctggcagggaagccatagcagcgggggtgtgagacagctggtcacatatcatcaatcctacgagactggaagtggggcctggctataaaatctgaaggcctgctcaggtcatgtgcttccaccagagaggctccatctgctacagattctatagtcttcaacaacagtaccatgacgtggagacttgggggtcaaacccctgagattatggaagataatttccattcaaagtgccagcaacgattgcagccctgctttaatttttatcctactgtgatttatgttgacgtctacctatagaataataagttgctagcttttgtgttctttcagtttgctatggtaatagcgtaatactaatgcaattcttaaatatcagcaatatgtaattaggttaaaatgtcccaaactgcctcataaaacttactattgctgttttctttgatcaagaatccagacaatatgtgcttattgcttttagaaataaattaaaataataaacttgtgggatgcttttctataaaagagactttaaggatctggaatcatgcattttaacttacagagaacacacaaaggtttagagatgggtgacttggctctacatcaatcatttgcaaagctagcattactaactggaagagcagccgtgcctataatccatcacttggaagtcaagaggcaggatgatctgaggatccatgagcaacctggactacttagcaagtcccagtgtggcctggcctatctaatgaggtcctgtatttaaaacattgttcatatttgtgagaaaatatagaatcaccttgaaaacacatttgtccatacctatgagagtggaaggtatttccaacagggctgggaagacctccttgaacatgtgacactccttcatggatattggactgagtgaagagagatccagccaagcgtcagcatctgcctctctccactcactgactgtgtacaatgtcatcagctgtttcatgctcctgccatcacgacttccctgccatgatagactgagccttaaactgtgagccaaaatagatgcttcattgtgttggttgtgtgaaatattttgttccaggtaaaagaaaagtaactaaaacaatattacaattagtttagagggcccctggggggtagacagtgggttctggaagaatggcaagcttagtctgcttcctctaccttttgttgctccatttattgtttagctttcctaaattcttggttcctaggatgcccctagcaaaatcatgagccctgttgttcctatccaaggagctttctgtgttgtgaatagtgtgaggatatcgagatctatagttgctgtagaacaggtttcccatgggaactggaaagtcataaatgtaagaaaaatgtgtgttgtaaatctgtacactttgaccctccatgataggaagagggcagaggttgatgtagatctgatgttagtaaagttgaccttctgtagtctggtggcttccatctggtgcctgagagctagccatactgtgttcagagctgcttgcacagaggggagtcccatactttgaagttccaggaaacaagcaaagacaatacaaacacaagatttcttagcaacccgagtgtagtggctattcctggttgtcaacttgacaatatttggaatgaattacaatccggaattggaaggctcaccagtgacccttatctggaggcttggagatccttatctggatcttggtttgaagatcttgagccacagtggctatgaattccagaagattgaatctccgagtttaaggaacacacctttaatctgggctacgcctttcatctgggattaaaggtgtggtggaacacacctttaatctgggctccaccttctgctggagacaatataaggacattggaagaagggagtctagctcttgctcttgctccttcgcctgcttgctgcgtgagactgagtaactgctagatccttggacttccattcacagctgcgactgaacaattgttgggaattggctgccgactgtaagtcatcaataaattcctttactatctagagactatctgtaagttctgtgactctagagaaccctgactaatacagaagttggtaccaggagtggttctagagtaacagaagtacaaggatgaatcttttaaaattctggaattggcttgttgatccaccagcactttcaactattgaaacctctcccagattctctccctcctgggagctcagagaattttgaagacccatggttgaaactatattccgaacttaaagaagctaatgcccttgattttcttaatgaattaggtgattcagtgcacaaagctttctacaagatggggaaaaaatcgaaaaatgattttactggctggctgctcttagtatctgtggaaaaaatgatgaatgaaaggaaggagttgtgtgataaaatcgaaaggctccagacacaagtaaacgatctaaaagttgctaagtgtgtccttgaggagaatcttctctcttgtagcaatagagctcaagttgcagaaaatcaaacagaaactctcattgtaaggttggctgaactacagcgaaaattcaagtctcagcctcagagtgtgtcgacagttaaagtaagggctctaattggcaaagaatgggatcctacaacatgggatggggatgtgtgggaagaccatgttgaagctgagaattttgaatcctcagattctcaagggtttgccccacctgaggaagtagtaccctcagccccacctcttgaaataatgccttccccacatgaggaaattaattttgcagagtctgctcacggcccaccaatagtttcttctagacctgtaaccagactcaaagcaaaacaggctcctagaggggaggtagaaagtgtagtccatgaggaaattcgctacactactaaggagcttaatgagtttgctaattcattcaagcagaaacctggtgaatatgtgtgggaatggattttaagggtgtgggataagggtggaaggaacataaaactagagcaggctgagtttattgacatgggtcctctgagtagagattctaggtttaatacggaagctcgcatagttaaaaaaggtgtcaaaagtttgtttgaatggttggctggggtgtttatcaaaagatggcctactggaaatgacttggagatgcctgatattccatggcttagtgttgatgaagggattttaagacttagggaaattgcaatgctagagtggatatattgtgtaaagcataattgtccacaatgggaaggtccagaagatatgcctttcaccagctctataagacgcaaattggtgagaggggcaccagcacatttgaagggttttgttctttcccttttccttgtgccagatcttagcattggagatgcttctgctcaattagatgaattaaattcactgggtttagttggatcccgaggtaacaagggccaggtggcagcattgaatcgccggagacaaggtgatcctagttattataatggacagcgtagacaaaagaatgtttataataacatacccagtaatggtcagcacaggagaggtgaaatttataatggcatgactcgcttggacctttggtactggctaatcaatcatggtgtttccaggaatgaaatacataggaagcctactgcatatttgtttgatctgtataagcagaaaaattctcaaacaaatgaaagaaaggctacattagatcgtggtaaacagcaatctcggccagtgaatcaatttccagacttgagacagtttgcagatccggaaccccttgaatgaaggggtggccaggttcctctgaggaaggatcttgataagacactcaaaggttttgctgttaccctttctccagttcttccccagagggacctacggccttttacaagggtaactgtacactggggaaaaggaaataatcagacttttcggggtctgctggatactggttctgagttgacactgatcccaggggatcccaagaaacattgtggccctccagttaaagtaggggcttatggagggcaggtgattaatggagttttgactgatgtccgactcacagtaggtccagtaggtccccggacacatcctgtggtgatttccccagttccagaatgtataattgggatagatatactcagaaattggcagaattctcatattggttccctgaactgtagagtgagggctattatggttggaaaggccaannnnnnnnnnnnnnnnnnnntttccttacttgagcaaattaacacatctcctggcacctggtatgcggctattgatctggcaaatgccttcttctcagtacctgtccataaggaccaccagaagcaatttgctttcagttggcaaggccaacagtataccttcacagttttgcctcaaggatatattaactctcctgccctgtgtcataatttagttagaagggatcttgatcgtttggatcttccacaaaatatcacattggtgcactatattgatgacattatgctgattggaccaagtgagcaggaagtagcaaccactttggactcattggtaacacatatgcgtatcagaggatgggaaataaatccaaccaaaattcaaggaccatctacctcagtgaaattcttaggagtccagtggtgtggggcatgcagagatattccttctaaggtgaaagataagttattgcacctggcccctcctacaaccaagaaagaagcacaacgtttagtgggtctatttggattctggagacaacacatccctcacttgggtgtgttacttaggcctatttaccaagtgactcggaaagctgctagctttgtgtggggcctggaacaggagaaggcccttcaacaggtccaggctgctgtgcaggctgctctaccacttggaccatatgacccagcagatccgatggtacttgaggtgtctgtggctgatagagatgctgtttggagcctctggcaggcccctgtaggtgaatcacagaaaaggcctttgggattttggagcaaagctctaccatcatctgcagacaactattctccctttgaaaaacagctcttggcctgctattgggccttagtggaaactgaacgtctgacaataggacaccaagtcactatgcgacctgaactacccatcatgagctgggtactatcagaccctgcaagtcataaagtgggacgtgcacagcagcagtctattatcaaatggaagtggtatatacgtgatcgggccagagcaggtcctgaaggcacaagcaagttacatgaagaagttgctcaaatgcctatggtttctactcctgttacaatgccatctgctgccaagcatgcacctatagcctcatggggtgttccctatgatcaactgaccgaagaggagaagactagagcctggtttactgatggctctgcacgttatgcaggtaccacccagaagtggacagctgcagcattacaacccctttctgggacaaccttgaaagacacaggtgaagggaaatcttcacagtgggcagaacttcgggcagtacacatggtattacagtttgtttgtaagaagaagtggccagatgtacgattattcactgactcatgggctgtagccaatggattggctggatggtcagggacttggaaagatcacaattggaaaattggtgagaaagacatctggggaagaagtatgtggatagatctctccaaatgggcaaaggatgtgaagatatttgtgtcccatgtaaatgctcaccaaaaggtgacttcagccgaggaggagttcaataatcaagtggataagatgacccgttctgtggacagtcagcctctctccccagccatccctgtcattgctcaatgggcacatgaacaaagtggtcatggtggtcgagatggaggttatgcttgggctcagcaacacgggcttccactcaccaaagctgacctggctactgctgctgctgattgccagatctgccaacagcagaaaccaacactgagtcccagatatggcaccattcctcggggtgaccagccagcaacctggtggcaggttgactacattggaccacttccttcatggaaaggacagcgttttgttcttactggagtagatacttattctggttatggatttgcctttcctgcacgtaatgcctctgctaaaaccaccattcacggactgacagaatgccttatctatcgtcatggtattccacacagtattgcttctgaccaaggaactcatttcacagccagagaagtacgacagtgggcccacgatcatggaattcactggtcttaccacgttcccatcatcctgaagcagctggtctgatagaaagatggaatggccttttgaagacgcagttacaacgccaattaggtggtaacagcttggaaggctggggtagagttcttcagaaggcagtatatgctttgaatcagcgctcaatatatggtacagtttcacctatagccaggattcatgggtccaggaatcaaggggtggaaaacggaatagttccacttactatcactcctagtgaccctctaggaaaatttttgcttcctgtccccataactctaggttctgctggcctagaagttttggctccagagaggggaatgctcctaccaggagctacaacaaacattccattgaactggaagctcagacttccccctggtcattttgtgcttctaatgcccttaaaccaacaggctaaaaaaggaataacagtgttaggaggggtgatagatccagattaccatggggaaattggattacctcttcacaatggtggtaagcaagattatgtctggagtgtaggagatcccttagggcgtctcttagtactaccatgtcctgtgattaaagtcaatgggaaactacaacagcctaatccaagcaggatgacaaaggacgcagacccatcaggaatgaaggtatgggtcaatcctccaggaaaagagccaagacctgctgaggtgctggctgaaggagaaggaaatacagaatgggtagtagaggaaggtagttataaataccaattaaggccacgtaaccagttgcagaaacgaggattataaagtagtatgaatgcccattgtaaatttacaaatgcgtttgcgattgtacgaggaatagttatatcatgttaggcgtatttacaaccttgttattgtttcatgtgaacatgagatattatttgtgtcaagttgacaaggggtggattgtagtggctattcctggttgtcaacttgacaatatttggaatgaattacaatccggaattggaaggctcaccagtgacccttatctggaggcttggagatccttatctggatcttggtttgaagatcttgagccacagtggctatgaattccagaagattgaatctccgagtttaaggaacacacctttaatctgggctacgcctttcatctgggattaaaggtgtggtggaacacacctttaatctgggctccaccttctgctggagacaatataaggacattggaagaagggagtctagctcttgctcttgctccttcgcctgcttgctgcgtgagactgagtaactgctagatccttggacttccattcacagctgcgactgaacaattgttgggaattggctgccgactgtaagtcatcaataaattcctttactatctagagactatctgtaagttctgtgactctagagaaccctgactaatacaccgagcaaaggaagatcattccaaacaagcgaattgcacggccaaacaccaattacttcttggaagggaggataaaaagaccaagtgtagatatgacccatggttttccaagtaacaattgaatggaagtataatatcacccattataatgaaaacctgaatcagtagcagtttgtatagaataaaactgagaagctgaaaggttaatttttaaaaaaatttatttttttgagtgtgtctacaccacttatgtgcagacatctgcttcttccagaagagatcatcagatcccatggggctggattacaggcagttgtggtgtacccattgcgggtgtgaggaagtgcactcaggcctgctgaaaagtgaggcaagcacacttaaccattcagccatgtatctaaccgataaaataacattttaatgtatttacatcaggaagataaaaccagaaactggatggccaagtcaagaaatatcacatatgaaaaatatagagagagatagcataagaaaagggtttttttaatccaataattaggcagattaaacatgattttttctgtgttgattaaaaagattcagcccatcatattaagtccatttgaacccatccagtttcaggcaggattgatgagaaatccggaagcgtgtatccaggcagcaatccgaaattacacggaagaagaggacacgaggtagagcaaccacatagaaatataaaagggaaagaaaagccatttgtaatgagtacttttaattgtcaacttgacacaacctacaatccaccccagaagagaggcaataaataactgttcttactgtgtgtgtgtgtcgggggagggggggagttacacgtgcgcacgcgtgacataaccagctgcctccagttcttgcactgtgactttcccgcatgatggactacatacctggaatcgtgagctaaaacttatcccctctcccctaaggtgcattcttgtctggatatttttatcacctcaagaaaaatgaagctaggacactgctgaactttctttgtgtaacatttggtgttagaagaaaaaaagcatgcagtatggtagttgctaaatatatgtttacaaattcaggaaagcaggaagaatttgattaaagggtaattatgctgggtgccctcaataaactcttttagaattagctataatagagaaataaaaagtaatggattgaataatgtaactaatcaacatgatatatgagatatttaataggtctttacctcctaatgaaaaactgctttttgttaatcaacaaaaaatctcaaaacttggctgtgtattttgccacaaaggaacatcaacagattctaacaagaaaaaaagaatttgctagcaacattctctcatcaagttgcctaaaacacaaaagagacaatagaattcttatacatcagaagaaatcaagaggaaagtatttaatgtctaggatacaaagcaaaggggaacattggagccacacccaatagacactcagatgaaattttgtggcattaaatatatttgttattgaagaataaacccaaactataaagaaatatagaacttaacataggagactagataaagaaaaattaaactaagtaattttcagaaaggggggaattaataaagacagatgaataataaataatgaaataagaaaataaaaaagtcaataaaaaacaaacagtgatgatgtctgagatgaactcagtgagcaactgggaggagagatgtaatatgtgtgggctttaccggagacacagaagagaagggtcacaagcatcacctcgtgcccaagagtcagataatcagacagcacagtgttccaaataatataccaggcaacgtgaaaaaaagctttacccatgatcataattacaataaatgtctctggtaacaaataaaaatctggaagaaaaggcttggaagatgatgaaatacctaccattgaaaagatggtttcatagctgaactacatctcactttcaaaacaaagaactctaacaagacttaacgattgtgagccatgtggaagcgtgaaagcctcttgtttatttaaagatggcatgaggctgaaatcaaacggctgaaaaagaaccacagcagaaagttgcagcccaccctactcagacttgaaaatactagagctcaaaataaaacatttgcaaatagaagctagaactgtgagtagtaaaaattcagaggcaactactgcataatgttaagtggactggatatgcagctcagaggtaaaacagttgctcatcatgagcgaggccctgggcttcgtctccagtgccagaaaagcagaccaccaccaccaacaaaacccattaactatgattaatactctctggatacaagagtggcagtcctcataaaatctaccaacttcagtggtaaacaagacacaatattgcacgtattaatgagataaaggcatttgaaaccttacagcaacagcaaagatgaattagaggtttaaaacatgaattaaaataattttaatgtaattcaaagcatttaccacaatctaatactagaaacaatcatcttaactgcttgaaactgggtaattccaaactgtagttgcagccaactttcttgaaagcaatgggaataaaagaaatataagaaacacgaaatataaggaagtctaatgctttggattatcaacagctcttactcctgggtccatggctagaggagaaagtgaccgagcgagccaagtgggaggaagctggtggagtgtctcactgtaggggaaacttctatccatgatactgttagatccaagtaacgctgcagtgaaaatcaaggcttaaacatcaacatttccctttctaccttccctttgacctttccttggactccccattggacagacaattggaacctagagccaggagacttacagttgtcatcatgtggtcagtgttctctggcggagagcaaggtgatagataaagaaggatgaagatctggaggtacggatgtaaaatactgtcacagtgttccaaggattgaaaggggggagaggtatagggcaaacatcacatatactagaaatcaagaaaaaaacctaccattttttggttaacattttactatctaaaacaactattacattaaatgtaacaatttgtaaggtgcctggatataagataaatatgcaaaacctgttagcatcaattttttttagctgggcctgatgatagaagcctgtcatcccacgtactctggaggatgaagaagatggatcacaaattcaaggccagcctggcctacaaagtgatctcaaggccatcttgtgcaacttggtgagacatcatctccaaatgaaaaatgcacagtattgaggatataacgcttgcctagtgtgcatgacgctctctgggttcaagcccaagaactgcctcccacaatagccacatagtatctacaagatgaatacgatatctacaaaatctacagatacttggagtcagtattaatatttacagtattgtcactgtaaacacatgatggggtaaatcctagaatacaaagttgaaattagggactctctttcacttgctactaggtgtttttaagactgcttttaaatagaagatcattagcaagctgtgtcactgctgatgctttggatgtccaaacatgttccaaacatgccaatgtcagtctttgcataacagtctttttgaaaccttgtatgcctgaatatattttacttatcccatcatattataagagcaatttgattagatacacaattgtgcattcaaagttactttttgtcccctattgctttaagttgaaatatttgaactttaagtgtgtatctctctgcattctgggtttaatttgcatctgtgactcccattttccagatgccatgcccctatttcttgcctcctgtatctcaatatttttatatgtattcttgtgtcttaaatcttccttctgtctggtagagctccactgctgactttcccatttacctgctttgcttcttcagctataaccacggatcccccttcctatgtcatcctagtctcggatatgttctttcttttaactcctaattttgtttgagattgattgtttgatgtgatgtgatgtggtatggtggtgtgtgtgtatgtgtgtgcttgcctgtgtacctgtgtgtacataccacagtacacatgttgaggttagaggacaacttgcaggagctggcttattctttctttgtgagtctcatggcttttgctgaactctggtgacagactctggtgataggtgcctttaccaactgctccatcttgccaacagtgcaatatttgtcccttacctttcctttcacgtatttttagctccccatctcttaatttaataattaaataatttaataatgaaactctgacataactactctaataatgtttctgcttgttgcttttctgtgttataactctcatagctcctttggaaatatcaacaattagactgacagtaagtattgtagcatgtcaacataactatagttaatcactttcacttgctaacatttctctggcccagttacctggggtaaatgattctcaggagccactagtcactgtgattgttttgttgttgttgttgttgttgttgttgttgttgttgttgtttttctcatctcaagaggagtgggtaggcatctgacattgagagggcaggggcactgctaagctttaatagcacagaggacaacagcccataatagatacttccctggtataatggtcaccagtcccatggttgagaggctgcgtgccagctaactgtctagaacaaggtttagaccttagggcaaaacagcattgtaaccttctggcccaggatttgtaaatgaagagttttccgagtctattatttaaacaccagaattatttgtaattctctgatctgagccccttgaacatctgcccaagtgcctagctaactgtatatgctttaaacaacagaatcaagcaatcattgttccaaagaaatgcaagtcacaaatgcaagattcagtgagcttagttgttttcgtttcttgatttttcttttctctacccccttcttcctacctctagtcacctgctatttatatacagcaattccaaacagccttccttctccctacgacttctcgtggcttttgctgttattgttatttgttctttttccagttctctatagacttccccatcattggattttgggcataagcttgtagcatattctaatagtttcataaaacgtcacatttccccaaattaatataatatacttccaaggaaaacaaagcactttcagataaaattatctgaaggtttgtgatgtcaaacaaaagcaaaagaggacttgtctaaccagatataagagtaccataaaaattcattataatcaatcaaaatggcaatgacccataatagaaaaaattataaaaatatcccagaataataagaatttgaaagaaatgaaaacatgatagattaactaaatgctatttgcacaacagattagctatacctttggaaggtggtatttatagaaatgtacttgaattaaaagaaaatgaccaagtaagaacttcacagaaatttataaatcaatcttgataaactatgaatataaaatgaccatcataaagatggaaagataatttataaaaaatagctattgaaaaagaaaaaaaaaacttcaaatggggaaagacattataaacaaaatcaatggacaggcaacatattgggggaaaccatttacatgcaaatgatgagtctttgctctctctttgagtgataatttggcaataagtaacagaaacatggacccagactaggaccaggcaatctgtaaaggatcaaaccttcttggccacagacatgagaagtttgttcaggttcaagggaagtcatagaaatgtacaataaaacaacagcctgtcatttcaccctacagtgtttggcagcagtaacaacactaacagttgcacttggcagggatgcagggaaaccgaacttctacacattaccagtggaaatgcaaatcattaggagactttttggaaagcaaatcacatcatttactgcaccttcaaacacacaggccctcctgacccagcaaggtgaattttagaagtctaatccatacaagttaaaaacaaaaacaaaagcaaacaaacaaacaaaaaaacctagctcttaacgggttgtgaacgaggatgcttattggagtattcttaagaggacagattgaagaaattgccagggttctatagaacttcatgggtccattaaaagggtaaatcagtgctcctcctgctcagacttgaggatttcctaagaggcatttttccctactgtgtaaagattcacaaaagtatatataaaatgattcaaaaattttaaatcaacatcataccctcctgtacgtatctggaggtttcttgctcttatgcctgtgtttgtgtattgtatactcttgactcggaccttgaatgggactcaggaaatatagccatgtacattgtttccccctcccacccattgctctcttgaggccccagggaatggggaggcctgggtgggagtggggtggaggacatcttcttggagacaggggggaggaatgggatgaggaactgtgggagggcaacaactgggttgtgaagaaaataaaagtattaaaagtattaaaaacaaacaaaccatcccagaggttccaaagatccctggctggcaaacaatcctgactggcaaacaacccactgtatgtagactgggtcacaaagggtgaatgaggctaaatttcaagttcctcttgagaaactgaatttggaaaatactgttacaatacttagtagcagaaacaaaagacaaaaaggctaaagcaagagatgacttgagtgtatttagagccaggtaaactatggtgaactgaaggcttgagggaccacagactaaggtggtggagcaaggcagttggtagagagtaagccagcgagcagcagtacagttggagacaaccatctggccccggagacagacactaaagcaccaggccttcacactacttgtgtgttccgccacccctgggtttgtgcatccctaaagcagatctctgtctcttgagctctctggactgtgcaatattaaatgctttatattctggggagaattttttcctgaggctactccttgcccactggtagataagaacctgaggtatttaagttgccagcagagacttgtgtcagtaacaagcacctccaatcccatgtcataatgcgaaatttcaatttgatctaacacgtgactttaaccacattctccccaacttgctgaagacaggtagccgacctttgagaagaggtatagagagggccgtctttctcacatgccttatttatcattcactggatataggttctgacatctccaaagtggggaaaacaataagaacccattttatgtggttgatataagccccccctcagagcacctatataggctctacatgtgagatatttcatgtgaggctcaaacctcattcatcagcatccatccccaaactcctgggggcatcttatgttgcctcttgggctacatctggttcctttccaaagctgagatccccagacaaccaatgtgagcaagagactctcatgtgagtctcagccccttacaagtctcacctgccaggggatgctaaggccttgggatcctttcactggcttaatgtggatgacaggtgagagagccatgcaactagaccaatggatggcgaccacaaacctccctggagaagtgcttctgtgtttcaaatcctgatttaacatctgttgcaaatgtgtgtggtgataattacaaagaggaatttagtgcagagaacctggtgggacatacactggattgtgaaattgggaagagagagaagataagacattgggttagaaggagatgggagagggtatcaaaattaaaacactgttaaagcaagcaaataaacaatgtgtttgttatggaaacatttgtgtgtgtgtgtatgtgtttgtgtgtgtgtgcgtgtgcgaatgcttgaaaagaaaaccacatatagaaattaagcaatcattttcatagtgtgttagtaaaccaccatgagctgtaatggaaaagatcttaaaacgcaatgtgatattgtgcatgtcatgaaatttaaaacaggatcagcaaattcgcatatgacatgtaagtcacacatcttcactttcttcagcagcttgggtgtgctaagaatccaaattgcccaatggagccctgagccctgggtatctgctctcatcgggagactactggctctcattaattgaatttagaaacctcaccgtggcattatcctgtctagagactaaattaaatgcatggattataattcatttactgaaattagatgccatcaggcattggctccaaagtcaaagtctttttgctcgtgggtatagctggaccagctcctaggtgacatgtgtcatagactggtgagccgaagagaacccaggtctcgtgcaattcctgcttcaagtacataggacaaattcaagctggccgcttaacctttctaggccttattttccttgtgtatgtccttagatgacagctaagatcctttgcagctagcatcgttccattttaaataacccaagacttcccgggggggtctgtaaaatacagattactgggtcctgcctccagacaccctgattctcccgagttggccccaatgttccatttctcacaggtatccgtgaaaaatgggggtcctggtccgcaatgctgacgaatttaaaacttgaaaaatgaagtatttgcttttctgagtaaaagtggttaattgcaaagtgaagtaagctcactatacgtatttccactaaaataaatatctgtgcaagaccttgtgggacatgtgtacagtttgaagtgtgtcacattgtcttgcttactgtaattataagaaaggtacatttttttttctcctaagataatgtgaacttctacagtcttagttcccaggagcttggtgcacgtagaaagcaggacagggtatagctcggtgatggaggatgtgcctagcatgtgcaaggccctgtttttatccctggtactgcaaaacaaatgaatagaaatgaagaaattgataagtaaataaagaaatnnnnnnnnnnnnnnnnnnnnnnnnnnnnnnnnnnnnnnnnnnnnnnnnnnnnnnnnnnnnnnnnnnnnnnnnnnnnnnnnnnnnnnnnnnnnnnnnnnnnnnnnnnnnnnnnnnnnnnnnnnnnnnnnnnnnnnnnnnnnnnnnnnnnnnnnnnnnnnnnnnnnnnnnnnnnnnnnnnnnnnnnnnnnnnnnnnnnnnnnnnnnnnnnnnnnnnnnnnnnnnnnnnnnnnnnnnnnnnnnnnnnnnnnnnnnnnnnnnnnnnnnnnnnnnnnnnnnnnnnnnnnnnnnnnnnnnnnnnnnnnnnnnnnnnnnnnnnnnnnnnnnnnnnnnnnnnnnnnnnnnnnnnnnnnnnnnnnnnnnnnnnnnnnnnnnnnnnnnnnnnnnnnnnnnnnnnnnnnnnnnnnnnnnnnnnnnnnnnnnnnnnnnnnnnnnnnnnnnnnnnnnnnnnnnnnnnnnnnnnnnnnnnnnnnnnnnnnnnnnnnnnnnnnnnnnnnnnnnnnnnnnnnnnnnnnnnnnnnnnnnnnnnnntagtgtgcgtggaggggtggtactatgagtggaggtgtggtaccatgcgtggaggggtggtactatgcgtggagaggtggcactgtgcgtagagggatggtaccgtgcgtggtggggtagtactgtgcgtggtggggtggtactgtgtgtggaggggtggtatcgtgcatggtggggttgtatctgagctgagtcagtccccagcttgcatggtggaggactaaccacagcttagtgccttaaattcttggaacttatattgtgcatccttgaatatgcctgtcaaaacaagacaaaatcaaacaaaaagtattttctatttctccccagagctgttgacagatcaaataagatgctttgtaaaagattacttataaattgctaagttttctataataatatctataataaaacttaacaacaatcaactcttcttgggcgtttaactggctcttcagatacccctcctatagcactttaattatttgtgactgcacataaaattgccagaagtttgttctcaataaagtagccaccataaagaatctgctttctctccttcgcctcttgccactgtccacttccgcagtgtagatgttcaaaggaaggaaagaaagaattagagccattccccgtggaagctctgcgtttacatacctgttttacactccaagattctgaactcatagcaattgctgggtgtgtgggtactgccctgctgttccatctattaattgcttgtggccatagcggtatctatgctggtctctggtgctatctagatcatggatgctttaatagactaatcagctgtggccacttacgccttttatcccccacctgctaatgttttcccacccatcctacactgcccatatattataaagccccattcagatccccgtgtttgggttggcctctcgctattgtttaaatcagcttcactactcttctcattaaagatgcttttcctttgtaatttgactgccagtccacaccctgagtcattgtctgcagttcagcccatggggtgtgcgtctaccatcctcaccagagccggtgatgaggcacaaaatatagcttctcatcttgagctcttcaatgtgggatttctctctgaaacaaattctctgacttggaaacatgattattaatattattaatcgtgattaataacattcatataacattaaaatacgattatcgtttccatatcacactcagatggaagcactagagaaatgtgcacatgtgaatattcatcttttcggttactaacactttgaggaagagttgtccaaaatgagaggcatttccatacactgcatttgcaagtcaaatttttctcttaacatttaagtagtagaaaaacaagatttagaagagccactttcatcctttaaagtttaccacggtgtaactgtttcaaaggcacatgaactgttttacctttgatcgcaatgataatctgaagaccctttctatttggggttactatggttacgctgcacgggtgatgtgggagctgcactgctgttttgataaaaataggtattaactaccagccacggtgcttctcatttcataggacctcttgcagaaaacgcagccgcatatttaaagggggacatgcggggtgcgcggaagcgtctccaaggcagcatgatggaacatctgcataaataatggtgattggtcatgtgtataaaaatatttttaattaaattccttctaattaaacagggcatcttgctgaatccctttctgttatttgcaccaagcttagtcgtgaggaagatggctgattagcagacccaagaacctataattaaaagcagaactgttatttttggagaaaagcttcttcaataggggtgacttaattgggctgtctctcataatttttcatttgtcactgaactcctcacttaagtcttcatttttttttaacatgggaaaaatgattactaacttggcgtaattcacagtttttatttttgatttgtgttttcctttggtctctttgatcatgctctctggtcactgttgtgtgtcactatttgatggtggtcttcagttatttgttttgtcagggaggctgtcatccttttgtatatcatattatatattgattttttttttttgtcatctctggccctccatacctctgtatttccaagtgtcaagtagccagacactcaactgctcatctttggtttagtatcctaccttgtgaattcaaaagaaaactaaacaacattctattcaccaaaataaataaatacatcataaacaaacaaaccagatgcaattgacaatggcgtttcctcagtatcacaattaacattggagaacaaagacaacattcaattaacatctgctatctgctaagtagcacaagaatagactcaggcaggtgtgattcccatagtcttaagagttaaaaccaaaggcattaagttcatggagttgaattatctgtgaggttgcagaggagaaacatggtgactctacttccagagtattatatttggaagagaacactgttttgagtctgaggtagagggcaggagggagaaaatattcacctgctttccttgaactccaagggaaagatattgcatctcaaaggaagtctgagcatattagcctacagcatttccccctgaagccatcaggcttcgaaatagtgctggcaggccaaccaatttctttatgtgatctgctgcaagcctgcacagtgttatttaacagcactcgaatgcattctctcgctctatccaattccatgttaagcatactgtgatagcatcagtttaaaagcctctatataaaccttagtctataaaacaccctcatataaacccagattctattctcgagcaaatttactcagaaataaaaataccagcttggatttatattgtgtacctctttcaaagaactcaaatagcttccacacgcagtgtttccgttcatttcacatcattgtctcagggagagaagagccacgttttagtaaaataattgaggtgcaaaggaatttgatgataacctgagattttacagccagccaatgagaactagactagtgtgctgggctttgcattgcttaggtttctggactgtgctcttgcaggacactaacatctatgcgtgcaaaatgtcttaattaacttcagccaacttttagctagctgcaaatcaataatgcttttactctacccatccaaacagcaccccttcaggagtcagcatgcagaagaagcaccccaaaactgataaacacaaacataggggttccatctgaattctcctacacacagagtctgtcatctactgataacagtctgtaactgtgtgcacaaatatctgacttgacacacttgctacaactgattcgatcaccaccatgatcaggcgattttattcattctaagaaacagaggttctaaatacttcattgtttatgtctataaagctcacaaacagcagtgttgaagacggtgcttccaaaattcttggacccacaaccactgctatttctcaagacaaaacagcaccctgtcagtcaagtttgtttgtttgtttgtttgtttgttttaaagatactcagtagtcaagagtccagttctcattttcctattgattgcattcaatggacatttaatgagtgactactgggtagcagattctgagagtgagtctgcgtgcaataaggttaggcctcaggattctccagcctgcagagaaatgtagtcccagccactagcaatgagtttaagagacaaatcaacactccaggggctttgtaaacacaggggagccctgtattagccaagttggctaaggctctgggatagcattttaaaattcccctcaccaggagccaagctgtgcctgtttgaagagacaccctgccagctagtggagccaggagccctatttcccatctaaaagagacaggtctatgatgagcagagggttttcattcccattcagggttccaaatattgtgacctgctcaacattagcaaaggatccctgggctcagatagttctgggatcaaggctagagagatagttctctcctcgttccagcagagaaggttaaactcattaataacttccgccatcctaccctctgcatttgaagctcagttcctctctaaaccactctcttgatcccagcaccacagcaggcctctttctgcataattaggaggatgtgagggatccatatccgagatctgtagttcagaggacgggattctgagagctataaaatttgagatgtggtgggaccttgaaagacaatctttttcaacctcctcatttgcaaacaagggccccaagattcagaaagagagagtaaatgtgcatgcagtctgcacagagttgcaaggaagaaaacttttagcctttctctacttcccccccctcccttaagtcattttacgccaataaggaaacaaacaagtatagatatcactgtttttgacggcaagatctactactggcatgaatagtagtcatggccactactgtttgtccaccactgtatgccaagcaccttgcagaaatgatccctctcagccatttcccagggcatctaaggaatgagtgcttctcttcatttacacatgcaatgcacggggatgctctagtcaagtaactggctccagtttaccaaattaattcacatcctagttggcacctgcccttggcttgggttgacaccagagtcaggtttctatcccctttcctctactccaggagagtaatgaatttcaaggatctcacaccaagatcttgcttgagaagttagaagtccagtcatggagcatcagctgcccagaacagacttagagacagtgataaaggatggccagctacacctcaggatattggacatagatgcagagagactccaggtgtcctgatgatatggtttcaagaacacgctgaaaaaaccatttgaagcactgccacagtcctgtgcgcagctgggaaacagctgtgcttgatggacgtctttggctagctgctcttgggaatggaacagctctactcagtgggggtagttcactctcagcagtgctcaaaggcagacctgcaggatggatgctttgaaagtcagtgtccagccccacaccgtctgttggtgagttaaacgtnnnnnnnnnnnnnnnnnnnnnnnnnnnnnnnnnnnnnnnnnnnnnnnnnnnnnnnnnnnnnnnnnnnnnnnnnnnnnnnnnnnnnnnnnnnnnnnnnnnnnnnnnnnnnnnnnnnnnnnnnnnnnnnnnnnnnnnnnnnnnnnnnnnnnnnnnnnnnnnnnnnnnnnnnnnnnnnnnnnnnnnnnnnnnnnnnnnnnnnnnnnnnnnnnnnnnnnctaagaagatgcttgagtccttgaattggttaagaatacttgaaaatgtgtagcccaggctggcctcgtgatcctcctgcctctgtctccttcagcaaatcctcaatggaggagctagacaaagtacccaaggagctaaagggatctgcaactctataggtggaacaacaatatgaactaaccagtaccccccggagctcgtgtctctagctgcatatgaatcagaagatggcctagtcggccatcagtggaaagagaggcccattggtcgtgcaaactttatatacctcagtacaggagaacgccagggccaagaagtcggagtgggtgggtgggggagtgggtgggggagcgtgtgggggacttttggggtagcattggaaatgtaaatgaaataaatacccaattaaaaaaaatacttgaaagtgccttctgtttacctggatgttctagataagaaactctgtgttgtgttattactgtgttattttgaacagaaatggcgatagcatctacagacaagtactgtagggcagccagtgaacagaaaagcagtggataacctggtgaacagacaacaccgaagctgctcctgcctcaagaattaaccttcagaggttcattcattcaaccaaccaacagaattaatgttcactgctcaccaggaaataccaaggggttgacaagcacatagctgagcaaacaatacaaaggaggcctaatttgtttttaaaatgatgcaattatttttattttatgtatatgtgtgttttgcctgcatgtgtgtctatgcactatgtgtacagtatctgaaaagaccagaagagggggttgtatcacctagaactttaatccagtcctctgcaacgaaagtgctcttaactacccagtcagctccccggcctttgtgactgaccactaccttagtatcccagaaggccattttaagtgagtgggtgctatttcttagggtgatagcacttttaaaaatcgcccctttcacataagaaaataaattcactggtaactgaatgttttatttttgcatcattttccttctagaaaggattactgtagggggccaaaacttcaggactaacaaagctaattcttgctgcagtatctgatgtaatatcacacctccaggatggatttctggctcctcgcctgatcttgtaaactgctggactgcaaagtgtagtttgacttctattattgtactctctcaagccagagattttcccgttgcaaataaaaatccatccatccatctatctatctatctatctatctatctatctatctatctatccatccatctacccatccatctatccatccatccatccatccatccatccatccatccatccatcctcctatctatctatctatctatctatcttcttaaaacacaaacaaaaagctctgggttggtgacaatgtattccttagactcaagaaaagcagatttatgacgccttgctcccagggagtggaaaactaatcaaacagccattgccagtgacaggcacacagagccactgcaggtgaaactgcctgggaggtggctgagacctgggtgtgatcggtacagagagaagcaaaagctgaagactgagattccacggggagaagcacgctgaggatgctttcctggacagtgtgtgtgttaaagcaaggagctttagaaggacagcaaaaagaggtcatggagcatgaaggaaaaccacagaagggcaggcagtctccccaaacaaagaagagatacaaggagcccagagtctgcacaagaggagtcagcaatctggaagtactcaggatggctagggcctcacatacggcatctgtggctttgagaaagggactctgggcaccatgtttcatgtttataagcttggcctgttttatgaatggctttctgcttattctgacctaaaaatactaaacatttactgtagaaaattcaggataattaaaacaaaaaatacccagaagagaaaattgctgttggctcctcttgtgggggctactttgtgatttgggacttattctcccaagatgtggcttaccagactgttgacatggcaccctgatctgaactccatcctagttagcaccagttcctcatgctgactatatacaacagtgcggcctggacagggtcattcctggagaataaggctatgagatataaaacaacacattcagagagactggatgatatggtatgctgtgtgtgatgatagcaccaggagggacattcagagacgactacatcagtgttaagctcccatagccccataggcagcatcctatgatttccttcccccactcccagcccccacacttttttttttaatctctgatacaagcttgcatttgttaagcatgatataaaacatggatttgtatatgtgatttatttttatttttattttatgccagtggtgctatggggcaaaggggctctgaaatggctgaaaatagggacattccagccatattctcactcaggagctctgaagccagcacacccatcatgttcagatcactatgaaccaaggggcccagacatattaatgtgttagcaatataataaatcaccatgtatccagcagattttggcattaaaactttatctctttactttgaaggtcagaagtccagctggaatgagttctttgctaggagtctcagaaggtcaaattcaaggttttagttggctggggccctttcataagttctaagaagactctctaagatcatccaggtttgtggcagaatccagattattacagctacagagctgaagttccattgcttgctaacagagatacccactgctgtccaagacccctctctctgccctggtaaatcagcatctacattttaaagtcaacaaagatctgacacacctttctaactcttagaatgttcctgacttcccctgttattcacacccctctagtaaattctctcacaccagcctaagaaatttcatctcctttatttttattgtataaaattcatttttattctgcctcaggtgttttgctggtaacaatttacaaaatcatgactaatgacaatcttttttttgcatacaaattgtgaattcacttacaagcaataaatgttactgaaaggagaatatttattacatatttaagtgttcagtgatgtaccaaagagcctggaggacaccagggaagttcaagatttggccaagcctcagggatctcaggttcttagctggggacgcagcaccaagtgcatacatctaagaaccgaatatctccatcatttagatcgattccactgaaatactctctttcaacactgtctcatatctcctaagacacatacttcttttctgcatcacgaattccaaaacattatttgtggaacacacccttttctttttaaaaatattttttattaatctttgaaattccatatgatgtattttgattgcacccagcctccatttctctcatctgtagttctaggcatcaaatatttagacttgtgtgtttagtttggaacactcaaagaatccaggaaactagaaagagactgttagtggggaggattaaaaagacattaaggaaggagagtggataatagaatacagacgatatgaatggggagagattgaagacgaggaaagaaatgacagggtaggacaagggaagggattcggggagggctaaaacctagcatgtttggaaagcatatggaaaatgacattaaaaaaagaagctacattcatagccaaaacaaaaaaagaatttaattggtgttaccctacacaggggattatgctcatctccgcaatcaatgatgtccaaattaaaaagcccagtgccaaatgtggaatacctcctttaggtccaagggtccagagatccccctaaatattacagacttttgccatcgttcttggtttcccaccagaattagatggtaccaccatcttgctgaaaacaccacacgcactggttagaggacatggagaaatcgagttggtgctgagcagaaagctccttctcttctggctagccatcacagtactaaaagctgctaggaatgttagaggagagaaaaccatcattagcctaagccggctgggaatcctacgaactgcagtaatacctgccgtagcaagatgacctgagcaagcaatagcggtatgggtgctctgggggcaaccaacttctccgcgagtagatttgaagcctgctccataaggaggtacagctctgctattgtaaatctggcaaaggggagttcctgtttcccagggttgacttactaaagggtcggctaaaggggcatagtagcaaatatccctcaaaattagcatctctccacgtagattagtgtatgtctcagacctcatcaaaggttcttgtgcagtgggtagtggctaatgtagaaactcataactggtagagtgcaaagaataaatgtcagccgagcgctcagccacatgtgggccatgtatatcacactttatcacctcaattttgaggctcgggaacagtttcagaagaggaaatcagaagtattgcaagagctggaggtcagaagggcgtcgagctgaacagtctcatctggacatgacaggattgccacactcatggactccaggcagctgtggttgcctacatgaaggttaaacctatcattgtcctagtgtaatgagggaagaggtttgccagcctctatccctgactggggagctacaaacaattgatggcttttgaaggaataagaaagttttctttaagggagtggcctctggttgactaatcctgctctagtcaccatatccaagagtatgtgggcagcacaaattggaatagatggaattctgtttttttgttttgtttgtttttttgtttttgttttttgggttttttgtttgtttttttgtttatttgtttggttggttggttgattttttgagacagggtttctctgtatagccctggctgtcctggaactcactttgtagaccaggctggcctcgaactcagaaatctgcctgcctctgcctcccgagtgctgggattaaaggcgttttgttttagaagacacaaagttggggaacagtgaggggaaatttcccccctcacaggctcatgtgatcaggattgaccactgcttcagctgatctaggataaaataccgattttaaggtcttctgacttatttgcattcaagagccgtcgtagtcatgtaacgaaacatattcacatgttccaggtgttgctaattgacagatttgagaagggaggaatgttcagattctcagacaggataagcacatgacatcaccctgtccctttgcaacactgcgattcaagtccagggccttgtgaggctaggcaagcattctaccaataaagaatagccttagtccttgatgaattaattcctcattctagtctttatcttttctctctcccaagcctgtgctgactcctctcagtattatgctcatttgcccttggacacattctccatgttggaactattatgtaatattcttcattgtccttatccagagtttgggaaattatgatataccatgtatgttttatatctttttatggtaagaaaacttggtgaagcactcctattcgatgtcccccatgatcataactaacacaatgctcttttgacttcttgttttccttacaattgttccatgtaataaaccacggtattatgtttacctccaagtgatgatttattagtgagccatcactaacttgggctgctctttggagccactggcctttgctcttaatatatttcatgatttgtaggtaaacatttgcctgccattttctgttttaaaatggcaatgtgctgaagcaatcattgtgattggagaactcttgtgtggctggctgagtcatcttcacttggatagagggtatacggcacagatccccattaaactgcaccatggctcattaaaccccattggggagaaaattgggtctttgttaaatgtttatgttctctgctaatgttaattttagaatattcttgctgtagataccttgggggaaattttaaagcactagctgaagtgccaagcaggtctcaatccatgaattcccaaatataagacctaggaactagtacctgctggggttggttattaaatatatttctttgcagcatttacatgctagcatttgattttctcattgcaaaaccttatgaccttctggttactgttttctactctcagagaccagtaggggatgtacttgtggcttttgagcaaaaggtgaaatcaattattctcaaacaccatgcagctatgaagtcaagaagaggattgtgattgtctgtgcttttgttgtgcatctttccattaaagaaacagctccccaatatttaacctttcaaatgaatgccttaaacaaatacagataccagtgatggaattgtgactctagaaataggctcctggggttaatgtaaaaacacaaccatttcctccgttgagagttactgtgagttctgcatatacactcagagtcagtgggttaccgcatggcaaaagatgttacgacacagggagcctttctgggtgaggatccagcatggaatctgagctcttcagaaactaacaaagggaaacatttcctcatctttctcaaacaggatgcttagctagtgtcattctcagtgcatagagaataagccgttatatacccacctctcttaggacagtcactctcaggcattttataatatggctcttcacaactctcccagggtaagaaagacccccaaagagtttctgttcatgtacccattattgtttatccaactagaaattaagacaaatttcaaaatgtcattttattgacttaagtaacaataatttgtacatttgactataaataatataacatatgaaagataaatttattttccaagagaaacaaaacactatgttgaggagagtagcatcatttccttatatttttgcaaagttcttcagtgtaggatatgagcaataaaagacaggggctccttacatctgcccctgaatgccacatgatgtactaatgctatcacatagccttttgtaaactctattttagtaaaccaaagaatgagaatagaaaaatgcaattaacacttccctactgttgtgaagatattctgaccataaagatgttcctgggtatggttcaagaaactccaacaatccttggtctatcctttgaaaccactactctggccaccagagcttgttttttcccaaagagacctggctgaagggattgcaacagtgtgctggcatataatgtcttttcactactacctcaatacctaacacgtggatcactacgaaggtcagataaagttgacatgttttaggccaaattcattcatcaagctttgtagaatatacaatttagaatggcctccacaaagtggcatccaatgaccaactttccagacagcatcattctttgacctagttcagaagggtgggattctgttatatttctattgttatgactggcagaaccccactggcaaaacccattcatgaattgatttcatagccaagtgtgtggagaggggggggtctagattcaaaataatcccagtattctagtctattctcacaaagctacaactgttttcaaaaccctcctataatcacttaaaccatttgtagggggatacatttcacagtactcttttaacaagagaagaatgctacctcatttatacgtataaatgagtaacacttgtcatgactaacaaggattcagctgcagaagccttggacactgctgattcttcatgtgtcatagacaagtgtcatacatactgatcagcacagaaatagcaagtactacaaagagagccagcatgacaacactgagtgatgacttagaatgacaagggaggaaactattgtgtcttgttgtctatcgacctaggcagatcatgtactaggatgccgagtgctggcacattgaaataccatttgaaatttaaattccttgtaaaacatcaagagaatatgggtcagagagctgcttacaaaggttctaaggcatagactgtcactaaatcactctgaagacttcagagctactgaaggagcttgcagagagcgatcatttacagacaagccgttaaaaatacacagaacattatttagcagtcaatacattggcattctgattggtttcaatagtcactttctggagttttttactctaagaatgttttcttactatctttctgattccatacagagtagctagagtttctataggatgatggtattaataaaaatatcccactagttcagtgtttggatttctcttagagattgtaaatttttctccatttgattctaatagtgtgtcgtaagtcttggattcacccctgctggagatgctgcaattcatgtccagcctccaggggcctgagtcatgcattggtacccagcttgcagcagacgatctttcatgactcagaacataacttccctgctgtccctggacacatcctgccttcttcttcttcttcccgtcctattagctcccttctagtctatcctctgccttcaacccttctattttctgcctgattccacccaacctacaacatggaatgtctagaagaaagcccaattggtttctgcactcttgtgatgctgcttcggctttctatcttacctcaccagtacaccccagaaacacagccacctacactcttctcactcatcccatttggctgctcaagctcttttctcagaactctcccatggttccgaagcatctgtcagtcacttggtggtcacactctttccatgtcctaaatgaaggtgtgtgcctctgcgaatgggaatcttctttagcatcagaggatagatatgtgtgtgtgtgtgtataatatacatataggtatatatatatacatacatactaaaaatttggtcttagagagtataagagaaggaattcccaaccatggatgaagcagcagcagcagttaccatgagagccatgtgaaccacaatgtaatacaggcaaaaatggccaaatccgttaataaaatcataggttccgaagatctaattatgtcatctctccttcctatgcactcttactcctgctatctagaatgctctcttgaggtcacaaaaggttcatcttaagtaagtactaattatttttagcctagcttagacttagggctagtctccccaacccagagagatctgaggagagcctgctatgaattacactgtgaccatttcaagaaagtctaaactgggacagtgcagctaagcatgtaaggcactgtgtgtaaaacttagcattgtctgtgaactaactaaatgagttcttttaaaagttccaagctcaggagcagagtgggtggctaattccctgactcacctattcaactcatttgccgtcctgacaaaatactccctcctctaggacacactagctggctttattctgaagctgttctgtttcttcacagggtagacaggaattcgcaaagtaatagctttctcctttgtgtgggatatcgtttatgaagcagggctcagttctttgttcaggaggaattgtgggaatgtcagatcatttttgaacataattggatatacagataaatactttcctcaaaaatagccttctgctctctttagaaagatgaagaatctatctcatagaacagagtggatatcaatgagtaggaactttagaataagaaaccaagccttaagttgcccatgaacctaggaaacctccccaagagtagaggtgggtcacaagctatccacagagctcaggaacaaatatacccagaagctgaagttggcacttgaactgcagagatagaattttctgataaagaataacttatattttatcctacaagatcccagccaaaggagaatgttgttaactaaaacctcagttgaaagctcactactttggttagatgcaggcacttgactcaacctgagatggagaaaaagatcacctgagatgaattctgactctctcatctccacctacagaagctgcctgttgtagcaaatggctcaaaagcactcaggagctgagaggagatctctgtcatttacctggggtgattaacaggaccctctggacttgaataatgaatttcattctacacttgatttttttttctttttggtttttcatgacagggtttctctgtgtagccctggctgtcctggaactcactctgtagaccaggctagccttgaactcagaaatccacctgcctctgcctcccgagtgctgagattaaaggcgtgcgccaccaaacccggctctacccttggttttaaaaaggaatcaggcctgctgccattctaattcatgatcccctccccaccccccttcatttgttttgctgttagatcctagcagtggcttctttgttttaaaaggggcactaaagaaagataaaatactttgacaaataaagcttatctgccattatagtatgtgatacattttatgcctatgaccaggaggaaaactgatcatacaaatgagcgtgtacctcacttcacatgctcatcaaccttttggtttggttttgttgttattgttattgttttgaaatgggaacattcaaaatctaactttcttgcaatcttcaagtacataatacatgattttaatatgtttcatattaagtcggaatctggaataatctcttctgcctctcaagcacaaaggccaacctatcctcctctttaagtagcatgggggtgctgttcctcgcctctgtccttacaacactcttgcttatccagtcactaagcagcacgctacattgcagcatatgccgagggactgggaagatgagaaccaataaataagccatgtataagcactatggtcactgggccatctccacttgcaatgatggatgtgcatggccctcagtgcttggagcccgactccacacctctccctttcctcgccagtaaaacccatcttttactggaactactagggaggccttgagccatctccctatcctgcttctgttctgctgtctgagctttatgtccaagttcaaatcagaatgtgtcaaccagcttactaaagaccttcaattgttttcgactgtggcagacagagcaaccttcacatttcttgattacttgaaaacccttcacactgaattcactttccttccccatccccaaacccaactagcactccatttacagaatacatattgtcctcgtgaactgggagaggaaagaacagagtgaaaatacccattctgcctttttccccaccatggacaggtatcattttgtaatactctctttccctcttggcaatcaattcagtgggtcattttcttaatgagtgctgatcatactttgcataattgtttcaaatgccgagacaccaggaagttttgaggagcacaggtaatcagcttgtggcatttatagctgtggtagattcacaaaggctcagtgctaaacagcctgtagcaactgagtgagtcctgctctggagaaccatgtctatggctgaatgtgctctcgggagcacatgagagccaggatctggttgcctttccatccacagtgctaggccattgaaacaatattcaattgcccgttccttcatccctttatcaaataattactgcacgctggtcaaataaacaccaagggttgcaaattgggccctgttcccaggaagctcagtcccttctataagtctgtgatttgatccaaatgctaggatcataaaagaatgagccagctcaaagctgaggagatcagaggattcagaagcagtctcccccaagacccttaaagaatgaagaaaaggatttcaaaagcatgtctctctctctctctctctctctctctctctctctctactctgtgtgtgtgtgtgtgtgtgtgtgtgtgtgtgtgtgtgtgtgtgtatgtgtgtgtacgcacgcacgcgtgtgtgcattgtggagcacatataagggatgagggaatggtgaaagtagatgctaaaggaatttctgcccttttaggaagggtcgaatacaaaacaaaaaaggtaagaaactgcagtgtgtttagaaagttgcaacaagtccagtgtgactttggaggaacagcaaagggtgggtcaggtgctcagagagaggcatctctggaaagtaagcatggatagaatttcttcacgggggtgggggtaggagaatctgttgtttttgaatgaagatcttgtgttcatgtggagggtgggtttaggaccgtaagtacttaataaatgctttttaaaaagtgaccataacgaagacacacgttgtggctgtgtcttagctaacttgtcatctttatgtgtgtcttcctagtgacagtgctggccattttccatgaactccacgtggacccagacctgtacacactgctgtttggagagagtgtactgaatgatgcggtggccatagtcctcacatagtaagtaccagatcttgattgcattcctttaactgtggttcctcgtggagttaattcctgatatctttaatagcatcttctttctatgacagagaggaaacagccctttgtagcttttaaggaattgtcacagaagatccccaataatgggcacaattcattaggcacctaatatctaatactgttaatggccttcacactcccagattattacaagatactacccagagggtaacagattttttttctcagtgcatatatttagctgattcactgaaggctcctaagatgcacagaaatgagctgcctcttttcaaatcaatgccacttagcatttccctcccaccagttgcttttcagataacaggctgacagaagctctagaatttagcttttggcagttcgggacctagaactcagggtcagagcactttaccttctcagtgcagattcagcactgtaaggcaagcacagggtaccgcccttcccatcccacacggccctgaagcttccccagctgagtgcagatgtgatttccctttgtgctgagaggtttttccccccaagatgagacccagcatgctttctccacctcttctttagacacatagccatttatatttaataaatgccactctggcagcttttcattgtgtcagaggtctctctgtggttttagattaagaccaacattttgggcaaaactgtcagatattcccaaggaaagcagctatctgataattaaatgtgacaacggaattctactcccagtgttaattacttcaaatgcagttgaaaatgtattgtggaataacaaaagattttaaaggcagacctcagagtgaggagagagaagcaggcagcgactggcagccctatcagcttgtgttccagttccctttcgtttgccaactgacatttcttaaagctgccctcctccctccaaagttgccactgagttcagccacgtttacctggccacagagacagggatttctctgtgtcgcaggaaactactagcatgtaagaataagaacaaaaagccatggtcagacacataaatgcagaaggatgctttgaaaacatcaagaacaattaattaggacaccaagagtccctgtcccagaaatactaacattaaaggaatatttgaggaaaaaaaatagaaaaatctgctgagtcccttcatttttacttcctgagctgccaaactgtaagaggctgtgtcaaacaaaaccacaaaacaatggggaaacccaccctggcccgtccaaggcaggcctgtcctctgcccagcactgccactcacagtgactcccactaaaaataaggccttgagaatgagtgttggcccgttaggtaaaagcctgggccactagaaatggtttattttctacctcaagtctatctgtggcttcctaaacacatgggtcagtcagtcacaaaccaaactctctgaaaccatacaaaattaaatctttttatctcgaagctgtgtctctcaggtattttggtcatggtgacaaaacatatctaattctgtgtcttgacaaggtgccttcttttctgggcaggaaacaattgacattctagctgaagccctgcagtccttagctctgctatggtggaaccgtgaggcataaagccaaggagttcgtatgaaaataaaactgtctgagtaagacagtttctctgcccaaggtctgcatattaggatctatagcgtccctactatggggttgtttgactgccgaccagtattgtgtgatggccgagctctggcctctctgtgcaccagcatttcctatgacttgcctcttcgccccttacactgtcttccatgggtttttcttcttacctgttcactcatttctttttaaaattgtctttggagaattttgcaatgatatgcaaattctaccattccctctctccatccctgttcccctactccttctctaattcatgacctcatctttagttttatatataatgtatgttatatttgcataaatacacacacatatatatagacatacatacatgcatacatatatacatacatatgtatatatacatatacaacctactgaatcaatttagtgtggctcatatctccaagtatttaggctgaccacttgggattgaaaaccaatcagggctttcccttgagaaaactgattctctctgtgtcagcttctactgcttacctatagcttttatctaaggaaagggccttgtgaaatatttctcatccacactgggatgccggttggtttttttcattagtcaggtcttgtttaagcagccatactgagatttcataggtgcagcttccttgccatgtctggaggacgttatcgcatagagggcattctgttccctctggctttacagtttttctatgccctcttctgtgattatccttgagccttaagtattaagggttgtgttgttaatgtgccagttgaaattcaacctccacaccccatggtcacttatcctcatttgactcatttgtgagttttaatagtcttcatctgtctcaaaagaagcctctttgatgaggggtaagagctacacttatttgtgggtttaagtatttagaaaacagagattatattagaaattattctaacactaaacactaaattgattcagtgtgtgcgtgcgtgcgtgtgtgtgtgtgtgtgtgtgtgtgtgtgtgtgtgcataaactaaagatgaggtcatgaattagagacagagtaggggaatgtggaaggagcaggctggagaaaaggaatgttagattaaattataaaacagaaaagtagtagtaagttctcttccagtttctatgacttaagcagccatggatagttagctaggttgaatgaattgtactggaactgaccttcaagtctcctccctgagaactaactttcatagtatgagaaggtgctatgcaaggtgccaaaggataaagcaattagtggatctactcagctgtaaagcctacccactactactacagcagccttgcaagacatacatgctgaatgctgcaatagtggcaaaagtggccaaaaccttttatctgagagtaaccatcagttcctaattggacttaaggaccactttataggagagaatcatgcctgctacaccattgctaagtttagaccctacataatgatggtcaacttaaagtagattgtacataatgatctcgtcatgttatttcttgagcactaatgcccatctctatctctcttccaaccatttctacctcccttagggatttctagatcacataaagattttcccctgagtttcttactaacaattcatttgttcctcttttttttttctcctctatactgaaccacacacagcacattgatagtctctgagtggtaggtccaagacctcacaataaaatccctcctcttacgttgttctccatgcatctggttctgttgaggcctatcttctaactctcagcccagtaacttcctttagggttcaccagatcacaatcagagccaggacttccccagcccatcagttccttccagttggcattggatttgcatgcatattcgacttctagatagtaactttttgaaagcagagtatatatactttaagtgtgtaaaaagaacaaatgaaaaactttgtgctttagctttattggtttccaggcttaagaacagtggtaaatgctgggagtacagctcagtgatagagcctttgactagtatgtaatgaggcgctaggttccactcctaccatcaaagttttctttaaaaagaatagctacaggactattttttttttgcaagcatcatggaaaaataaaaattttaaatctggaatgtgaagttggatatacatagataacctttccctttatcgaccaaggttacatttcaagagtttcataaatgtccaaaagtgtcatactgaacgctacagatgtgttttcttcatatacaaatataactatgataaagtttagcctcatagattaggtgaagtagattaacagcaacacagaataataaaacacttacaacaatgcataataacaaagagcccttaaaagttatcaactgtgtggttttggaaactcctttttaatattttcattggatttgaccatggattaataaagtttcagaaaaccaaagccagtggttaatgtggactaccttgataaactcaaatcattggcaagtgtggcccttagcggggtctctaaagacttttggaaacaggcttctgttgatctccccttcattggccatcaaattttacttaaagattacccattccttttccttttaatactttgcattttaattgttaatatgataatagtgtgctctagtacttagctacattttttgattaaagatgcttttctttgatagcctatgaagcaaaaatattataattaatactgtttcttaggttaaatgtgctctcaatttcagacagttaatttataattgaatttgattttcccatctctcctacatagcacatgatgacaagtgctgtatcatatttctatgattaaaaatgatccagcaattctttgtcctgaaataaaagtaacttcaattaacataaaagttctgaaatcagcttatctctgacccacactattatgtctagtatataggaatatcctttccacgtgtgtgcacaccggctcaaaatgaatgatttacctttctaaagttgttaaatagactttgaaaggaggcagaagacagagcaaagagatctggagaaggtatacgtgcttgaatcctgaacaaagacattaatttcagaggcagcatggcagaagctacaattagaagtcagatctgatgtcaggatcccccaataattaactgtgcaatcagtacagttttcccagaaccaaccaaactgctgtaagcaaacagactgtgagctgatgtaagtgagcagcagccataggaatagctcagtaaagggccccaccaaatgagcaggtctctccctcctcacccagctccttcatgaggcactgctccagtcttctgaacagagcaagaacccacggtccattagcccatcatccccggccttgtttgctacagcttatagattctcgaactgtgactactttaggtatgcttactgaggcaagggagacactgtcttacccatgtaagccacgtgtaacatcagagtcataagtggcctcacttggaatcacaaagctgagataagaaaagcagaattattgtccaagtaaaatcgccatgaaactaaatgctagatagaaatgtaacaaaacttagcacaccagaagagcggtattggttttcctgcctacaaagtgtaaaagtcgttatttagtataccttacaaaactatccaagcaagaaataaagcaacacagttgccaaagctctgtagctctataggaagtctttatgtgatagaaatacttttctagtttatctcatcattcctgttgacatctactgtgtctttttttaactagcaaatcttgaaagcttaagaactcaagatgccaagtcgtacccagagagctggagtctgagaaattggagccctcctaggttactgacaaaagagaaaagtgatacaatgtttctttttttattagagattttctttatttacatttaaaatgttatctcctttcctggtttcccctcccaaaactccttatcccatcccctctcttcctgctcaccaacccacccactccctcttcctggccctggcattcccctatactggggcatagagccttcacaagaccaagggtctctccttccattgatgattaacaaggccatcctctgctacatatgcagctggagccatggatccctccacgtgtactctttagttggtggtttagtttttgggagctctgggggtaatggttggttcatattggtgttcctcctatggggctgcaaatcccttcagctcattctctagttcctccattggggaccttatgctcagtccaatggtaggttgagataatccacctctgtatttgtcagacagtggtagagcatcttaggagacaactatatcatggacctgtcagcaagcacttgttggcatccacaatagtgtttgggtttggtgacggtgtatgggatggatgcccaggtggggcagtctctggatggcttttcctacagtctctgctccacattttgtctctgtaactcctccatgggtattttgttccttcttctaaggaggaccatagtatccatagtttggtcatccttcttcttgagcttcatgtggtctgtgaattgtatcttgggtattctgagcttctgggctaatatccacttttcagtgagtgaatactaggtgtgttcttttgtgattgagttaccccactcagaataatattttctagttccatccatttgcctaagaatttcataaatttattaagtttaatagctgagtaatgctccatcgtataaatgtaccacattttctgtatccattcctctgttgagggacatctgtggtcttcccagcttctggctattataaataaggcttctatgaacatagtggagcatgtgtccttattacatgttagagcatcttctgggtatatgcccaggagtggtattgctgagtcctcagaaagtactatgtttagttttctgagtaactgccagactgatttacagaatggttgtaccagcttgcagtcctaccagcaatggagaagtgttttctctttcactacatcctcactagcatctgttgtcacctgagtatttgatcttagccattctgactagtgtgaggtggaatctcagggttattttgatttgcatttccctgatgactaaggatgttgaacatttctttaggtgcttctcaaccatttggtattcctcagttgagaattctttgttttaactctttaccacatttttaaatagggttatttggttctttggagtctaccttcttgagttctttgtatatattggatattagccctctatcggatgtagggctggtaaaaatcttttcccaatctgttggttgttgttttgtcctagtgacagtgtcctttgccttaagaagctttgcaatgttttgaggttcaatttgtcttgatcttgtcttgatcttagagcataagctgttggtgttctcttcaggaaatttgcccctgtgcccatgtccttgaggctcttccccactttcttttctattagtttcagtgtatctggttttatgtggagggccttgatccacttggacttaagctttgtacaagaatttaaaaatggatcaatttgtattcttctacatgctaacagccagttggatcagccccccccctttttttttttgaaaatgctgtcttttttccactggaaggttttagctcctttgtcaaagatcaagtgaccatagttgtgtgggttcatttctaggtcttcaattctattccagtgttctacctgcctgtcactgtaccaataccatgaatttttaaatcacaattgttctgtagtacagtttgaggtcagggatggtgacccgaccagaagttctttcattgttgagaatagtttttgctcccctgggttttttgttattccagatgaacttgcaaattgctctttctaactctgtgaagaattgagttggacttttgatggggattgcattgaatccttagtttgctttcggtaagatggccatttttactatattaatcctgccagtccatgagcatgggagatcttttcatcttatgagatcttctaattctttcttcagagacttgaagtttttatcatgcagatctttcacttgtttacttagagtcacaccaaggtattttatattatttgtgactattgtgaagggtgttgtttccctaatttctttctcagcctgtttatcctttgtgtagagaaaggccactgatttgttcaagctaattttatatccagctactttgctgtagttgtttatcaggtttaggagttctctggtggaagttttggggtcacttaagtatactatcatatgcaaatagtgatattttgacttcttcctttccaatatgtacccctttgacttccttttgttgtctaattgctctggctaggacttcaagtactatattgaataggtagggaaagagtgggcagccttgtctagtcctgattttagtgggattgcttcaagtttctctccatttagtttgatgttggctattggtttgctgaatattgcttttgctatgtttaggtatgggccctgaattcctgacctttccatgacttttatcatgaagggtgttggattttgtcaaatgctttctcagcatctaatgaaatgatcatatgattttttttctttgagagtgtttatatactggataactttgatggatttctgtgtattgaaccacccctgcatccctgggatgaagcctacttaatcatgatggatgatcattttggtgtgttcttggatttggtttttgggagttttattgagtatttttgcatctatattcatcagggaaattggtctgaagttctcatttttgttgggtctttgtatggtttaggtatcagagtaattgtggcttcaaagaatgagttgggtagagttccttctgtttctattttgtggaatagtttgaggagtattgatattaggtcttctttgaagttctgatagaactctgcactaaatccatctggtcctgggctttttttggttgggagactattaatgactgtgtctatttctttaggggatatggcaatgtttagataatttatctgatcccgatttaactttggtacatggtatctgtctagaaaattgccatttcttccaggttttccagttttgttgaggcttttgtagtaggatctgatgattctttggatttccattttccgatgttatgttccccttttcatttctgattttattaatttggatactgtctctgtgcctctggatagtctggctaagggtttatatatcttgttgattttctcaaagagccagctcctagttttgttgattctttgtatagttcactttgtttctacttggttgatttcagccctgagtttgattatttcctgccatcactcctcttggatgtatttgcttttttatttgttctagagctttcaggtgtgctgtcaagctgctagtgtaagttctctccagtttctttttggaagcattttgagctatgagtttcctcttaccactgctttcattgtgtcccatagattttggtatgatgtgtcttcattttcattaaatttaaaaaagtctttaatttcactctttatttcttcattgatcaagttatcattaagtaaagcattgctcagcttccatgtgtatgtgtgtcttctgttgcttttgttggaatttaagaccagttttagttcatggtgatctgatagggtgcatgggattatttcaatattcttctatctgttttgtgaccaattatatggtcagttttggaaaaggcaccatgaggtgctgagaagaaggtatattctttttatttaggttgaaatgttctataaatatctcttagatccatttggttcctaacctttgttagtttcactgtgtctctgtttagtttctgtttccaggatctgtctgtccagtgctgagagtggggtgttaaagtctcccactattattgtgtagggtacgatgtgtgctttgagctttagtagtttcttttatgaatgtggttacctttgcatttggagtgtagatgttcagaattgaaatttcatcttggcagatttttcttttatcagtatgaagtgcttccttatcctttttgataacttttggttaaaagtcaattttattcgatattagaatggctactccagattttttcttgggaccatttgcttggaaaattgttttacagccattttctctgaagtagtatctgtctttgtcactgaggtgtgtttcctgtatgcagcaaatattgggtccctgtttatacatccaacctgttagtcttcatcctcttctatacctaatatccttaggtttggtcatctagttgtgtcctggacttcttggatgtttttggttaggaacttttgaattttgcattttctctgactgttgtgtcaatgctttctatggtatcttctgcacctgacattttctcttctctctcttgtattctgttggtgatgcttacatctattactcctgatctctttcctggattttctaactccatggttgtctccctttgtgatttctttattgtttctatttccatttatagatcttagatggttttgttcatttcctttacctgtttggttgtgttttcctgtaattctttaagggatttttgtgtttcctctttaagggtttctatctgtttacctgtgttctcctgtatttctttaagggacttatttatgtcctttttaaagtcctctatcattgtcatgagaagtgattttagatccaagtcttgcttttctggtgttgatggtgtagccaggacttgttatggtaggagaaccgggttctgatgatgccaagtaaccttggtttctgttgcttctgtttttatgcttccctccttccatctgaatatctctagtgctacctgccctagctatctgactgaagcctgtccttcctataatcctcgttgtatcagaactcctcatagtcaagctctctctgtgatcctgtgatcctggaacctgagccactggttgggcagggttcctgtgtcagagttcttgggagtcaatctgcctctgggaccctgagattctggtgtgaacaagctcctgcaatcctgggatcctgagattctgggattctgtgatcctggctgtgttagagcacctgggatttcagcctcctctgggtgctgtgggactggttgcagagttccagctcaagataaactggaaggaacctgagccactggttgggcagggttcccgtgtccctgcgtcctgctggttgcagttactccaggtggttttggaacagatgttgtgtcctcctcacctctggtcctaagatcctgggtgtgctagagcgcctgggagtggagcctcctctgggtgctgtggaactggctgcagagtttgcacccaaggtcaatacttttccaaagataatttagcattatttagtaagccattaggctttgggtcatttaataaggaactccacttctagaaattatcctaagaagtatttgaggccatgaagttgtgtacaatggttgccaggtggtttagcaagctctgtgcattgtgtcactgaaagtacccaacgagctaaaggggtctgtaaccctataggaggaacaacaatatgaactaaccagtaccccccccccccccagagcttgtgtctctagttgactatgtagcagagtttggcctagtagtccatcagtgggaggagaggcccttggttttgcaaagaatatatgccccagtacaggggaatgccagggctaggaagcaggagtgggtgggttggggagcagggtgggggtgggggggagggtataggggattttcaggatagtatttgaaatgtaaatgaagaaaatatctaataaaaaataaattaaaaaatgatagagaaagaaatatattgatgtaaagagatgcacaatacattttaagtaagacaaatcaacctaatttgttctatttacatctagtaaatagtagtattattagtacatctagactagatatagaattccaaccaattacaaagcaagttcaaggtcagtcttaattacacaatgagactttgtctcaaaaatcaaatcaaaacaaaatactatcaactatatgtggatacctatgtacttatatagtatttctttcctggttagctttctgttgctgtgatgaagatcattaccacaaacaacttaggaagagaagggcttatttgacttacatgtcctgagcacagtccatcattgagggaagtcagggcaggaattcaaacaggacagaaacctggaggcaggaactgaagcagagaccatggaggagttctgctaattggcttgttcagtttattcttttatattggatcacctgtgctgacatgacactgcctaccctccccatatcaatcattaatccaaaaaaaataccctcagaaatatctacaggccaatttgatggagacatgttctcagttgaagtttcttcctctttgatgaccttaccttaagtcaagttgacaaaaacatcaacaacaaattatctatattataattatatgcaaatcacatatttcgttatctttgtatttcacctataattatgaagatatagtgatgtgctgtatgctgtttatatatgcaaattacttatatgtcatatgtaaactatatactattttgatataaatatagtttaaaggttcaaagtagtaagtgcagcattgtgatggaacatgcttttgttttgttttgtttttaaaataactccacagtgcataaatgcctgcaagttttcttagaaataaactaagggcctctttaaagagcaggctcttggagggtaataaatacacactaagtgcctttattccttgtaaagcaaatactgataagaaagttcagtgcagctcattaaaggaaagagaaatggagcagcaattttctccctctaaaggagagtgccgtgctgcttagaagttttgctagaaaatgtcacagaaagtgtgatgccagagaacgcttggcacttatccacaagtgaaattttgaaagaccacactcctaagacccttgcttcttagggggaatttaacatgaaagggaatgggacactgtgagactcaaccatggagctaagaggaaccctgagatacttactatccagcaattcaataacatgtgcccagcactgctaccaattgcctggatttagtcacccatctctgccctcagtgagctgggcaaataatagctatcacaggatttaatgtcaatagaaaacattcctccaacagtcagttcagaagaactgtagaatttagatataaaataggtccctaaggaaatctcattcattccaataccaatcatttttaagaagaaaacaaactccttacagacaagttagacctttctctgtcccccacaacacaaactaattgtttggcagtttctccaataattactgaccgaatcaattagggtcttttcaggtgcagatggaggcatttattaatcctctcattaacagcttttttgaggatgtatgtttaatagtctttattgtgcttcttccaactgttttggaaagccctcttcgatactctcattagctctgggtctctcattggctcctactagaaaacagaggagtgataagaagatatgcttgctgatgagagtgagcagacactgccatcacaacctggagacgtacttctcatgaatctgtttagcttaaaaataagttccttaggtcttgacacattttgctgaaggtgattcaaaagttaatattggccaggaaactgataatcagcctgaatcacatttgttttgatggctgtctagatagacactcttgtgttacataattaatggaaaactaatgcagggttcattttgcccaaggactcctgtccaggcaatcaaattctctggttatttcatttcttaaacactaggtggtatcacatggcagtaacggggaaggttcttgggctctttaaataggaccaaggccaccatactcagctgacagtagctgtaagtgagacattcccaatgtggtactgcgttcttatccactgttgctctcttgggctttgcttagtcctgatctctggttcctgtttcctgactatgactttggatttcttttacccctagctctaacgcctcttctgatcactaggatctgaccttggctttatccagtgactctggcccatctcttgactttcagatttagatctatgacttgcttgctacttctttggaactcatacccatgatggagaacttggcttgctcacaacgcaccaagaatgacagaatgatctatgaaacagaaataaataagttaatgctgtgatttcatattgatggctctttatctcaattctactgaactttaattcattggtatataaatcagatgtatttgacagaaacacaattaagattaatataatcaagggaatccattggcctgtgcttcagggttgagccaactggcgcatgctgggctcaaagattcagcgtggctgtttgtttggtttttgtttgttttgctttgttctcactcatcctcctgattcttaggtgcaagcataagacatctttgctcacacctatagatgacttattctgtgaaacagaaaagactatttccccaggtttgcaattttttggctcaaaacaacacttccttctccttatattttgcatatcaatcacagagcacttggcactgcctacattcaagatctcccctagatcacatagtactccaaggaaattaggatgtagtgattggtcagatctcagtcatggtcccaccttcaggctgatggcttgtggtctatttgtgagaggaaagcggctggaggaaatgtctaacagactttccaaaactgtagcttccataatcaccatgacatggtgctttgaaatgacacagaaaggtccctgtgccactttaagcttgaagaaatgttgtatctcagaaagcaaacattattttctgcatgtgaggctgaactgcagaaaaataacttctgtatattacaaacaataaaaaaaatcacagcaagaatggaagaggctcactgtgtggggggcacaggccatnnnnnnnnnnnnnnnnnnnntcacatttgttttgatggctgtctagatagacactcttgtgttacataattaatggaaaactaatgcagggttcattttgcccaaggactcctgtccaggcaatcaaattctctggttatttcatttcttaaacactaggtggtatcacatggcagtaacggggaaggttcttgggctctttaattaggaccaaggctaccatactcagctgacagtagctgtaagtgagacattcccaatgtggtactgcattcttatccactgttgctctcttgggctttgcttagtcctgatctctggttcctgtttcctgactatgtctttggatttcttttacccctagctcttaatgcctcttcggatcactaggatctgaccttggctttatccagtgactctggcccatctcttgactttcagatttagatctatgacttgcttgctacttctttggaactcatacccatgatggagaacttggcttgctcacaatgcagcaagaatgacagaatgatctatgaaacaaaaataaataagttaatgctgtgatttcatattgatggctctttatctcaattctactgaactttaattcattggtatataaatcagatgtatttgacagaaacacaattaagattaatataatccccggctggcctcgaactcgtgatcctcctgcctctgcctccttcagcaaatcctaccggcgtgcgccaccacgggaaatgcaaatcaaaacaaccctgagattccacctcacaccagtcagaatggctaagatcaaaaattcaggtgacagcagatgctggcgtggatgtggagaaagaggaacactcctccattgttggtgggattgcaggcttgtacaaccactctggaaatcagtctggcggttcctcagaaaattggacatagtactaccggaggatccagcaatacctctcctgggcatatatccagaagatgtcccaaccaataagaaggacacatgctccactatcttcatagcagccttatttataatagccagaagctggaaagaactcagatgcccctcaacagaggaatggatacagaaaatgtggtacatctacacaatggagtactactcagctattaaaaagaatgaatttatgaaattcctagccaaatggatggacctggagggcatcatcctgagtgaggtaacacattcacaaaggnnnnnnnnnnnnnnnnnnnntgggggtgggtgggtatggggggtctttttggtatagcattggaaatgtaaatgagctaaatacctaataaaaaatttaaaaaaaagattaatataatcaagggaatccattggcctgtgcttcagggttgagccaactggggcatgctgggctcaaagattcagcgtggctgtttgtttgttttttgttttgttttgctttgttctcactcatcctcctgattcttaggtgcaagcataagacgtctttgctcacacctatagatgacttattctgtgaaacagaaaagactatttcctcaggtttgcaaatttttggctcaaaacaacacttccttctccttatattttgcatatcaatcacagagcacttggcactgcctacattcaagatctcccctagatcacatagtactccaaggaaattaggatgtagtgattggtcagatctcagtcatggtcccaccctcaggctgatggcttgtggtctatttgtgagaggaaagcggctggaggaaatgtctaacagactttccaaaactgtagcttccataatcaccatgacatggtgctttgaaatgacacagaaaggtccctgtgccactttaagcttgaagaaatgttgtatctcagaaagcaaacattattttctgcatgtgaggctgaactgcagaaaaataacttctgtatattacaaacaataaaaaaaatcacagcaagaatggaagaggctcactgtgtgggggcacaggccatcacagaggttcagaggctctgtagtgaagccttgatgggaaaaaatgaataaggtttggacttcctgatttatcattcagtcttatcagctcttccactgaccttgagaactagtgagaaatcttgctattgacctgcagttcaaaagatcaaaagccttggcccaggcactaaaatccaacatgcaactccatatgtcaacagaagaaggtgttgaagacaaaacaatgttcttacccacactcccctctcaccattaaaacaatccaattctactcccaagtgatactttcatagccagggctgtggaaatcccacaggaaaaatataacaattctttcttaaaatgagctaaacacacaaaaaggagcaagccaggggaagatatagcctcacctggggaaaaccaggaatcagggacagaagaggtactcaaggggcaagcacccagaaggcatggggtctgaggaaggttatcaaatgggctgatgacaactgaggagaccaaagaagagcgagaacagcaaggaaagaagcactcgatacaaaatatggagctgggccagtgcaaatgcaaatattgacgacattaaaaactcaatgcatggcataaatgtcatagcatcaacgaactggcaagtggaagatgaagttgtcaaatgatccagaatgaatgtagcacaggcttaaaacacatgacaggttagttaagaggtgtaaatgatggcataggaagaaatccagaagacatcagtaaagatttcaggagaaatgaaagcaaatgatgtgaggcagtgtttgaagagagagtgaataataatttcctagagttaaagaagaaaattgaaataccgcacagtatttatagcttcttgagtagaaactaatctatattcaatacattttaatttttagttgttttgacatcccctttccctgcctctcagtgtgcatttgacccgacagggattcattaattaggaatcataagaagaagacgtaagaggcctttaaggaagcacaaagagggatggggagaatcacgaatagattaaagtgtagtgagatgagagaccagcaaagacaaagtgcagatcggaagagcaaccagaaaggtaagatcggtttctctgtacgaaggtcaccgagagtcacaatttgcctgagaatagtgtcctcattagaagtaaaagcatcccaggaagagagaaaaatgtgtccaaggtcttctgggaaataagcaacagccaggacccacgctcaacaaaaatgtgatttaaaaataaaagtgaaatatactttcaaatatagcttactatctatatatcatcagctatagatattccaagggatataattaagtagaaataagcagctgaacacagtaaggagtgaagagcaaaggatattaaactaatatattggcagaaatatttatggattaaaatgaggaataactgtggcagatataatgtagatgaacagagaggggaaaattggatagacagtcactccagagtccactgcaatattcaaagacaataggcattaagtagccatagggagagggatcgtgtaggcacagtagagacatagcaaaggcctgtgtttggtagcacttcagatttcactcatcccagcacctctcaaaatggtgcaaaagagtctgctcagaggccatacttctttactttgtggacagttgctgaaaccaatggaagcctactaggaaattttagactgtgtaaatggtagctcatgctaggaagttgggtctgtcttctgcttacaccttgttacaaggtaatagtaggttcatattcattttagccctcagtttgaaaatttgtcctcttgcttagaggtcccatgccatgtcctagtcgaagcccagaaagatcagctattcagtaagagaatgagatacagtaagcaatctgtatatgaggcagaggtaggaccagagtggttataattaacaaaagaaattactgatccatggtgagagtacccatactggtgtggtaggttctttttcttcctggagtcaaactactcaggatacttagcatccactatattaattcagagcaaatttctgccattaggatttcaagagccccaaagagtatatggtacaagcagcctttgctgtacctggtcggcatccagcagcaaatactacccaacgctgtaggtggtatctatggggacaggtagagaccaactggtctgtaggttggttatttttatcgtcatcctcagacaagaaaagttattttccaatgagactggaaagtttgagttcttggcaaccaacacccgaatagacaataatatttgggataattcaaaacgactccgaagtttgacaagataaatcgaactgatctgatcctttctccactacacaaagctttgatggtgacctgcagtgttcagttctgcaattcttctccatccctccatgcccagacaactgacgcaatgtccctttgtcattatgcataaccattgtttctctctctctctggtgtccttcagtgtctgattgggagagttgatagtacttcctggtctctgactctgctgtgacaaatgagtgacatacattgataggactgtgcctagtagttgatggcagtccgtacaaggtagcaggctgtagaagacagtaacataccatgactttgagcttataggatgtaaggttctcaaagatttaagcgcttctagtcacattgggattcagaacatggaatgctgaatttttagtggactatcatagacgtagagactgaaggaagtcaaggctctcataccagggggtaaaaaagacaacctaataaaacggcagaactctatagttttaggagccctacactgagactttttcatcaagaggcatgctttatttgtaacaaactcaagtttgacttttcaacctgcatatcaggatatcttttatttaaagcactcagttctgatttcttttctataattttttttcaaggaacaagaattcaagtcaatattcagtcataattttggaccaaattaaaatccctcttggcctgaagaatataatctgttcatattacttgggttttgtaatgcatttacatggcaggcttattacaggtctgatgtgagttctgccttcctggggcatgtgatgctgagaaaatctgattaaactttgggaaggagcagctgttctgcaatagtggatgagcacgggacccatttttcagaacctgactgcaaggcctggcaccctcaccagccaatggatgataaatgaactgtccctgaatgccaactcctgcgctaatagctttaaaatatcagttgtttatgagaaagaagttgggagctcttatcaatttttctgtcccaggggtccacatatacatcattttttttccattgctgtaatggcaggcagtgttttaaggcaagggaagaaatccattcaccatttagatgttctccatgggttagtaaaatcatgcttctcacttcaaaacatagtagagtgggttaactagtaaatccttatgtgaaatgagacatgaaatccagaccattctttgctgaatttccctgtaatattggaattacaatgcagtttcatctggtatttgtagaggcatggaattcaaaacaaatacatgaacttcatatcccaggccaacggcttatttttcaaataacagttaaacagtcaaatgtgaccaaaggctgtagtgggaattttggcttctctgaaaaacacagaaatataagagtaggttttcattttaatcccaggtgtgggatttgaggctctttcagcctgtccccagcagctgactatgatttgccttgtgctctggcagaggcgtggttttgccagctgtagatagtttctgtgattatgtgatgtttggaattctgggaacttttcagagggcgtataaatgctagggctccaagagtcacagttgatggttggttgatgttgattgctgttggtcacactttgttaagtagctatgtgaaaagaagaaacaagaagaagaaattagatatcctgacagagatcaactttccccatggaactcattccccgtaaccagcagaaagtatctaatgatagcgctgccctctttcccctctatcatttttttctctcctacctggtattagggggttgaaagtgtagaagacatgggtggaaaagagtagaataaagaacccacaaagtaggcaaaagtctggttacaaatgcgttggatgtgtcatatttgagggtgttaatttaaaggtgccagcatgggcagctttattgttttcatcctttctgatttctatccttatctgtttgttttgggggcatttgaatactaattctgatgtgaaaggcaaatattgagatagtcacacatggcctgttcttgtagctgctcatcttcagtctttccttgttgggttcataagaaaaaaaattaccagagaaactgtctgctattctattaacaattccaataaaattcttgatgggaaaatttgatcttggaacgtccctcagctgtagattggggggatatttgacttccccatagactccgtgcactttttcaagtcagttttctcttttcatcaaactgtgagtttaatccatccagagaaagaagaatctatttagaagcaagactgaactgaagctgtggattatatcgcagatcagataaactttatagggaacacaactagaaaatcagattctaagcacatagacctgctcgctaggatggagggccagaataattattatatgggaaagagttgaaatgataaaaaggaacattatagtaattttaaatttaaaaattaaaataaacaacttaatagatgttattcaaattagaaaatacaaaacactcaaaaaagcaaatattagttaactcagaaatgactcggcaggagggcagggcacagaaatcaaccacagccattaacaataataattatcttgctcaaagtagtcttcacataaagtaatctctaaataagaaatgtaaaaatatttttaaataggaggaaaaagagaaaaaagaaggtagaatggaatgaagaattaggagggagaaatattccaaaatatatacattctagaaatgcatgtacacacttcaataaaaactaccctatgtctctcttctgatttctttttccattttgtatctcagtatgaaaaatacctgcaagtcaagactccgtttcccagctcctatgttactaattatgccaatagctaggctctgaccaaaggaataaagtaaaggtagctagccactttaaggaatccacatattctacttaagtaatagatgtataaacaatctaaaagaaaaacatctatttttggtaagagacaaaactgtctcataaaagtcagggttatactttgaatatggctcctaaattgcatgtattggaaacttaactctcgatacaacaacacagagaaatgggacctttaaggagtaatgaggtcatgaatctctgctctcgtgactgcattaatgccattgacacagaagtaggttacttataccaagtgagctcatgaggaaggttgtttctctcattcacacactcaccctcctttgccctcggcaatggttgatacagaaaaagaccctaaccaggaatgaggcccttgatcctggactctccagcctttagaattctaataagtatacatattctgccctcgtgccttactcatcctctcctattttgttacagcagcacaaaatgaacaaagatggtcaataatataacagatggtcccgggagataactcagaagctaagggggttcactgctctctctgaggtgtagagttgagtttttagcaaccaagtcaggccactcaggaccacctataactccaactctagggcattcaaatacctctctggcctcctgggaaacctatacacactatcagaaacatctagacattcatgcatacaaatattattcctgaaataaatcattcaaagggttaaaagaccattgggtcctagatcagtttcatttggaattacaaacaccacaagcgacacagatgttttcatcttttgagttgcaggaaagacatgtgggacacctgggaaaaaaatgagtcatgtgcaccatcataatcaagttgacctttgacttaaccagtgatatccagtttcaaaaaatggaaacagcatgtttctccttctaaggaaagagtgtgaaaccaaggcaatttgacctattagccaaaaagctatcatgttaggaattttaataaacatgatggggcagtgagctgtactattatgagaacaagttaaagaactaactcataccattcctaacataaactgcaagaattacaaaactaaatgcttggaaaattcacaaacaaatttgaagtgttttaagtgatttttttttataatgttattgttttcttgaataagattcaaagcctagaaacagaccaggggagatggctctattggagaagtatctatagtacaagcttgagaacctgaagtcagattcctagacgccaaacaaaaagccaagcacacaggcacaggtctataatctcagtgtttggagttgggcaagggtagagacaagaggatcagggtggctcactgagcctcttgtctacttgctaagctctgtgttacagtaacaagatcctgtctcaaagcacataaggtggagagtgataaagaaatactctgatgctgtcctctggtttccacatggatatgaacatgtatgaatgtctacacacacatatatacaacacatatgcacacaataattttgaaaatctgtgaaaaattaggcactctacctgcatgtgaattttaaaacataagtactagctttggtggaaaacaaaggatggactacaagaagtatctgtaatatttttggtactcttaatatcttaagcacacaatggatgcataataatgtggaaaagataatatgatacaatttcaatataaatatgaacaatgaatttatgggtctctatgtgtagggttatgtacagatatcttcctctgcatgcatgtggtcgtgttgcaaatcttgaggacagtttgattcatatgcttttgtcagcactgacataagttttaaatatgcccaacaaagtaagttctagaaatctacctcaagaagtatttgcttatatcaacaaggatctgtatatactgtagcagttgctaacaaaaagaatgtaatgagccaaaatgtctataaataaagaagatattgaatatatcatgctacatacaagctattaaaagtttcatggtcattaaagagtgtgtgatacagaaaaaaatctctaagacatttcaagttataaagtttctggaaaatgcacactgcatagtaaggcttatacaaaagactggctaggctcatgaatacagataagtgcaatagaatgtctttaagcacttacacatctacattaccttggtctttaatgtagatagtatattactgttatactttgataataaatgatgtaagtaataaatccattttaatgtgaataaaagcatctcctatacttgcctaataaaatttaaaaaattgaaattagaaaaatggctgaatcccttttacctatttctggaatgctagttgcctcatttttgttggcaggtttttgtctactattgaatcaatgataaatagatgatagatagatagatagatagatagatagatagatagataattgatagatgatatatagagagacatgatagatagatagatagatagatgatagatagatagatagatagatagatagatagatagatagatagatagatagatacttaatgagtatttcattatagatgctggtaataggtgtatagaagtatacatggcttttttttttaaataaatgatgagaataaaaccctggaactgatacacacatctctgttgcccgaatcatcgattaaaagttttaatctttggccagccaactagtcctctgaatgattagcttgggagtttaatcagtggctctgagtgagaagagccctaaccaattctgccacagctttcactacatcagagctgtatccaggccggcagaacatttcacatcagtatcccagaacaccagaacacctgatcaaggcagctcactttaagatgcattacccaatttcctgggcacataaaaatgtttatgaggcattagatgtatgtaccatgaacttgtcttagaaaaatatgtttatatcaactcagaatttattgctggcaatggaagacctaagtgctttgcaggccagtcagctaatgtagatgtgtgatggttcaggacactgagcagtaagatgatataggacttactgcctaaagaagggcttaacgaagattgatggcatccaaaaaatgttttagcttccatttgcattttaaactgagtgataaccaaacatacctgcatgtggccaatgtattaatccccagaagtaactgccatggacctctgctttcagtagtatcttgtcatcaccacctctatcttgggccactctctcatttggcctctgctctcctataccttgtgccatcttctatcagcaaagaatcccttctaggcacataaatacacagagtgtgtgtgtgtgtgtatgtgtatgtgtgtgtgtgtgtgtgtgtgtgtgtgtgtgtgtgtgtgtgtgtgtgtgtgtgtgacagacagagacagacaaaagtatgtcttgtgtggtccaggttggctttatctcactagttatttttgaactcttgtttctccagcctctacttcccaaacactaggactacatacacattctaccatggctccctagagatctggctccctgatttacaaatagcagtcattctataaagccaaattcacatcccacctgactggcaagcattcgcaagaactttccagacatggatccattcccatctctgagcctccagagaaagctctttggaatcccaggttcataatgagtttaaggtcatttggtcaagttgtaagaggactaaattctacttacattagacaaggccactcacccagatctgatgatctcagcagacagcaggacagctctgaggaatttcaagttctctttgcacacaaagttttcttgatccctagtctcttcaagtcattgagctggtattttctggaggcttcctgtattgagtgatggggtatttaagaaaaatttaaatttgttgttcaaattttaaattaagacaatgtaaaaatcgcgatccatggcttctatgaaaaatgctaggaaatgcagaaagattgaactctgtgcatcatatgtaaattttaccaaacaatagagatctgctgttaaaaagctactatctctcccctttaacccaagcactgggcctgatattgagcccagaatttcatctgcctaggacatttgggtttgtgcaatgaaagacttaagataatgtttcttgtacttacaccggtcatgatagaagtacaagactgagataacctaacatggcctgtccacgcctggagaaaaccaagctgccatctttaatggcatgcaagaatgtcctctctgataggagaaccctttagctattttaaaacaagagtaaagccatggagaagcccatgtttgctcttctgcaaatccctactcagaccctgcaatctctggtcctgcccactgtgctgctgctctccactggacaagtttgtttcttttctcaaaagtgtattaaagtttttgagccaaatgcagggattattcttaatccctatgaaattgtgtgtggatttacgcaagatgcttggcctctcgtcagaaacttgtggattaataaagagaatttagagctagatgcaggcaaaattaagtaattgtatattgattttgtgtagcaagaagttccaatatttctggtggcttaacagtgaattctgttcagaaacttattctgtttaatattttcattaatggctgaatttatgggaaacatggcaagtttgtttagtcagcaaccgatagggacctgggaagttagtaaaatgttgaattaaataccaagattcataaaaaagagcagcaggctatagaaatagagtatacgtatattagaaaatcctttgacacagcaagtccccaaattattaattatggaattataatcaaattttatatatttcatcataacagcaagattctttaaacacactttatatagtttagacaacctacaagaatattaaatttcttaatgtttaaagagggagtttttaaaacaagtatatatcataattatatttctgccccttaatttttttttcatgaataaaaggccccaacctggggccttatcaatcttctccgtaaattgtattattaataaatgtgtgttaactaccttagcttctataacaaaaagcatcatggggctggtgagtggctcagtgattgaagaatggcatgtgccaccaagccactgaccacagtctgagttccacccctggagtccacacggtagaaggagagagccagttcctgcaagttgtcctgtgactaccacatacactgtgtggcatgttcacacacaagtccacccacataatgcaaaagaactgtataaatatagtacaggagaactctttggcagttttctctacaagagtctcttctcgggtctagagagatggctcggtggtgacaatcacagagtgctcttgcagaagcatttgagtttgggtcccagcaccaatagccagggcatctgatgcctcctgagctctaaggctacccgaagtcacatccacatacaccccctgcctccaacacatttgttcactcagggcaaactggcatattcagagaaaaaggcaatcattggtatgtgatgtttgtggatttcctgaaattcccaggcaaggccacattactagatggaagagtgagtgaatccatgtcatctgcagtcacacccagagcatccttgctgcttgtcatctgcagtcacacccagagcatccttgctgctgttcttggtgactgtgttgtgttgtttgtttctctaagttctgtctttccttcacctaagctgattgatacgagggtgaatatcggtgtgtctaaaatcccatgaaagttcatttactgataagtgacccaaagatcagcattggaaagaataacaaaaggttatctatatatttcttcttttgtctccccctgactaacttgagaagaatggttgaattcaacaacaacaacaacaacaacaaaaatagccacacatttttgtttcatagttgagccatatatcaacaattaaggatataaagtggggtgtttggatggtcttctatcaccctcctaacaacgacttcacggcttctttatctcaacatcctccttggtccttcagctctgtgcagaaagagacacttctcctttgctccgtcacggctcaccgcccaacacagcagagccccttaacctgtcagcctgtccacctcttcaagagttccccatccctggagcacttgcttcttctagctggtacttacttaggtgatgtttgatgagtgagaggtttgggaagcagatgcactgtcacatctgattaattattgcccactaattaatcaatgactggagtggaaagaccagttgtttctcctgtgttttcctcttgtatggtgatttggtgaagccagttacatttaaagaagatccccttttcttttgatgccatcaccagagataaagcctctatacatgcagagaaaagcaagaagcaggctccaagttcacccagagacttaaaggaattaaacaaggagagtatagcatttctgttgatgatttttgtgtctggtttgtttgtttgtttgtttgtgtatatatttccttatttattttggcaaaaagaacataactgagttacattttaaaaagttattttatgagatgaaaatttttgcacatacacaggcatgggcatatacacaaacacacacatacacaactagctctttgtatttttatctattatttttgttggttttcactgaatatagatttttttcaacaagtaattcctccaaattaaatgttttcataggggacttagacaagtaagaatgaatctcatactatgcagttaaaaaataacaataaaaagaggtggcgagatccaggggctagcttgggtaccaggtgctactgagctctgcaaagtctgactcattcacatcacagagcatcctatggaatcacctgctctgacgtcaccacgacaagtccatcactgcttgtaaccaccactgaatggaaggcagtgtgcctgtgctactcaatgatggctttacccatgggaaaatgcaaatattgttgattctcaggctcagaattgcatagtggctctggcatgtccagagtgtctgtgttgctgtttcttctctcatattgattagtgacatcaaacaggaagctgtccctcaggtcattatagcatgaggtagtgagtgtaccaagagtgagtgtgctaacattatggctaatgttctctaaagcaagtgtggcaagcttcaaggcttaaccacacccctcatagccttccaaagatggccatgactcccaaaactcattcctcttgatgtagggtaattattctcccatttttatatattcatattcaaaatgtcgatacaaattcaaaatgttgaatatattcatatttaaaatgtctctggactgtctctgacactccttggcattgtgctaggcagccccacctcttcctgtggctcatagtcccacccctggctgctgggttctaattagccatgttacttcactagcctacgagagcatatgccactgctgatactttattaatgcccgtttcctgtatgttatatactggcaagtgattgatgtatatcatctcaatctccctaagttattatgctgtatatactctttagtcctacttagcagatgagaaagcttgagccaaggaaagctaagctgcttgtccaagtctccatctagaaactgggagagctttgctataattaagtgagataaatggaataaatgttaaaagtaatcaaagcattcccacaagaggaaactgcctggagacaaacccaagaaccacagcatgactcagggataggagccatcaagagacaggaattccctcagtcaaggctaatatgaagcaggcatcagggtcagtaagaagataacggggccaagacttggatgaaggtctaggccacttcctgcaagtcctgggcaactaactttgcctatctaagatccaacaaaacacacatgaaattgtcaagaaaggttagtgagaatagctttttaactataagatatcagagattgatttacttatgttgggaatatcagagccagctgagataccgggaaagacaaagcaacatttagaagtgcttttaactccttttattcccaaactgccaaccatgtgtgtagctctctgtactgagctagaaggtagtggagattaaagcacactagtttatcctcttacacaaagctattgtcctggtaaaatgaagatttatgtgccttcccttgggagtgacatagccggacaccgtgagatgaatttctatctagggcatggcgagacttttcacatgcacattaaaccaaggcaaagcttctttaaagctggggtgcttggctcctatgcatgggaaatgtgtgagcattatgcataaaatgtaaatttctgcaaattttgaaaaccttgttttcatcagagaagtctaagggttgtagtttgtgttgagtaagcaccctttctaaatattaatcattctttgtaaatgcatttccttttctttctataatatacaaaattatacgatttgttacaagttttctctaaaattgagctcctttgttacttttctccagaaattgtgtgatctttatggagacagtatgtcctttcaacttctttgtctttcctcttgtctccttgcaggcgtcccccaccttgtctctccaatgttcatggaatccagggcttagaaaattgcctctgccatacccatggatgagttagatgagtgtttgtgagttgttgagggaaatttttgtgctctgggagattcttttcaccgtggcaatgaagttgattgagaagccaccccactcctcagaatgccaccagcagcgtggcttcagtcctttgatgtgatactctgtggacaccaccatttctcctctcctcacagaaattacctaaaccttctgtgactttcattctctatttgaaaaccgctgggctgaaacctacaggaaattctatctacttgctttttccacttttcaaataaataactgttttcagattatctccacattcacaagtgaacatgggatttcaatttcgagaggcagctgagccttcctgttagatgggaatgtactagaagactcaggaggtctttctagcaggtaagaaatgacttggctatagtgcacacaggaagtctaggaaggatttgaggtatcctgtctcagtgcctgtttggccccatggtggcttctattgcaccatcaggacctggtatggtttgggggacctggtatttttgaaagatcagtacaatttttgatccttgtaaagtgtggtgattttctgtatctaccagaattttaaaatataggatgtccattggacccccaaggctcctgatgagttctttctcccttcagaaattaagatagtccacttctgttattaaaggccataaccactagaccaaggtactttgctacagtctcttccaaagagcttctattctctgcctctcctttcgtcactaaatgtccggatgtgtaaatcaattaggtagatatgttaagcataatcacactgacttcaggcctccattgagagtgtcctcctgagggtaagaaaatgctaggtgttaatgcccttcccccctcctttccgttattccaagatctacttgaatctcagtccccactctgctcagctgtctgcaaatggtccaggattcatcccttccccatctctctgacatcttccccatctctgacatcttccccatctctctgacaccttccccatcgctgacatcttccccatctctctgacatcttccccatctctgacaccttccccatctccgacatcttccccatctctctgacaccgcttaaagggctttcctgttcctttcttatatttcttcaaaagcgatctcactggcctcaaagcctctggtcttggttcccttctctgtgttctttttgttgctctcagagtcctgttaaacaaaatgcacttcttgttgatcagtgcactgcttcaatccctgtcgtgtctcctgataccataggactgagccccagctcctcagcaaggcacctttagctcttagtggttgtcctctaccctgaaccctagccctttgaggattcatagacagacaaatgaggcaggccaggcgatgagaggaggactcgggggatcctcagatggcctgtatttaataatatatttgaaggtggcagatttgctgatttctgtctaattactttcatgcggaaaatagggcccaaactgatggatccaatttttcaagagaaatggggatcatgatgttttctttttcttttttaattcttcttctttaatcttttcttacagtcagtcattatccccttcccagttagccctccaacagttcctcaccccattctccctccccctgtctccaagaggatgttcgcaccttaccagacctcccaactccctggatcttcaagtctactgaggcttaggtgcatcttctttcactgagtccagactaggcagtcctctgctgcatatgtgttgggggcctcacatcagcctgtgtatgctgcctggctggtggctcagtgtccgagagatgtgatgttaaactccaatgtttaaatgttcaaaatactttgttttcttttacaaacacaggaaaggataatgagcagacctaatggaggcaggcaggcagagatgccctggaacttctgaacagcctgagttctgtctcttcacattctaatcgggcaagtgttttgtcaaaactggctctgcaagggggatgaagaggtggttcagtggttagaagcactggctgttctaccagaggacccaagttcattcccagcacctacatggcagcttacaatagaggatccaatgccctctcacagacatacatgctggcaaaacaccaatgcacataaagtaaataagtcctttaacaaacccgagtacatgggctatgctaccactgtgagtcagttctgttgttgtattggtgcaaaattagccactgccacccctgggtggatgattgagcaaaggtatgctttagtaatagggtttgtatgagagagaaagcagccggcctaatcctgtaggatggagtcgttttctgatttctttctgatcacactgagggatttgaggtttatctagagactattaatggcggcagaaatgctttcttacataaaatatctctgagctgctcacctgactcttttctgggatagaacctagaaatacccatattagaaaccattctggacattttctgaagtccagctgttagggggcttctggacttctgcattaccccaagagttccttccccaccatactctctgatgttcacttctctgcctctcatcatctctttggcaggcatttgactaatatctactaagctaagtaataataataataataataataataataataaacattatctaacttaacatcaaaatgaagactttttttccattatgtgttggaagatgagggtgagagagttttatgtatcccaggctagtcttgaactcactatgtgtgtagctcaggctggcctcaactcacagcaatcctccctgcctaagccttccacaatgctaggattagaggtgtgacccactatgcccagatatttttatttttaaatgggtacatttatatcattataactgttaataattatacttgctaatgtgtaatacacatgatgttctgatgatgtatatattgtatgcagatcaaatcagggtaattagcatatctgtcacatcaaacaattatcttttttttttcctggtgaaatgttcaggatctactttttatacacaatgtactgtaactgtcatcattaccaaactgtacaacagaacatcagaacttactccttggatccactgtaacattaacaaacccctcctcctcctcttcctcctcttcctcctcctcctcctccttcttcttnnnnnnnnnnnnnnnnnnnnctcctccctttcctcatccttctcttccttgcccccatctggttagccactattcaactttccatttcttctagatgactcctacagattctacagaggaataaaatcacatactatttggctttctatataggaaaaggttccactgagtctagctacattgtcataaaacacaagattttatctatttttataaggaaatgatactccagtccatatacatgcatctttcctttctctttttgcctactgatgattcattgaatcctcatcctggctattgtgagggaatttggatacctctgcacatatgccactgtgggactactgggtcatgtgactgtcccagttttaagttttagaacatctttcacactgcctcccattaggccttcctaacagggctttgctttgctttctgctttcacccacacttatcatcttttgttatcaactgacctagtgccaagatgatagctctcagtcattatacttgcatctctctcatgactagtagtgctgagcagtttttcatagtcttggtggccatttgtgtaacttgttttaaaaagaaatatcctctttaggtcttttgtctactgtcaaactgtgttaattgaggttttgttattgagtgttggagttcctgacaaatcctggatgccaactgctcaggggatgagtagtttgcatatctcctctcttgttttcaggttatcttcttcactatgctgattgttctcaatgttgctaagctttctgtcacagttcaacataaccccatgttcagcttttatccactgtgctttgagagtcttcaccaaaaagaactttatccactccctatgtcatattgtcttccctgtgttttcattgttagtctataggagtctgtatctctttttgctgtccacagtcatagggtcttctagaggttgtcactgagaagcctaggaatatgctagggcattttcaacttatccagagtcaagagtttggaagagtgaagtttgtggtcagctttgccagtggctaacactaggctgggccaatgctggtagcttctggattagaatcattgcagttctgggaaccaaacctgtatccctcccagcgggaggcaagtatttgactgttcagctatggggtcctatatatgttagctcatctggtaatgatggtctatctatgtctcttccatccccagaattctctgggaaagggcattttacatcagtcacagaaagaatttttctaataccaacacccagtgccaacctaaaagattgctaatatgtggagagaattttaacgtcatcactcatcatctgcagagcatttgtttggggtacttgtgtagaattgttttggtatttggtaatattttaagaaatatgtttcttcactatgagtgtagctctaaggcctagcatgtgcctagctgtacaaagccttacattcaatctgccttcttagaatttgtagatgatagaagtgagtggatgtacagtggtgtattgaaaagatcatagattcccaaactggttggatgaagatgaactccttctctgcatctgtcactgtgcagcctgagaagtactaaatctttcagatacctgctttcatcttagatgaaatgaataccacataactgctgtgaactgatatagtaaattatgtacagcatctaacactgacatgataaaaactcaacaaatggccccactacatttagtgttgctgctgctgctgctgctgctactactactactactactactactactactactactatgattgtcgtcattgtcatcttagtcatctctgaattattgttataggatgctcctagataatcagcttggaatggatgcttttccacgttctgaccagtatcaaacatgagtcttgaattagagacattgcagcaggttgctctgcagtgttttcatagaatagatagataaagcatgccaatggcctataccagatccagcctcagacagaagctagatcaggaaggctccatctgagaaccattctcagagtttggggatgctctaacttcctttcttatgcctgtatgcagtcttggtaagttatcaagggtttcactcgaaagcatatttaactcagttttgaagggtaattttgtaagcctaattttaagattcaaaagagctgtatctgagctcattatagtgtggtagccattagaattttacactcagtggtgaagactatcataccttgcaatgcacagtcattcgataactagtgtataagacatctttgttctacagctaacaggcttctagctctgccagccatgtaaggtaggcccaggtgacttggttttctactaacagcagcatccagttgacaccaaagggtgctaagctttctgtgtgcacagaaggacaggagggcaacagcgtccctgtcaccactgtgactttgctagaagcattaatataatattcgatcaggggaatttcttgcttttctgtttggatgacactagcagctcagcattctgcaaacaactttaccttggccttctgtctttgcagtactttgatgttggagtctccctgacatggagctcctgtgtcacagcaagagtggggatacaccaacaaaactgattttcaagccagagaggcacatttgaatcaacctctgcctggagcctagcccctcttattgctgagctggggctgtctgaaggaccactcaggtgtcctgaatgtgagaattatctcccacaaacatttcagtacatggacataagcttctataaccctttttttaacttcaattttctaagctcatggttttcttttgtaaatcaaagcaagatagtatctgtgagaatgccaagagtccctcctaacacacaaaagagttgcctaattgtggaatctgaattgatagttctgccattcttcttggcagtggaaaatttctaatgttctaaatgtggattatagctttcttacactaataataagaaaaaaggaagaagaaaaaaaaaacaaacaaactcaactgctcctagatgcttattgaatagtctgtttgcaaagacatgatccaattacagcacattcagagagcaatttcccctcttattaggtaatcactaatatgtactctattgtccattggtggactatgaactcaagtgcttggaatcggaaggaactttttgcagtctggttcctcctgagctggagcaatctcttaatcttgggttttgggtcataagaagaaagacacaggatcgacttagaatcagaagacaacacaggatcatatacacagcttgccgaatgatgcatagtgaggatggaaggggaaagatactattgataaatccagctttcaaatgaagaagcagaagcgtagcactggacctaggaaccactagccttaactctcatcaatgatctcttcatcatttgcccttggtcaggactcccaaagggataaagaaaaggaccaagactcattatagtggagcaagtgctcctagcaggcagaaagctaactaaaagtcacagaaaaagagtgcatagcctagagaagacactagaaaacttgaaaagagaagaaatatgccatgttctaggatattggaaggctcaatattaaaaatgcaaattctcctgccttgtcttcatgtggcttctgttactataatagaatacttgtgctgcttacccttagttttcaacttgatgcatcttagagtcatctgaaaggagaaacccaattgagaaactgcctagattagactgtgggatgtctgtgggggattatcttggagttgatataagagagtctagaccattggagatagcacagtctctaggaaggttgtcctagactttattaaaaataagaaaagaaaaggaaaaaatgagaagaaagggaaaagataaagggaaaggggaggaaagaacgaagcccaaattagttaagtttaagcctatgtgagtgagcccaccaacaacgattctccatagtttcaagcttcagggtcctgcttggatccttgccttgaatctctcaatggtatactgtgatctggaagaataaaaccaataaatgcctcatcctctttattgcttatagtcagagtatgttggtcacagcaacagaaatcaaactagaacacaaagatcagaagatttacaaagaactgggttctagaggcagaaaaatcaaaacctatgtagttgtcatccatgatggtcatcatactgcaccatcccagggccaaatatggaggggcaagagagggccaagttcacttctatagcaagcatgctcatgacaagggtcccactctttggataataccattaatccattcatgaaggtggatacttcatgtcctaaccctgtattaggatccacctcttgcactggggatcgggtttccaatttgtgaacttttggggcatattcaaatcacagcacccctaagttaattttaaaatgtaatatagtattcatcaaaataatataaccagagtttctggaactatattacattatttaaatttcatatggaagaatgaatgagttacattgatgtctagaaatactaaaactgaagaataatggaataatacaattcttctaattattgtaacgtgattccagtgtggtcaaatgaacagcatggaacatgcagaaacaagaggtgtatgtcactggacatgtgtgtacatgtgttaagtatatataaaccatctaccaatttggccatgaaagagaaaagatggaaatgtggagatttaggcagccaactattcaaatgaacaaaagaaagagaaaggattaacttgcccatcaagcctcagatgtaaattggtcccagataatgtctgtttattttgactatttttatattttgaccatattcaccccacttgcttgcccacctaattttgtttcctctacctttctttctcctcctctctctccatagcctcaaatattcataccataaaagaaaactaactctgcctttccaagaagctctcaaatgccaatatcttctcagttagggatggattacatacccacctccccaagttacagtgagattttgtctggctgagcttgccacggggttttacttgctgtcataattgctctaagttcatatgtgcacctggcctgttgtgtcctgaaaacattgtttcttgagtttaccaaccaactttggctctctccaggctttctgccctctctctcatgattttctctgagccttgaagggtagcatgtgatatagacatcccatttagagtcgaggatcctgaagcctcatattcccactatattgaactgtgaaactctgtattaattgtcatctagtgtaagaagactttttttatgcaggttgagtgatagcaataagtgattaggagtcattttaatgctatgtccatttagtagaatgatattggtaagttttcctagggcctctaatgtgtctagccacaggttcttggcttcattaacagtgccagttatagggttcatcctgtgtagggaaccttcatttcagtcagacagaggttggttacccctgtaacattcatgccactattacagccagctggatgtatcatgccagacaggtcattctcctagcatgcagagctcacagctgggtgagactgaccatcaatttctcctcggtagcatacacagtaccttctggcactgtgaaagccagactctggaaaggaagcttccaggtcagtacccatttgatttattcgtggttgtcactcaaccacgtggtaacttcaagaatagggtcctctatgaagccctggaggttaaccaagagcaacaacagtctataatgtttagggcaagcaattcaaaatgaggtaacctattcctggtcctcttatttggtaatgtgtgttacctagcaggggaaatgttatttcataatgagtgatgtctagttggggtgttactccccctttataggtttacgccacttaaactcattttaaatttgtgtatattttagaaagtgcctacatagaaagtatgtttctatgtaattttctcaaaaggttagtcttgcctctccatatagttatctgatcattttaatgttaaaaatgttaaaaataaaacatacctgaaacactgcagtagtttctacttagcaaacactaacacacacacacacacacacacacacacacacacacacacacacacatacacatacacatacacacacacacacacacacacacacatacacatacatatatgaaaagacaatactttgaagagtctgattgctatattaatactaaactatttttttacagaatgcttaatgattttgtacttaattttcttttcagtaggttaataatcatcactttcaaaaaattagccacttggtattgatgtttgagataccattttccacacttttcaacttcagtacatttttaaaataaagggaagtgggtagcatatcttttggaccgttttgggctagatattaatcacaagatcctaaccacaacccagcaaccacacggagaggtgattgatcatgttagacgtagcttgcatgaaagcgtgttttgtaccttttcaatgtttcctggagtttcctgaaggagtccaactgagacaagaatacaggcagcgtgctattgggatgctcttgcaatcatcacagctgtttccaagttgtttgtcacctatttcaggccctgccatggtatttgtccctatttttttctacattagaaaaaaatccatattggtccaatttagctctcttcatgtgctttaaagtttctaaaggaactcttcaaatgtgttctgtttaaagtaattctttttgtttattcaaatcaaaatcacgggaatctcttctttaagcaagctcaaacatttctgtgagaggagtctaagaatttgccctgaggggtgtataaatatgcatcttggtgcaagtcaccaggagatcccatacctgtcatctcacactgacagactatttgcaggtatttgagtctgatttgccataaagaaggggatgctatgagggggtgggggttgctaagtacacgcagttctgttgaagagccttacatagcttcaggagcagttactacctgtgccaccagctagacattcacaccacaataacccccaggtacctcttgcaaacataggacatgaaggatccctgaggcgcaatcagccttcatatgtgccaactcttgcttactcttgcttattcacctaaaatactccagtgaaggaaagatggtctggggacaaaggactttaagggtctgtgtctactgtacagtggtctattgaagtagctgcattcatacatatcaggtggattcatggttggagactttgaaacaagcagaaaattccaagttgttgcttcattgctctctttcccctctacctctcccttccccctacctctctctcctccgtctcccactttccctccttcccgtctcttctcaccccctttccttccctttcctctccacctctgtgcacaggactagaacttctataaaagtacttttcataccctctatcagtattttacacgtaaacattggccattgaggactgtcccaactatcccttaaaggcatcacacagtccagttgctttgtcctaacttgcagctcatttcccgtgaagatccactccacatccaccatgccgaacgttctcacttgccttccaggttacccagcacttctagtcatcccacagaacagagtctgacttatgtctttggagcccatctggatgctcatggtttagccccataaacaagtgtttccgagtgaagttttgtttttcccctctgctttgttattgatttctgaagtgccccagacggctatataatgtcaatgctgtgtttccttccatggacatctaccacgatgcatataagggaaactaaatgactaaatgttcaaaacctacatttatttgaaacaataaaacacaacatttattggttgaggattctgattgtgtaattattgagacagcttaaaattaaaaaaaataaataactgagggcagtgcctaacttgtaaagactgctcctggatgtgctgtgacttcatcacttgtactaaggacatattcgtaatgcttcaggaaagcagagagcaagccaaacaaccgagaggatgtatttgaccaagaatcaactcaagctttgtgaattaagggggaaaatgccaaataattcacaagtctgaacaatcttagtggttttctttttctgtgttttctacctctaagcaaaaacaatgtatgtgctatagaagaaaacgcccatttatgacaagcaaaaagaactacattagaccccattatgatcccacatgctcaaagacatacacatcactctcatgtggattcgcttcagccattcccttgaactatgtgtatgcatgatgtgtagacctgacccggataccctgtcttaccacagtgttaaaccacatgaatcccattgtctgttgtttgattttattgtgaggactcattgttgttgttatcattttactttgacaagcaggaatagcaatagcagaaataaaagcataaggggagaggagtcttaaaagaagaaatattctggaaattgataaaaatatccttaaaaggacactgactaaaagaggacacaaattgcctataggtgaaaatggctaattgttttgcaatccatcctgaaccgtttcatttattatatttcctagaagctggttgttctctatggctgagtcattttattgtgttctattacaactttagtgggattaaacatctggctagggcttgaagagaggctctctgatgtgaggtggtctggtctgtaacatggtttacacctgtctgtgtaccttaagtttcctagactcaaccagaagtcagatgtggacatgaactcactcctctagacatgtctatcaactaataatcacagacatagaaacagcccatgcctgaactcctttgtcttccactcttttctccagcttcactgaaattgtcccatctgtggtggcagtcagtgtcctcacttggatgcctactccttcatacacacacagctcacggttatttctcaaactcttctcttcccctgtcatacgaatctcttctgtatccctattttcatttctcctatcagacatgcctcgctttcccttcttaaatggtctgctgcctcgtccctactatctgcttggcaaccggtgtattttcacagccagtgctaacatctgggctctgactcttgacttgacatctcttctagggcctgctactaacttccatcccactgtctcagccgaacctgcttcttcatgcattttatcctattgaaactgtcccttgtataatcgtggccttctctaagttttcaaatcctgtttgacccttgccctttgagggctgttggcacttaattcacttgaattctttcctgatctccatctctacctggctttccatagactctcgtgtattttgtctaccaaatgtttctcctgatagaaagcaactttaagtctttgttctgagccctgtttctctcttattgtttctgtttttcacctcccctcttcgttcgatctattttattacttacttgtatgtgtacgcacactttgtctgtgtggtggatttgggggccagaagacttgtggaaactggttctctctttcaaccatatgagttccagatatcaaactcaggtcattagggtgaaacatctcacccagatcatttgaaaaaatcattttattatttaatacatataggtattttggattccctggaactggagttacagatggttgtataccatcatatgggtgtaggtcctatggaagagcagccactcttcttaaccactgagcccttcccacattattacttgtttttaatgtagtatggggatttgaaagcaggcttcttacataggccaggcaagtgctctaccactgaactgtgttccctgtctccattactttttaaaaatattgtatggtgaagagagccagggctgtgtgtcttttgttttgttagcaatgaagttactacctatctcctgcttgaaggacccatggcacctggcatgcatggagagctcttctccatccatcgaacgctgtatgtggtgggcacttcaattcagagcctccgatcttctaaccctaggagctttcacatgccaggccctggccatttgtctttccccttctctttatttcaatagggttcatttaataagagcattgaagcagtaaaagcatcctccttttctctctggccctgtcttttgttctttatatctgtctgaacctttctttatcagttggaatattttacaggcaacctcctcaacacagatgttccaaggttgaaattttcgcttttagttttgcacttctgagaactcttgatgctttctgaacgtttcttttttaactctcctattcccatttcatgaatgcagtatcttctcttgcctgggagaatattgatacaaaaaacgtgggtaccttaagttgtgtttgctgtcttcaggttatccccacctcacccactggctttcccttctagtctctattttcctctcacgtctccagagaggttaggtttaactaacattcatattttaagactaaggtataaaaaagcctaaaatggcttgggaagtgggagaattctgagcttgtcaactagagcgcattgcttacacactaattggaaaatctttttctttggggctgcctctggacatcagcatgtgtgagttagtctgtcttcacagacagttcttctgattagagccctgttttgaaggataacattcttagaagtctgaagaaaaggccccatagttctcaatacagactctgacttcatctcaattatttagtttggcatcccacatcttaccccaggtctgttttaatctagaaccaattggtttaatttcccaagaaggtaaatcctccaaagtgtggggtggggactgagagtaactggctgtgcactggagcctggacactttaaatgaaggcataatgctaacttcatcagcaagaggagagaaaattcagaacattctggggatggctagtgggcagctctctcaaaaactgagctaaaggcaaagcccatggtttatgaaagaatgaggccagaaaaaaaaatgaaaccaatgcaggaatttaaaatagctttttatgtgtatggggggaaatgaatcatgtgaagagttctttgcaacattgtctgtaatagtaaaaaaaaaatgaaacaagcaaaatgcccatctaagtagaactgtcttatgaaatgtgttaattgtatatgaatggagtcaatctagatactcatttggaaaatatctatctatctatctatctatctatctatctatgtagctatacagatatatagaaatacatgtgtatatatctcccacactttggaagatatactttcttgagaaattgaactaatgattgtttctagactgaaagagacatagggggaagaaatgaagggcagcacttaataattggggatatatatattttagttattattttaaaaagactctaaagtggctaattatacccaaaccacattagaatttaatatagagaagtatggaaaagatcaacagtactgaaatcaggaagaaggactcaagatagagtcctaggcagaattatctatttatttatttgcttatttatttatttttactttatgacttctatactcctcctgacaatatatattatgtacaggtaaaattttgctaaaagttattgacaacattgttaccttgctgcccaaataccaggctgagtgagcagttggaagctgcaattgaaaatccatggattccaggctggctttctccatggagagagaattggtcccctggctgacctttctccaagatgctttcattctacaactccagatcatgggttctcctttgcagtctttagggttgtttgtttatttgtttgcttggttttgttttgctttttgtttgttttaagtttttagatcttgccttgcagcacttttatttacttaacctgttgtggtgtgaataatgtaaaaaaaaaaaaaatcttgcttagctctgccctctgacctggaacaggaaatggattagatatgaggtgattactgagcactgcccataagccataatgtgtttgtgacaacattggcaactggagagttaaccctctggatatgtcttttgttctagaaaaaagaaactattcaaatattcggtcaaataattcagatatccatcacccttatgggggcaaaaagcaacacttttactcctattccatcctcccatctccaatccccccaaatcctgcttcctgtattttcccatccttatatcagggcaggtgtttctcaaccagcttttctctcatgtgcctctgtctgctactgtgcctatgaatactctattctgcatctctacatcgttggttgaaatgaatgatatcccaatgtgcttaacttgcttcagttagatgacatttacttttcttctttctgaagcttctcttgtgatgggtaatacttactaaggtacatatatggggagtaacttactttgctactcagatctaccaatccagtgttagtttctggattttgtccggacctggaaggatattttatatgggtataaaatttagaattgacaagcattttttcccccataggacatttggggatgttgaaagttcaattgtagatgtttttattactttaaatatgctctgggggctgcagagatagctcatcagttaaaagcacttggatctttctcatttattctgcatgcctgacattgcttcatgcagtacctatttttcacatgtagtctggatggcttcctcagagactgacctcctattttcctttgagctataaaaaccaagttcatttcattgcctgtattttactctctagatttttcttcaccttttctaaattggctagagttatattactatattttacatttaattttatggtctgcttagtcatttcaaatgtagattttagagttttcaaattgtattactttttattgcagtggctctttctctttaaatgtgtactttttaattttctgcttctcttttatacttgttcctctagtataccttcatatttcaaatagtttgtaatgcagtgatatagaaagagaaggtcatatgtttaattgattagcttatgggaagcttattgaattgtatagactttggctcagattacctatggtgattttatttatttgtagagtttgtttataataaagtttataaaattgaaaagaaggaaggannnnnnnnnnnnnnnnnnnnnnnnnnnnnnnnnnnnnnnnnnnnnnnnnnnnnnnnnnnnnnnnnnnnnnnnnnnnnnnnnnnnnnnnnnnnnnnnnnnnnnnnnnnnnnnnnnnnnnnnnnnnnnnnnnnnnnnnnnnnnnnnnnnnnnnnnnnnnnnnnnnnnnnnngaaggaaggaaggagagaaggatggaaggaaggaagaaagagagagagaaagagggaaagaaggaaagaaagaaagaaagaaagaaagaaagaaagaaagaaaggaaggaaggaaggaaggaagggaaggaaggaaggaaggaaggaaggaagggaaggaaggaaggaaggagagaaggatggaaggaaaagaaggaaggaaaggaaggaaggaaggaaggaaggaaggaaggaaggaaaggaaggaaggaaggaaggaagggaaggaaggaagcaaaagaaaaagaaaggaaggaagcaaaagaaaaagaaagaaaggaagaaatgaagaaagaaagaaaaagaaagagaaagaccatctagttacttaattcttcaagtcagttaaacaaagcctataaactcacttcataaaacttgtcattagcatcaaatggagtttatcattctagatgttagttttccctttgtttcatacttctaagcttctgttttaagtacagctaggtttctaagacattgatagagtagcagtagagcagggagttccactttggtttgagtttgtgaatgttaggaccacctctaaagactgtttgtaaatacattgctcaatactccagttagtccttagtgatgcaaggtcacccaaaataaggggtcttaacagtggtttctatgcaattcctttagcgagtgccaaagatgttatctgcagagttgtctaaagctgacattaccaatatgaagtctactggcctcaactgcccagactcccatcagcccacagactgcacagtccatgcaatgtttgatctttgatgtcccattccaatattttaacaaattacactctgtgggtttaaattttccatttctcattaaaagaagaaaaaaggaacaatctaggaaattgctattagacagtggtggacctgggcaggtgtgaacagcttcaggctgctggtacttcagacagcttgacctctgctgagacattcagcttgcaggcacctgagcttgcaatttctgctctaaagatcaaaaagaaaaaaagaagaagaaagaaagaaaggaagaaagaaagaaagaaagaaagaaagaaaaaaagaaagagatcagagcccaagcaaataaatacctatttgaccctattaaatatgtaaagggctgattaactactgtgtgaggtgcttcatctacataggtcaggacacagagcaagcctgctgtgtgagctctgaagacagagctggccctggggagaacatgtggctctggatgggaccacacagcactagccagatgcagaaaatgtgaatcagttggcttgagatgagcagataaaggttatttcctcttcctgttcctcttgcagagttgcagtgtctctttagaatagtggctctcaacctttctaatgctgtccctttaatagagttcctcatattgtactgacccccaaccacaaaattatttttgttgctatttcataagtgcaattttgctactgatattaattgtaatataaatatctatgttttccaatgatcataggcaaccctatgtttggcctggaattgttggccttaaggggttcgtcatccacaggttgggaatcactgctgtaaaagcttagcgttgaagtccttagtgggccttcacttgatactcccataaacctgtgggtaatgagtaagaagaggacatgtttctaggcccaatgggttccttctctgctcttctgcaagaattcagctagatctcaactgagaggaagtgctgtagatcctcatttcatcccctgatctgacaggttagctgtaagagtggctagtactactgtgagagattgtattgtccaaatagagtgtccccacatatttaaaggcaagtttttaaactgcagcttgcatattttcatatctaccccacagcacccctacctcctcaccacaccttgaaggagtcttcttctttaaccctaatacttgggtctcccaagcaggactccggctggtggccatgctgccccagaagtcatctttctccagctctcccacctgccttatccacagtgtgatgagtgtgttttctacccatctttgtggttacttctccacacagcctctcattgagaggttttgagttgcttaagagtgattcctacttgctttattcttctctgtattaccatttccagaattcagcattctgcttggctacaacacacactcaacaattccataggatcattcattttctctctctctctctctctctctctctctctatgatggagaaaacttgatgggtttgcttctaaacgtgctcacacactgttggtacaaagatccaataggttctcgacaaggtgcatgagacttactcctctggagacaatgatgcaagataaaccatgagaaaatgtatgtgagagcatgagaaagtcacaaaaatagttctgcaaggcacatgaaactcgggcatgcactctaccattgatctatacccctacccatgtgatgacttttaaagtatattctctgatgacacattactacatctgtacaattctgtgaccacaaagaccaaccctggtgcaatgtgaaagatactgtaatggcatacgtttcctgaggatcaggaagcattcaggggcatcttgaccactagctactatagcaccaggaaagctctttgattctcatttatattagataagtggctgatgccaaaatgctagcctgtgctttcaaatactaagatggcacagcctgacttgtttgaatagaagtcaccatttttgctgtttaccagtgctagctgtgtatagttccaatcccaagagatagatacacacgatccaagtgtgcaaaatgccaggcttggtcacagacttctttccatctttgtttttgataagccagtagtttcctctgaaaaggtgatacctaccacttacaagaacttgaggttgaaaatatttttgttcacatgatactaaatggaaatcttggcttttaaagctttatgctccgcacagtctaccatcattctcatccgcaagtattgaaagtgtcatttggcatgcttagtttccagtaggattgtctcccaccccttctacctctttgttcttttgctttgtcaaggtggcctttgttttgtaacccaggttgctattacagtcttccaacatctgctttgcctctccagtgttaggactgtatttacattgaaagcctggcatgactgtatcttcaatgaccttcaaggatggagttaaaactaaatgaatgaaaatggagctttgtgggcagctccagatactcttgtcaaccccactatacaggtagattaagcaatttaatattgcagaaatagcatcagatatcattccaactggagtggaacagttagatcatctcagatccccttcccttatgccggaatttcttagactcttttaaaatcatttgttaaaatatgaactgagtaaaatataaagctaatcagtagctagttataaatagtataaagtaccatgctttaaaaaattggaccttctagaaaataaagaatttgctaaaattaatctgttgaatggtcgggatatttttagcaactgacgtggcacagctggcccttctccatagagagagcagggcctcttaagggtcagactttaagattcacattgactcctgaagcaatgtgctgacctggaggcctttggtgtgagcctcggctgcagctttggtcaggagcctgaacagcaaagaagctctttgccccaggccaggttacctaacagctggtcctgtagggaataagcctgccactttctgtagcaaagggttcaatgggcctcttctcactcctcagaaacatcaaataatacagctccaacaactgatgctttaataggacagtggtcaggacaaataaagtctgtagaggcagttattcttaaaagtaaaggaaaacatgggctaagaattttcaacaaatggaaggacatgggaaaatggctgtacagtggctagaagggcccttccaggggagtctctctgagaagaaacagcagggcttcaagcctcagccagcagactgtgagtgcagtgggcatgggtggagggtaggcaaagggacagtgtggacagtggaaagcaacgggtgccgagtgaggttaggaatcagaatgagagccaccagcagaactcttgaaatcacacctccatctgacacagcacttggcaaaatacgcagaagcaggtttcaatctgagtgattctaagtgatggccagatgacagggttcacaaataacctcctaacagttgcttcctggggctctgggcctgtggactggtaaatatgatcacctgctttgttagctggagatctgcttgtccttggcattgactgcagtggaattttaacagaatcttttttgcttgggaaaggccggatctagaggtatatgagcagacagctgtttgaagaattccattaacaataatcagacctcatcatccacatctattagacaacgtgattctaagaaccatcggagaaaaataagggggactcgtgttatagctccctcttcacaaatgggccaaaggaaagggtcacatataaagccatggcataggcactatagatcacactaagacctgtcagtcattgtacctagagaatccaacagcttgttcagcacacagctgcaccctaagaggcactgcctaaccaaacagattgaaacctgcccttccctcttcttcgtgatcctaatgcatgcactgtaatagaaaaaaagccaagatcccatattaaaaatgcagggagcactgcacaattttcttccccatctctaaactccggaaacagaggtctatccacttggatctataaagcttatgtgataaaatatggctgtgccttgtctcgtctttgaaatcacaaacctcttgagcaaaggggccatattttatctcctagacatctaccaacccaggcccggctctgaactcatactaactgaggcttagggcctctttgttcctcaaatcaaatgcaaccaattctctctagtacacataattgaaagcagcagtctatctgaaatctactgtgctgtatattttccacttggagtaagagtgtgaatatgtgcattcagaaagtatttaagaccaggttgggaaacgtaatgtaaatgtacagttttcaaaacagtctttgaaagtgagccagcacagtgagaaacagactgtggggagagttaagacctggtgtctatctgctggtgaaatgaatttagtcaagccacatgactaaatttcaatctccagatgagctattgttgaaagtcctctataattctaaattctgaattatttttcattcgtggctagagcaggtcacgagacacttctcatctcaacaaattgattttggtttatatatttatcatctatttccctttattgccggcacctctaaaaccttaaatgcttagtgcgttctcagtgaatactactgtgtgaattaactgggactccatcaaagggaagacattttgaaaagtcaatccctttctatcattatcgaagtaacttctccctcaggttcttttgtgttaaaaaaaaaaaatgacaggtgaccaattaccacagacagcattttgcttgcagccccgctgctcaccatgtaactgtgttccattacattaggtcacactgaactttaccccatgctgtcttgagcatcagtccgcccttggagaatgagagtggtaacccactggtctcttcaagaagctttagcctggcaaaagagaattggagacagctgaagcatttataggaaaaagcagttcagccttccatgtgtcggtacccatgctgtctcctcaccttagcttttcttcaccaggtgaggtacttttctcaccctccccttccctagctgataaccagaaggttgttagggtttttcgtttgttttttacaaaaagaccagctctcctgttggactatgagttgagtttgagaagggtaacctcaagtgtatccaacaaacaagaatgttgccaatttccacacatttattactatttagaaatatttagaaagctatgaacattcagaatccagttataatattaccatttgtactgtttatttgctcttccttatggaatcctagttcatccagaggacgcttctatctgttctctgatcttgttgcccccatcgaggatagcggagggtatggctgtacatggtgggttgccaaccagagctgggatggactggggagttagttctaggagtctgcactagtgtcttcaggctccatgttttccgtgtctgtcatgtttttctgggcatacaaaagccacacgagccatcgctgccccgcttagagagaacggatgaaacattttgagacacttggatctcttgtccctaagtttttattgatttgttgtaattttacccaagttattatatatgctgtttctcttaacatatgggattgtaacatctgagaggacctgaaggaatttggattccgacttcctgtggtcagcaccaatgacaaggcaactgtgaagacatttggagcactgtttgccttcatcacagagtctcttgcatgtggggatcagacatgggcagttgttgagctcagaagaactacagattcggtggcttatttctaagtcacatctcagctttgtattagggacatccacagtaaaggactcctgattgctcacatgtttggcaaagcaagggaagaccgttctcacgggaggacaggaccaaccacttacatcttccaagaaaaaaatccttttgatttttgagattcctgaacattgggttattcgtcctgactataagtcaatgctcatagtagcaacaaaatagctctaatcaattgtttggtaaaatatttataaaactccaaacatgattatgctctttgagcattcagcagggacatgagacaggggtgttgatggtgggatatcttcacttcaaaagcttccccatgaggaacatgtcccaaatgacacactgcataggagcatcagcaagcattctctcagatcactgaggggtaagcagttgaatcttgtttacagagaggtgtccagaccaccatttcatgtgggagttttatccacatcacttttagcatctgatttggcttgcaatacaaagcctgagataaaaacaaacacagggtatctgctactccaaagactagcaacatagataactatttttcccttgttggtgccagctagaccacacacatagaacatcaaactcccttttctcaaagaagcagagcagcacacctagtctctctggaaaattggtgtgcctttaaatagatgatggcttacttataatatttataatatgtagttgggcagctgtagacattgagataaacaggaaggaggtcccagcagcagccattcctggagctagggtacatgtagatttagggtaggtgggtagcttttgaaaggataaaactgaacagaccacaacgctctaatctatcaacccctattctgcttaaaatgaaagcaagtggccatcttaaggcaacccacagccccaatcttttggtttatcctgacttagaggcatagcatccttacctggcaaaagacaggaagaacaccgtcacatttggtcatattttgtgatgcctcctggaaacagctgtgttgtctgtgtttgtatggatacaggtttttaaaaatgaaaattgtcatggcaacagctgcagccctttattacagagcagtggaagtgacgcagatatttgtggggacatctatgctctcagagtaatgtgcacctttcactacagtggattttttttcccactaacatttctgtttaaaaaaataaaaggaaaagatagaagaatatgctcaaagaaactcaggaggaaatcgagggcttggagagtaaatgaatggggtggaaccttttatatgcatgttaaatcatatatgttgttaaatcataaatgctgttaacccaactgttttacaatgctgttggatgcagccaggagtaggtacatttgctttgcatgtaaccctgatacccaaggtgccaactaaacagaatcactgaataacaatgtcagtgataattagggtgttcactgaacctagtttccagcctctttagcattctatcttccttgaaactttaagaaacctctacatttgagattatagaaaacaattttcccccattttgtcagtaaggagtgggtagctaagagtaagcttaaatgtcctcttaagtctgagagactttcacggactcatagtgaatgttcaggcactctccctttctgaacatttgcttgagttagaatagttccaggaaaggggttgctgtgacctggaggaaaagaatctatgtattgtttcatattccctaagctagattttgcatcatctcgatgaccccacatgccatcatgcctttgatggaagcagcagttaatcccacaggaactgttcaactatgaaggaaagagatactacatctactctgggtaacttatggaaaagataaaacctcaataggctggtggcctctaaggctacagatgaatacatcttgagagtgtggtaagaacatctatcaagtccaatatccttcatgcacgtgtgacacgtaaggaaatacagggctgtgggtgcctgtgagctagcaggatttgagaagagattagaatgcgtgttgcccactaatctctcacatggtccagatcccttaaatgaaagtctgtgctttataagccttgaagctttagtgtgtgtatttctcatccagagtcatattttgtccagactttcccctaaccaaactgtgttgtgccctagtttgtttcccacatcactcagaagaggagaagcccgtggggaaaagctttgctcggggctgtagaaaacagattgcaaaaaagactccgtctcattctgttctagaaaatgacagaaagccaaagtctttttccccttctaagttcagccaccagagattgtttggtttgtgttgtggacaggacagtatattacagagctagtgtgcgggaagcagagtatgccagctttctcttttacggggccaagcctgttctctgtccaaaccaaaacaagcagaggtcccagaaatgtaatctgggtgtcagaatcccgcccataggttccgtccaatgaagtctccgctgctgcttcgtggttcatgttcgttccttacagcatttgtctggacagtcaagggtatgggtaggtttctcgtcagaggttctccttggccatcctcactcttactccctcactccactcactctgcccaaggagctcattcaccacacggcacgggaccccagccgagaagctccagaggaaatagaacactggtcactttgtcttcactaagtcacccaacgagaaggatctgtggatttaaatccaggagcaagaaaggtaacatggaaagaaatgcagtcacaaagaaagtgagagttcactgcttgaaagcctttcacagtggggtgacctcaggcaggtgattgactggggttgtagacagagaaaggatccccactggcatacaatgtagtttgaatgaactatgtggaagcccaaagaatatgaatctataacaggatcttcttaatagctgagcaaaaggaaccaagctggccagccttcagtgaaaaactctgtgggtgggcctgggtcagagcctgtccctgtctctgtctctgtctctgtctctgtctctgtctctctgtgtgtgtgtgtgtgtctgtgtgtgtctgtgtgtgtctgtgtgtgtctgtgtttctgtatatgtgtgtatgtctgtgtgtggtatgtgagcatgtggatatacaggccctattgtattctgagaaacaaattatacatttcaaatctcactgtctagggtgccctgtgcagttacatcctgtctagatgtactcaagtgtgcttggtgatgaaggtctaaagcgccttgctactaaaagagtctccatatggaactctattgaactctgatggaaaaataatggtctaactacctgaaagcttcagtagcagccaaggatagatatgctacttgctgccagctaaacaaaacattccacctttcaaacataaacattttgttgtgcctgggggaaggtctggatcaaagctaaccctgttctatttctgtttcaaaggttcttctttcttgggataatctgttgggccacttttcttttcaaattatttttgctggttcactgctaaataaacacagagaagaagaactaaggaaatgtgaagatttaagttaaaactaaactatatcaagactcacagtgggaattatctcacaaagaagcctacctactgggccacctccaactacccttttctttaagcacagacttgccaaagcattcacagagtatgatcatcaaggttgaaagcacagcacaggatctgtgctacagactggcaaggggtcgaacaccagtggtacaaatgactacatgattctggctgcattgcttaagctgactcaatttccctttggaatgtgtaaataatactatgtctgctataggtttattgtgagaactagcaagtaatgtattcaaaatagtagtcaggattctggcttgcaaaattccctcaataaatggcagctattgaaaactaaaatgtagaacccccaaatccaggagaatttcaccactgaacattttgctgaaatggaacatgtaagctttccacatttagtgatcgcccagtttactaacgaactatcttttcatcttgtcctggtttattctactgtagtttgcaaaaccaagcatctccttttccttcctctaacagttaacattctttttcttttttttctgaaatccagaatttcaagagttgaaggttttcagtgggactatccagagccaggactctccctcctcaaccactccacagaccagacttatcagaccaaagtgttatcagggagctgtcaggacaagcaagcatggcttgcatgctgccctgttctctgggatgtcactgtactggagttcaagtgctggcactattacgagacgatcacacttttcctgtgggccaaattactcagaaaatagtctgggtgctgtaatcttctttcataaactaataagctcttaataatgatgtatgttaccactgattgccaaaatgagcttttcataaacaaaaccaggcatttgttatttctcagcctgcgagctctttacagttctgcacatttttttttctcttatttaggtggcattctcctttcccctgctacatcacctgtttctagttggatgctttcgaacaatggccctgaggcatttattttaaactgaattttctaagaaggcagtaataggtttgaataaaagtctaatgaatacacttaatccagaggtgatagtggggtttaattattaaattctaccatttctcccaaagaatttgcaacttatgtataacctttgtcccaaccagaaggatagtggcatgcaagctcactagattgtagcatagctattaaaggaatcacatggttgtgtggttaaataaaagtcccactcaataaattcagagagagaggtggggtggagaatacagagatgcaaagggagaagaggctaccaaatagcggtccttctatcttccggcttccagtgggagcagcctatctctggtacttgtgagggttccttctaagccacaattggtctgggtcttcttaggagatttatgagaaggcttttaagtttgaagccatctcaaaggcacctgcatataacaacagttctaatccccaaagtattatttcaagatttagtccttaaaaggaacaatttctcttggcttcccagtgtgcatgaatatgcaaatgcatgttcaaacgtgtgtgtgtgtgtgtgtgtgtgtgtgtgtgtgtgtaaaataaagagagagactgttttcttgatatacaatgacagtgactcttacagaaatctagccacatgaaaaaccattcacgtgggaaatgctatatctcatatattcaggttgatcccaaaaatgcctggttgtggtagccttgtggatttttcatgtattgacataattaatattaatctcaaatccatgactacaaagtcaagctgatcagctgagatgtatataccacccacaaacctcattctctaaggcacatatggacagctgtcaggacccaccattattttctcatcattctgtcattaatgtcaccttagtctctcctatggagtctgggactcagagcataggttccctgctgagctgggggcctgtgaaaggtcacagctaaggcgcagagttggtgctcctattaccaagatcgtcttgtttcacatcttgtttaacatctactcagcctctcacctcttgctccccactctgccatcaatattgtgttctaatttccgttgttcttagggcttgtgaactccatgggcaatgtgaagaaaatgaaggaatatacttccagatcaaaagcacgaggccagtgacacagtttggttcccaccattctcaaactcccagaatcactgatatcttgacaccaagcaggttgttgacatgactataactcaattgcttgattctaacttgagttttttttccctttgatttctttccatcccaactatcactaagtcttccaattttctattttccagactccaagctattataggccgatatacaaaactaacccttctgcccccaacttcctggggaccaagcagtagcttatgcctctccacggtctgtccaaacttaacaagtgaagtgtttgcctttgtgctgagtctctgactggaagttttagtaagacgcaatattgcatggtataggagagatctgctcacaaatctgtgtgttcttctaggctctgctgttgaaatttaaatagaatttacagaactgatgctgacaatccagtgctggagatgacttaggcttctgcagagttcgtactttctagaaatttctggatttataatttaagaatattatgtagaatacaaagaacccttttttaataagcttttttttgatcatcaggcttcaagttttatatacaaaaaaattaaaatgtgtgggtcctggcaaaatattgtagtttaagatggtaacaggtgcttctaatccaaacataacttgaactcaagtaaaattctctgcagctctaaaaagatggatgtagagatttccttaaattaagctgtgatttgggacccagatgcacacttaattgctaataaatgggaaagcggtggcaggagagatgatatgagggaaactgttgatcacggcaaatattttccaggcgttgtcttctctgtcagctgtctcaggcagctgtttataatcagagagggagaagtaaaaagctcccagattaggaaagcagctcattgtctggaaaacgtcctttgacccagctagaggaaagtggtatttcattcagccacttgccagctgtggcctcagcacacagtacttgtgggactcaggcgccaacccaactgaacacctgtgtttgattcttcttatctccatgtaacatgtgatgagtcctgaactggcagtttgcaggagagcaagcttcagtgagttggtgtcctcttcccttaattgttgttgtctgcaattctgcaaaatgtcaccagacactgttctcaaatatattttctttccaggtataacagtaggatttctgtggtgtgtctatgtatcttggggatacacagctggaaaccccagattccagcagaacagcaggaaattcacctctgtttgatttgcaggactatggagggatgtctttagtgctcagttattgttcaaaatgcacctgtatccatttgtttgatactatctcagtagttctatatgtctcattgagaaaagagaaattcagcttttggcctgagcagattgcttattctattctagaagattctaataaagttctaacatattaatggcaatccctaatggtccccatgttcttagaaatcattcttaacttttactgatttctttctggtgaaaaaatgataaaagagctagcaatcatctcataatattaatgtaaatattatcaattattaagttaacctctgtgggtttttctttcctatattctaggtgttaagtattacatgcacacacctaatccccatcctgaaagaaatacaacttaaacataattttatctgtgttttaaaaatgaaaactcagcaagataagtaatttctataaagagacaatagtaacttcattttgcaagcagagtgaatgagagatgggatggaaagccagagttaatgttgacaggaatgtcatgtgatatggatatagtttgtattgtcaactatgtactacaaagaaacagtctttattaagaaattctagcccattggttgtcaaattgaagtggatattttagctaatgtgctatctatttattgtcccttgtaaatggtctctgcctcaattgtctgaaggttgtttcggcggagtcatttctttgcacattctcagttggtccatccagatgtttcccttctcaggcagtctgctagatggtctccatcagggagagctgagttgagaagctgctgttccactactgtgcgttaagttggggaaagaatgttacctgttctgaatctgttagtgtgttaaatgagaatgctttcttcattagattcttgagaggcttaaagaagatgaagcgcataaagtcacttaatctcattaagccatggctgcctcacctacaaaatgaaataataacgcacctgcttcaggggttatggtgggggttgtatgaaataatgcttacaacatgtttaacaaagagcttgacaagcaaatgctggtcaggagagaggggtatcgtaagtcctctactaacctgacatggaagaggatccaactccattctctgtcttcaaacctggatattatctttgtcttggttgtacctctttatgattatatttctttataccagacttccattgtgagtggctatcaacctgcttttcaataccttccctatctattttgaccccaaatctcacatatcacaggacggttggagctctgattttattaatgagggtgaacagaactgaaaagttgggaatgggcaaaaattcccattggggcctgggagtccccatctcctctatatccctccctgaaatctctcattggctcaaattcctatttaatgcttcaaaaaaagttaagaaaatggaaatttgaagagggtttgcgagctactttcatctttaagtctatctaaaattcacttttaatattgagtatgagagaaattttctcaaagcccacagactagttcaattctaacaagacttcaagacttttcaggctaaattgcaaagtaatctaagatctcctttcaaaaaatgtgcctatattacacacacacacacacacacacacatgcatgtgcacttacatgcataatccttttcaaccatcttgaaactcaagagttctttttgtcaccttgaagttgggatttagtagaccaggactacttaggaaactgtcaagggtgtgattatgtgctgaacttcctgactgttcttgatgctattatcaatctgagccggatgaaaacacacacccttattgtatcggttattgagagactgcttgttccttcatggttgtgccaacctttctaacaggaggatttgcctgggcacaggttctccttccctggcagatgtggttaagatagaaaacaagtcagcaaccgttcagtgaagagtttcctggggccatgttaccgacttctgagggcatgggtttccatcatagtaccctggctaggaaatctttcatttctctgtataatcatctccaacttcagagatctcaaggcttttgtagaaaccagcccactttcttttagatctaagaatcaggacattttgaaatagactatgatctaaaatacctcccagtgatattttactttaggactttatctgctagaaacaggagggatgaggtcagttgttcctctggggccacaagtcgttcctctgcagggtcacctctgctatgcttactgcagctgcttctctgaaatccatcaatcctctggccttcctgtgccttcttcatcttcctcctcactacccttgccttctcggggatcttgttcaggtgttagcctccagctattgagagatctggctgcttcagtcttttgctgttctgtgatgtcagtctgtcacttgcctgactttctatgcagtttcttggaatattctatacatctttcctctacctccaagctcttcagtggctgggcctgaacccctagaggaaaatcctaacactggcttgaaaggcttcccaggagtcagctgcatcccctctctacctgcctgctacccttcacacattcctccaggcatactggccttcttatagctcctctgaccctccttgaatgttctgcacacatggccccaggcatactggcttcttagtggttcctctggccctcggtggatgctgtgcttcagagaagaggatgcgcttcccacctcatttccctcaccaccatcttcaggcagcctttctgcacagcacctattcaccctccagtggacacttccttcctcgtaggccaccctagtttctgttcagctgctgtcatttcatcgtgtatttgttagcttcactgtatttatgttgtcttctccactacaacataagaacggctgtgtgttgtccctgttgcatccccagagctttgaacaatgtctgcacacagtaggggtgatggatatttgttgctggaatgaatcagtttggcttgacacacaaactctacttccagcggaattatccttgtcttttcctttcatggatgacattagaatagcaagatgatatttgtcaagggcctaggtatgattttgggctcttagcaagccatcattaaatgatacttcagagggcaaaagagttaattaatgatcctccatggcacagcccattgcaggcccctttagcccttgtgaaggtccccatggaaaggccattgggaagaaaccctatgcttctaactcaagctcagtgaacttctggccaggaccccttattattaagacagctcctctaacctcccagggtgtctggaatgcccccaattcctgaaaccattatgttttacagcaggttctcttgacagaacttcatcagcctttggcagaacataagcccgaataatgggcaggcagacgccagaatgaattccaatgtgtacacacaattcttggccccataaaaatcaattccttattcataattaagcaagtcccctgggaaagggcacgttggtatagttattaaaagataaataatagataaggatccacttgtttcttgctctgttcatctttcttttcttagtacaaagagctttaaacatgaagtaacactgtaattaattcttttctcctgcctggtccctgcctgtgacttacaagcccaacaaaatgggatagcctctgagaaagttcattgccgttctgtgctgtattgctcttttaaaatgtgtcccaaaatgcagaatgacaacccaatcctagacagggagaaaataaactgtgagcatctgacattaaatgtcgcaagtcacaagagtgcttttctcatgagccttttctcattttccagatcggtttagagacttgcttaaacatgcaaaaaggctgcatagtaaagagggccgcatcttccaactgctcaagtcaatgaaccagccagtactaagtgttgggaaggatccacttgacctcacagagttgtgttgagagataatggtgttgtcccttctcacaggaatgtttcctcacacatagctgagggagggaactcccctgaatcactagactgctaatcatcctttaggggagaaagttaactctctctctaagtactgtcaaagaagggcattattggtcatagatcctacaagtgtggggcacgagcacacagagttctggtgccttttttggcctatagaattaatagagcaggagccagttggagcaggacctgtagcctctctggtttggtgtatttgggaattaggcgaaataagacagcaagtgccatgtttcttcacctaggaaacttatcgggaactttgagggcaagagacaaggtaaaggcactgaggtcaagcagctgctgattgagggatgggaataagcaggaatatgtatagctggcagagaagatgagggttgagttgatacatgacaggaaggagttctcaacagagcatcagctgagatttctgggagaatggttcaataggaagcagagtgtgactagagcacatcacaggaagacccagaccaagagccaggcataccctctgacacccagtaccatggggtaccagcagggggacctcactgctactcatccctttaaagacctttctgtgtggagaagaggaagcctgctttgaatgttaaggtttaaagttggacttagataagtttaaatcaagaaaagtgattgactaatagagtttgaccaagaaatcaacagaactactaaaccaacacaaaggtggattctatatagtacaattagagcagtaattgagggcaggggaagacatttcatatttatgtcctagttaatcaaaaactcttatcaatgaattagtgctgatagtttgaatttctttgttaaggattaaagatttggcagaaaaatggaaggttcttttaaatatttatggctattttaatctgctgggggtctgctccagctagaatgggttgaagtgagacacagtgttggacacgggccaaaaattgatgatctccagtcttttaattctctaactgctctgtgttaaaatcccaactctctcatactgttgtgtgcttcatgaagcactggggaacttaattctttatctctcttattatttgctttataattctctgtgcttgaataagcgctggaaacttaactctttataaacttactttataattctctggccattaacatatactatatagcaccagggaattcactagaggatttactgctagcgctcctttctcttttgcccagaagcttctcccctccctggtgaggtgagagagaagcttggagcaattaacttttattgaaccaggaaaagaaagtcacactcatgagagaaaaacttttacacaagcaaatatgcacagacacacacattcttacacacattcagacacacattcacatttttgttgggcccaaccatctgtctcatcaacttaaatacttagaactcttatacttaaaatgcatatgtagttttgatggatagagcagaagcccctgtaagcaggtttcattgtgcaaacaccagagcagaaagaactcactcattctggatgaaaaataagctacaaccttcattgcttacagaaagaaaaaaaaaaacttctatctttttattgagtataaaaatcaaaatcaaaaagcaaaccaaaccaaacaaaaatctgtctttgtctgttgcaggaaatgttaaaaaagacgattggcacgttcctgcactagtgcttgcccaccaactctctgcggctagcccctgtgccaggtgatctcagcccacaaactcctggccctgcaaggccacaaggctcctgctgggccatctcaaaaatgcccctctcccccgacccccgccacccgaccccctcagtgagttccacttgcttccatgtaacgccccacgcacccctggttatccatctcaacacctaattacatgatagaaataagactcttaaacttatagttaaccaattagatttatatatcaatttaaacacaatttacaagatgccaatataataatttcaaagccaattgataatgataaagctttaacccaattattctaaccttttaataacaccacaacagtctccattctggttctctctctcctcctgagacctctctgtctcttcaactcctcactctgcctcccttctcctgtctaatcacaagcctcccactgccctaatatgattggacagggaaaatcctgtaatacttgtcagtaagaagaaacttgctgttaagaaaacaaaacaaaaacaaacaaacaaacaaacaaaaactctgtcacccggtaaggtaataagaagcctgtctgctgctctctgctctggtctgttctgctctgttctgctctgctctgctctgttctgttctgttgtgctctgctctgctctgctctgctctgctctgatctgctctgctctgctctgctctgcgctgccctgccctgctctgctctgctctgcttctctattactgtcgttgttcctagttcttgtatgttttcaagtacatgatcatatggtacttctaaagttcacaataaggccaaacaaaaattagaatcataaatagaataaagagttacaacagagatgtttacatgtgttttcataagactagttatctaactaaatctttattatctgtcactacatccacaggttcattacgagtttaatacaataattcttatgtcttaagttaacatgattttgtcaagagacagatcatctgcctagtgtctcattagttttgagcttttgtatagataaaccagataatattttttttttggtctgagcacctacaataaattgtctatacccagttttatgacctttagtaatcagataatggtttctcagacagaccagaaagaatgtttaccctgatcataaatctgtttcatgcatactttctgtcttagtataattagcccatgacacatgaatgtttacagagcccaaactgcagactatattatagagggctcaaaacttacttgtataaacttaggaattctatagaatcattattaagaattatgaaatcatcagtttgtctacatagctttgctaaaaaaaagagtacatcttcgttgatctgaagaaaatctgcccaataggtaggctaatgcccaggaattgttatattaatttaatcatgacagaaaaggcatatcagctgcaggaagcaatcctgagatgcagtctctttgggccttgcctcttagagatcacccatcatggaccatgtaaaaatggtgggctatcttcaggaaaatcacctgctagcctttagcctatcctaggtggctcctgacataatcattttaacacacacacacacatacacagagagatattatatgtatatactttatttattatactcatagaaaatctaaaggggatacactatgatcatttaacactttttaaaaagctttcaagtgacattgatttaacattaataaaagacatgaaagtagatttaagggtaaaaatgaagagtagaacgttgtcctaaagcatcatttctgttgcaggaagacctgcaacatgaggctatcactggccaggtagtttctaggagcaacatattttaggggatgcagtgaaggaagaatatcaagaatgaatgattttggaaacccagagacttgacttaattataccattttgagaaatggtaattcagtaggatccagaatggaaggttgccaaaatcatgggtgggaccaatgcaatcctactttccatcaaagtcatgggctggaccaatgagatatcactttccttcaacgtcatgggctggaccaatgagagctcactttccttcaaagtcatgggctggaccaatgagatctcactttccttcaaagtcataggcaggaccaatgagatctcactttccttcaaagtcatgggcaggaccaatgagatctcactttccttcaaagtcatggatggagcaaatgggatctcattttccttactatgtacactctcactatcactcaggctcaagtctcccttaccatctcttcttcctttcttttactttcatctccccctcctcactgcctgcttttgcaccatgaatttactatgccacagaatactctgtactaaatacatcacatgtaccaaagattcttatctctctagaccaggggagagtcaaaaaaaaacctatgctaaagttttcatgggacatttacttttacatactttcttcagaactatttcagatcagagacagggaggggaggaggagggagagaaagaggaagggagggagggagagaaacagaaacagaaatggtgaaaagaaagttaccatttgaatcaggaaggaagattttccctaagaaatgattatctagttccttccagatgccattttaagagctttcaaatgtcaatgcatttaattgtcatagcaacactatatagtgggcactgttataattttatagaaattggaatacaaatagtttaagtaagttgatcaaggtcacatagcctgtgagacagagccaagatctacacccgatctcaaatccagatactcactgctccctcagccaccaagcctttttcatttccagacgactatattgtagacaaaaataaagtccattattgagaaatagtagacagagtcttagttgtgcccgtgactcttaagtaatgcactgaaaaataaagacccttactagttttgttcatcaagttacagtacttcatttatttcacatttcttagatggaaggggctgtgcacatttatctcccagtttctgctgagcagccagttccagaaaagggtaaatcgataacctggacttatttccaacttataaaatgaatatttaaacactactgggtatttctggtcataatattttcaaagttattgggtctatctacctcaaaactctaatgatgagacctgccctacctgcccccacaccagattgtagtatacacaggcctctcaaactgttctgagggacagcagtgaacatattaacagtacacttcttcttaacttctcttgtcctttcaagatgtttatccattaataatttagccatcatgatttggcacaggggtcaagtcacaagatttgaggttgcttgaacaatgacatttctcccttaggttgaaatttaaaacaacaactttgatgtactatctaaaatcatgagctgtttccagtttttaacaacccccccaccccagctgctgtacccaattcaaaagtttggtgtcatgactggaaaccagatcccaaagacatgccttttgaggagcaaggacctaaaggatgagtcctctagaaccttggcagtgcacagagggtacctcccgaggaacagctggcttttgcagagtatttcttgtgtatctctcctccctcctgcctcatcctcccccaaatccatgtagcactgataatgagattcagcttaaatagagctttgtggccttcttagcaccatggagaactctgtccagctttctaggacacattgtgtcttgacacatttgctaaagaactctgtgatgaacatgacaccctttgagatccacttttatgaccatttctacaggatgcttctttggtgccttgtctctccaaacccacttctgtgactagttccttgcttacaacctcaaggttaatgtgacaggaggtcaacactcttcctgtccacactgggaagtaaggcttgcttcaaatcccagaactctgctatctggcagtgtgggtatatgcatttctcagcaggatgatggtaatatggagataggcaatttcattgattctttatttgagtgtacaatacaagcactcattgaacagacctctaatcaacactcacataggaattttataagtgcttcagaaactcagttatggaggaatattatcatctctatttaccaggtggcggaactgttatgagtatgatgacttgccctaagtcctccaagcaagaggtgccaaagctttgacatgagtaacaaggcacaaacaagggagattctcagagttgcattgagcatgccaacagtacccacagcatggctccatctactcagtgcctaatagacatcctagagggatagttcattttaagacttgactaagttttgcaagactctttcacttctttctttctacatacttgaggtcatcctatcatccttagcatagacttgtacatgccaagcaccaggctgtgtcatagccatacaaagaggaacaaggcccaggtgagactgaacagagcttgaactgtaggtgaggaagctagcaggtttctttaaggaagcccacgcatcgatgcttgtactcactgcttccccgacttactcctgcacgcaggaaggtccagcccccatcccatctaagcaaaggctctgatacccaagaaacaactctcttaaggtgaatgcaacagtgctgctcaactactttcacacgatgattatttttgtttgttttttgcttttgtgtgttttaacaaataagaaataaaatgtttacattatgaaccgactagctatgtgattctattctcctttcctcggccactttattttagaaaaaagggaggaggcagtcaggaaggacaacattaacccccccccccgatattacacacagataaaagattaaacaaaattatagtacaggcataaaatagtggacgttgtataagtgtgcattcttaaaatggaaccacagcctctgagaaatgcaacgtcacccaagtttccctttgtgcatggcttcctgtgcagactccctgagttccagccataccacacagcagctatgtcgtgaaggtgccctgaactcacctgcctcactgcctttccttatattctctttactgcctggaatagcttctccccatcactgtctgttgatccaacatcaaataccatctcctttagtctaaaacaatatttctcctttgtaaatggtttgtatctatcacagcaccaccctcagcactgtgcatgccatccatctcttaggattttctgcttagagatggcttccatgtaccagctgttatttaattttgtttccatcctgtaggcttctccacctgtctccagcaccctgtgtgtaatgcttcacccagcatgtagcaggcacctagtgattatattctggaaagacttatgactaacaaattcagtagagtacctccctggtccaagggtttattatgcttttctcttctaataaggcaaacatcacatggagttgggcaaacacaggctctctcatgtcttagtagacagaattaggacaacatctccccaaagaccatagctcaaatcagtggggccagcacaatgagttgaggtcatacacggggaatttttgttaatgtacactttctcacatacataataaagaaatatatttagcatgtcatacttacaattgtgtatgtattcttcagtgaaagacttcgtaggtgaataaaagtgaaattggcttaaagaaaagcagaccataaatgatggtataaggtgtcaccagttgatactgtggatatcaggaacaaccagaaaaccatttctagggagttagaggtgggaggggtaaagagatgccagttcaaggggtctgatccactgctggcacaacctccagaactttagagttattcacaaacctccattgctgtagatagatagatagatagatagatagatagatagatacatacatacatacatacatacatacatacatacttttatttgaaagaaaggaagaaatacagatagacaaaaagaaaagaaggaaggaaggaaggaaggaaggaaggaaggaaggaaggaaggaaggaaggaaggcagacaggcaggcttttatttgaaagaaaggaaggattctccctttcatgcctcttgacagaaatggagagttgtgctggtgaatgtcaaggtaaactgagccttcctcgctccagcactaggttttcatcagccctggggtttaacaccttgcaggggattggcaattacaaannnnnnnnnnnnnnnnnnnnnnnnnnnnnnnnnnnnnnnnnnnnnnnnnnnnnnnnnnnnnnnnnnnnnnnnnnnnnnnnnnnnnnnnnnnnnnnnnnnnnnnnnnnnnnnnnnnnnnnnnnnnnnnnnnnnnnnnnnnnnnnnnnnnnnnnnnnnnnnnnnnnnnnnnnnnnnnnnnnnnnnnnnnnnnnnnnnnnnnnnnnnnnnnnnnnnnnnnnnnnnnnnnnnnnnnnnnnnnnnnnnnnnnnnnnnnnnnnnnnnnnnnnnnnnnnnnnnnnnnnnnnnnnnnnnnnnnnnnnnnnnnnnnnnnnnnnnnnnnnnnnnnnnnnnnnnnnnnnnnnnnnnnnnnnnnnnnnnnnnnnnnnnnnnnnnnnnnnnnnnnntaatcctgtgtaatctcaatcagcctgtctggggtcccttttcctctccacaaagctacaaagtccttttcagaattcactgccaaattcttcatttcttcaccctgactaattttaaagacttgatgttaaaattaaaatgacgaaaaataattctaaaatcgaactttgctagtctcctccaatccttccaggtttaacacatctgctccttttaatgatatactgtaaggaggccatagctataataggacacactttggccctcttattagcattctggggtttaaagccttcattttaaaaaatcaagtatagcatcctcaaaaatatctaagtaagccaatcatgatggttcatgcttacagtctcatttggaaagctgatacgggaggatgtcgatgagttggagccagactgggctacatggtataaccctgtctaaaaacaaacaaagaaattaactaaacagactgcctattggtggggtcacatttctcgtggagatctgtctgttggcaccataagaactagagatgagaaatgaccctgggtgaccactgctgtttatctctgtgggagagcggggccagggagttaatactgtggtgttcggcaggccaccaggactcttttcccacagggttacactggagagagaaatgttttgtggcttatgacaagatcacggcagaatattttgtgcatgctgtgatttgtatcacccatttgtgcacaggccataaaagtgcagtttttatcagggacatttgttgaatatagaacagcgttgaagacatatggccactaaataattcacagttatctatcttctcagcagatcccatatacacctaccatgttttaatgcctagtttgctcagaacaatattctttacggctctccctatataaaaatgtttactgactggcagtactatatggataccatgggattggggctggaagacaaggaatgcttactgctttccctgcctctttccttctccattggtttatctcaccagcacccagcctcattggaaagtgtgcttctccgagaaggtggtatgccattctgactgtcactgacaatgctcttctcttgtcttttcagctctatatccatctatagtcccaaggagaatcccaacgcgtttgacacggcagctttcttccaatccgtgggcaatttcctagggatctttgccggctcctttgcaatgggctccgcatatgcagttgttaccgcactgatatcctttgctgttatatggaatccggagacagtgcagagcagccagcatacatgaaatgtgcttaagctgaatgaccccctcagcagcttcaattcaatacagcatgctgagcccattccagtggctgtgtgatcccatgaggcactggatcagtagcagtagtagaggaaacaggttcttcctctatccacagccaaacctaccactgttgagaatgccttctcttagatagccttagaaaaatctgcacctatggaaagttttgggcatggggcatcaagactgactacaggaaggtaaagagaaaggatggaagatacaaggttaaaaacagaacagcatcaagtacagttgataaggcaagggcattctgctgttggtctacttggctgatagggtcagccaagacaacgaccagtaggggtctaaataacttcctaattgtattgtgggggtggggagtgaataaataatgcctgctatatgtgggtttcttttttgtcttaatcattagatggagctatggcagaggtcacatgctgcctgcactagactagatggtgggaacatggactgagggtgtaacacgtgccagggcttcaggctcctccttaaatgaatccatcctgtagcagttataccctctctttacacaggagattaaggtggtaagggcctcccatactaactctgggtcccttaataggaacaatgaacatgatgatactactatcacttaggatttactgggaactttgtcatcccattaagaacctaagcgtttgtttgtttgtttgttgttgttgtttatctcagacactttgtacaatgatcctggaaggtagatcctgtatctacagctgaagaatccctaacaattaaacaatttgattgtggccatactgctcaggtgtttcagggctggagttccacagcgcagactaggtgagaaagttgaaatcagacccccccactcccaggctgcggagcagaatgtgtggccaaagaagtgaacaggctgataaggaaaggggacagtcacggaggccagaagtctgctgggggtcaggtcacatcggcaagaaagcatagaaacagatgcgacaaggaccaagggaaagtcctccaggacagtgctggggccaattggttggcacttggtggctttaaggctctatagataggctatggggagagacaggtgtgcacagctgtctgtctacccctaacctgtccatcttgtcaatcaatggtgaagtagtctcttcagtcaggcctgcaggctctagacttggattttaactcagaactaatgacttcctggaggataaaggaagagatgttctatagcttgcttagatacagagctaatctgataaccaagaaagtgttagctccaccctcccccccccctaaaaaactactaaggattaagagaacactcctgaggagctgcaaagcattcctcctaagtaacaaaggggctgtggggtgtgggaaaggacccaggtaagcccatgttactccacataaagtcacatccagttctttaaagatagatagtgcatgttatggagggaaaaaagcctgacctttggcctctcctatggaatatttatgttcagtgtttggcttgaccacacacaccttgcaggaagggtgttttacccaaagaagttgacctaagctactaacagatttctccatagccctcagtatgtgacagtgctcttctgagcgtatcattctatacaggtgcatgtggcaatgtgcagacagataacgccctcatccaatttcccctcagagaattggaggcaccaagtgggctaggtctatgactaccagagcacagaattttgactcctactattcttgtttgtttgtttgtttgtttgtttgtttgtttgtttgagactcctaccattctgagtctcggtattctggtcttctaaaactgaacaaatcattgtccacatacccattccatttctctctctaaacttggggcgagatgtattattcttattgccaagtcatatgggacagaaatgaggacgaggctagtacactgctttgtagtcacacactcagtgtgtgtggtcaaggcaaggcctgaacacaaatattccaccccagaggttaaatgtcaggcctttctctccataacatgtactctcttttaatgtcgaataggtttcattattttcttctgaaagcattagattataagccaatcatacctcgttattttttaagagcattttgtgcctaacaaacatgttaggaatgtgacaacgtcccatcattgcagactgttaactatctctccataacccattttctgcccagattgggtcagcatcctttagttagttagttagttagttagtattagttctaatttagaatttaaagattattgtctaaatatcacctttgtcgaaatgaatgaaatttttgccaaaggttattttatttgacttaaaaatcaaagtaattctcctgcatctatttatactaggagaggatgagcgttccctcctcattatgagtaactgccttccctgctctatctccagccctaggggagagggtgccacagaggggcctgcatcaggctacatcctagggtccaggaccatcacctcctctaagggactcttctgattccaaggcatgatcttttgcttgcccttcctctctctgccagtgtttctgaggtgacactccaggggccaaaccacattcaggagagttcatacccacagcctgctggtatacagtcttagtagagactctttggaaaaaattgaatttttgtgaatgtgttcagcctgcagtggagcatggacgtcacgctaactccttgaggcctgggtgctacccctactcagatatgaataaacagactctggctctgcaactgtcgtcgccaagtcctttcctcttaggcaacaaggagattgagttataaaaacagttgttgatttccttaacacaccttgtcacttgaccaaatttaccaagctccgtgagttcccgatgctggagacaggcctgtttttcctcctttcttggagtgccttcctgtctgcagaggccgccggcttaacaggtcagtgctttatgctacaatgtgagcaaggcctgtgaatgtgcattgttgtgtgtgtctcggtgtggaatcttcccagccccgcaggagagggaatgaagtctctcttaaatagtgaattgaatggattctatcaaaatcagcctctgccgagctccctggagagaaataatgaaaaataattcatccactttgtgcaaaatagttttaacaggatgatttcaaaatgttcttgtcttccttttggacaggaggggatggtgaaagggactggccgatggttatgacggatgacattacaaatgaaaggctgcattgcactaaatgaaaggctgcattgcactgtgaagggacacacacccagcctcgctagggagaaagagtcagtagcttctgactcccagcagcaggctcgggtgtgggcagcctctccatccagagtgtgcacatctcacacacatcggtcttcataatctccgcaaggctgcctggacaagtgagaacgccaaatgccaatgggtggctctatagtctagtgtcacatatggcagaaagtcgacagagccctccgaggttgtagagttgatctagggaaaactgtcttaagactcatgggctttagcttctctgctatggattcctcaaccaaacttggtctgtcactgtgggggctgtactggggtagctataccaactggcactttacatgtatgagagtcaccagagctcttcagcctgactctacttctctaatggttcagtatctggcactgatttacctaccacattttaactgtcaggaaatctgtgggactcacgacaacaccattactgatagtaaaaatctgtgttcttgggatattttcaatctaatggatgaataacctaagcaacaattaaaatggacactcattgaggatgctccacaaaccactgtcccagatgatttcaatctacagaaagactcaaaactaagaagtgtcccaatccactgtgtgctgagttgtgaggctgagatttaaagctagaaacttcaaatctaaactcttaggcagtcccatgacaaatgagcctcccctgtggcagaccaggccgacctccagcagagggtcattgggtcccaggagcctgccttgcccatttgctgttggtcctctctggcctgttactgcatatcgttttagcatgataaccagttgataaactgacctgaaacactgcaaagcctcatgggttctgtgttcccacaggcttctagccagaaatctgccttgaaagttctcatgatactcaaatcaaggtgtcaccactggatgccaccttctgggcactttatccaaattattgcaatgcaaagactgttatgttttcacgttactaaggagtttgctgaaatgctgtgcatttggggcatacaatagataatatcatttaagtgaaatgacctcttaaatcacagttactcgaaaacattgtttcccctttcttctgtgccttgttatatagttaacttgtaaagttatctacattatgccaacaggaacaataactattaaccttctaggaagattagggagtatattctaatacagatgcacacacacacaaacacacacacacacacctaagacatgtacatttctatgattgaagattttctatttcagagtctattcaactacatcttgctttagaaaggacgtctaaggttagagtccacaggaaacactctacgatggttcttcttaccttgctctttcacagacttctcagcctgcatgtcatgggacctcttagttaaggataaacattcatgctctgggatagagattttctacaaaattagatggatgtgtgttgttatagtttgccaataaacatgactctgagctctctggaactcttactggatgcctaaggacctcacagatggacaatagccagtatgggctttggtagtaggaagaccccagtatctatgactacactcagcagcagggtttcctgagcagtaccccagactggggcaatatgcctaagagacatttgattcagaccaagctagctatgagcatttcctactgccaaagaccaaggctggaaggtccaaatcacttatgtgtttatttgttatttaatccttgctgatttccaaactggatttgtaacaactcataataccagccattcacatcatggggcctcttagttgaggataaacattcgtgttctgggatagagtttttctgcaaaattaggtggctgtgcgttgctatagtatagcatgggtatggctctgagccctctgctaatcaaagtcaaaagagagcatgttaactaactcaggactctttccttgtcaaagaaagtcacatttatttataaagatgtgcaaacaattttaagtgggagttaataaaattttaggagtttttatcagttggatcatcatattcagagtttgaacagcagaatggaaatgtcttagttaccattctgggaaacttggagacttgttcttcatatggtcactccccatattcactgccagtgaaatctgaggttctgataaccaacgcaatctaatctcatctcatgctaatgggaccatcctagactagaagtaaattagtatggtgcaaagataaaacctagggatgttttaagaatacttacctaatgaatatggagcagtgaatagagtggtgtataaaatggaatgagctaaggaatgatggagaccagcagtcatggtggcttgcttgcctggcacactaacaacgcggcacgcaggatctggatattgtacccataagccaccttttcccagaaagattccctgagcctgagcatcaccaagtaggccctcaagaacatcaccccggaagctggacagtgagccttccatgtctacttcatttcttttgtaggttctatgagttggttttcacataagacttgctttgaagacaggatttctgccattttgactataacatgtttgtttttatcatagacatcatcattgttaacttgcttctatggaaagaaatttactgtagaaaatgttaaaagtatacatttgtagaaggaaacaaacttagaaatagcttgtatcattacttcctatttatagccattattaatgttctactgtgtccacttaagaaaagtaataaacagctaacagtttataacaattgctttttatgacattcaatactatggtatataaacttaccttagcttattctaccaagcctttccattgtttacaggttttaatactaatatttttgaagtactactccttatagctagttataaggatttttagttacctgaaaacaatttctgggctaatatcttaagtttacgggagctacccttactgtctttggtaatagtcagtcttcccttgtgctgcagctaacatgggcattcactcaaaacatcaacctattaaacacactgatctgatcactgggttctgtttccctctgcactcccctcttactgaacaaaggcatcctaagggcatgccgctgtttgtcagcatctcatctatgccaacccaccttgtaagctcttggtcctcctttcttctcagtcaactcctcgtcttgccaccttttgttctcatttgccctttatcaagaaaggtaagctgtcgtttgtcatataaacttcaactcgtacttgcccttttattttagtgtgtgtgtatgtgtgtgtgtgtgtgtgtgtgtgtgtgtgtgtgtgagcacatgcatgttcccttgtatgtatgtggtgctcatgaatgtaaaggccagaggttgacatacgtaccttctttggttgctctccaccctataatattgaggcaggatcctccatgaagtcatcactcactgatttagcttgtccggctggccagtgctctcagggatcccattctgtacctcccagatggtggggtcacaagtggaccacaacccgatggtcatttccgtgagtactggggagggatctgcactttggtcctcaaagtaggccctttagtcatggaattgaaattgtctctccagcctccttttccttttgaaatatgttacatcttgtttgcttctgtcatgtaacacggttagtgcagacatgttcaagttttgagttaagtttatcccctttctataagaccttcacatttctttaatgataatatatccttcattgtggtagtcgtttggctttattggtggagtagaatagggaactgatttttttcccagacagtaagccacttgttctagtgccccatggatttaaatctgtctgtgtactcgtgtattaattgtgtgtatgttctgggactcctgctcttcacttagcttttgatcttcagtcattaaattatctcagcttcatggtttatcttaatatccaataggtaaggactggagagatgactgatggctcagtggttatgtgcactgactacccttccagaggacctaggtttggtccccagcatacacatttcgctaacaaccatctgtaactccaactcccgaggatccaatgtcctcttctagcttccatagatgctgcaagcatgtggtacacagaaaaatgtgccttcagaggcaaaacaccatatacataaaataaaaataaatctcaaaaattaatataggtatataaaagtatatctccaatagatcaatctcctacatctacgcctcattttaaaaggccctctgctatctgtagtattcatagttttataattctaaatgaattgaaaatgatgttgtttcaaacagaaaataatttgagaattatatctctatttatttaagtctttttacggcccttagtaaatttttatgattatcttcatactagacttacaaattactttttaagtatctctttagctattttatattgtggtgttctacaagggatggggacttgcttgtccatacacatctagatctcactctcttacttcatttactctttgtggttctgaaacacagtactgacctgatacataggttaaaggacagatgttgcaataggctacaaggtccacaaagtcacgattgaagcatcaaaggcactcagcctgtatcttttgggatgtgtgtgtgtgtgtgtgtgtgtgtgtgtacatgtacacacaaatacttgggtcagagatctatatccggtgtcttcttcaatctctttaattcaatctcactgaatctacaacttacctacttgactacactggctgaccaccaagtcccatgggttctcctgtctctacctcctcagtacaaggattacaggatgctgctgtcctcagttttgttttgttttcttttgttttggtcttttttaaaagatctggattctgaggcactgaaatcaggtcttcagtctacatactgattctcccaagccttttgaaactttgaataagtcagtatagctcatcggagaagcaaatttctctactgtgcatccccggctccatgatagagtaggaagttcctctgtacctgacagaattcctagagttcctttctggctactggtcaggctatcccagaacagatccatagaccaagttaataatcatcatgtatttcattaacctgtaatttggtttccatatgtgctaagctaaaaattaagacatgtggataggaaaacaacctagtctagagtagaggaatgtaggagtcatatgctagtacatctgattaccacccatgctcacttccaatgatagcaatatatcaatgtaatttaagaaatcacacacacacacacacacacacacacacacacacaccactccattggataacagagtcttaagcaaggtgtttcaccctcccttacaaaaataattggcagcttctgcagtcaggtccaccaaacccttttcctgggatgcaaatctttaggagagagatagggagatgtataagttctggtacctgtcctttgcaatagcagaacctcattctattccttcctgccaatgaaaccctagtaatggtttggtacattttctcccctgagacttaccgtgtatccgtccaataaattccctctggtgaaagtagccagggtctgttttgattgctcacaaagaagcctaaacaggatcaaggaaataatgatctacaagccacccacaagttgatgacagaccaggaaggaaatgaggttcaaaggccccacagccttgagtcaagagtacttggggccgtcttatgccaggtgcatacttaagagacaaaccaacaaacaaaaatcaagctttttaaagatagtttgcatggtgcgcatgatccttgttatttcagcttcgtattagaatcatcacaagccctccagggggaaggggctttctcacttccatgtctccaacattctcttcagttgttactaatttgatgatgatcatttgatttatttccaccatctttccctttgattttttttttttttttttttttttgccacttcaatgtctgccacaacctcatctcgggtctcttggaaaccacctgcgagcattcaatagtcacacagaagaacttggttttataggggacaagtggcgtttagacatgcaaatgaaggctggcatttctgttccttggaagtttgatgctactggaaataccacaacacgtgcagttggggaatcttacttaggaagactggacaggtataaagtgcaaatgtgaaaagccttctgaggagaggagagtgcacacattgagatgggcagtggggattctccacatcacagcgagaagagcccagcaaggaagaatttgtgaggctatgtgtgtctggctttcatagccagctgtggagggagcagccactgtcttcgggctcttcagctgactcacaggaactgggacaagccattcttttaat

SEQ ID NO: 116 - DNA, 1096 bp, Mus musculus
atctgaattgcttgcgaagtagcaacaaagtagcagcgtttattctgaaattctgtgggcgccagtctatcctaggcaaccctcatctaagggctcatcccttgtccagggatttctctgagcatcacagtcggtcgagtggagaatggctgggcagcttcggtttacgtcagggaaggatgaagatcattttcaacaccagggagcagtggagctactcgcgtttaattttttgctcatccttaccattttaacaatctggttatttaaaaatcaccgattccgcttcttgcatgagactggaggggcgatggtgtatggcctcataatgggactaattttgcgatatgccacagcgccgactgatattgatagtggaactgtctacaactgtgggaacttgttcttcagcccatcaactctactagtcaacatcaccgaccaagtttatgagtataagtaccagagagagatcaaccagcacaatatcagcccccaccaaggcaacgccatactggagaagatgacgtttgacccagaaatcttcttcaacgttttgctgcctcccatcatatttcatgcaggatacagtctgaagaagagacacttttttcaaaacttgggatccattttaacgtatgccttcttgggaacagccatctcctgtgtggtcatagggttaattatgtacggctttgtgaaagccatggtgcatgctggccagctgaagagcggagacttccacttcactgactgtttattttttggttcactgatgtctgctacagatccagtgacagtgctggccattttccatgaactccacgtggacccagacctgtacacactgctgtttggagagagtgtactgaatgatgcggtggccatagtcctcacatactctatatccatctatagtcccaaggagaatcccaacgcgtttgacacggcagctttcttccaatccgtgggcaatttcctagggatctttgccggctcctttgcaatgggctccgcatatgcagttgttaccgcactgatatcctttgctgttatatggaatccggagacagtgcagagcagccagcatacatga

SEQ ID NO: 117 - protein, 322 aa, Mus musculus
ASQSVEWRMAGQLRFTSGKDEDHFQHQGAVELLAFNFLLILTILTIWLFKNHRFRFLHETGGAMVYGLIMGLILRYATAPTDIDSGTVYNCGNLFFSPSTLLVNITDQVYEYKYQREINQHNISPHQGNAIKMTFDPEIFFNVLLPPIIFHAGYSLKKRHFFQNLGSILTYAFLGTAISCVVIGLIMYGFVKAMVHAGQLKSGDFHFTDCLFFGSLMSATDPVTVLAIFHELHVDPDLYTLLFGESVLNDAVAIVLTYSISIYSPKENPNAFDTAAFFQSVGNFLGIFAGSFAMGSAYAVVTALISFAVIWNPETVQSSQHT

(The sequence listing continues in the following parts.)
